United States Patent Application Publication US 2017/0114356 A1 - sequence listing, part 69

SEQ ID NO: 98479 - DNA, 1825 bp, Zea Mays
ccacggccacgggagaatgccgtgacgcgaacccaacttatttcgtgacaaccaatgcagctcgatagattcatggccgcctccgtagtggtcctcgccgtcgttgtttccctcgccgccgtccttccgatcgctcgcgctgagatcaagacgacacccattgtctccgactcgcgctccgtcatcctatttgaggagttcggcttcaggcgcggcggccacgccactgtctcggccaccggcatcacatggagggtccccgaggattcccagctgcaggccgtggacacgacactgatgggcttcttcctcatctccaattccctcttctacaagatcaacaacgagtccgactacgccgaggccaccggcggcgccttctgcccgctgacaagcaagtacgtgcagcggctcttcctgttcaaggaggtcgcgcccgacggcacggggaggggctccctgaccatcgactccgacgaccagtacacggtgctgttcagcagctgccaggagggcgtggaggtcaccatggaggtgcgcaccgagatgtacaacctgcggcggtccggcgccagggagtacctccccgtcggactgctgccgctgccgtggatcttcgcggcggcggccgcggtgcacttcgcgttcctgggcacctgggtgctcgtctgcgttaagcaccgcaggacggcggagcgcatccacgccgtgatgggcgcgctgctgctgttcaaggcgctcaagctcgcgtgcgccgccgaggaccagtggttcgtggagcgcaccggcacgccgcacgggtgggacgtcgccttctacgtgttcggcttcttcaagggcatcctcctcttcaccgtcatcgtgctcatcggcaccggctggtccttcttgaaaccttacctccaggagcgcgagaagaacgtgctgatgatcatcatacccctacaagtgatcgagaacatcgcatcggcggtgatcggggagacggggccggcggggagggactggctagcgtggaaccagatcttcctcctggtggacgtcatctgctgctgcgcggtcttcttccccatcatatggtccattcgcaacctgcgggaggcgtccaagaccgacggcaaggcggcgcggaacctccagaagctcacgctcttcaagcagttctacctcgtggtggtgtgctacctctacttcacgcggatcgccgcgtcagccgtcgccgccgtgctcagttacaagtaccagtgggccgtcaatgtctccatcgagacggccagccttgccttctatgtgttcgtgttctataatttcaagcccgtggagaagaatccttacctttacgtcggagacgatgaagaggaagccgcgggtgggcagcttgagatggagagcacatttgagatctgacgtacgagacctgcgtgcgtgtacgttatggatgtcttattatctcgatctccgagtgttgtatagttatacagtactacgaacgacgtgatacgattttgatatttttccggtcgcctaaaatgtcctaatcttttcagtcgtcatgatagttctggtgcgtggtctgtttacatgtctttggcgttcctttcttagatgatccaagccttgataacttaatatataagtccggtttggtatagcttatatttaactatttactagtaaaatcattttggggttttagcttcgcaagtagtttttttttctgaagctaatgttgttttaaaaaaactcgtatgataaaatagctttacaaaaaagataaaaaggcaatattactctttaacaatgttcctgagcagcaaccatcatc

SEQ ID NO: 98480 - DNA, 348 bp, Zea Mays
gctgtcaggccgaaaacccgtggacatgacccagccaccggggtctggtcacctgggcgcgcccgctcgtcaccacccggggactgcagcagctggtggacccgtcgctcccggtcggttacgacttcgagaagctggccaaggcggcggccatcgcgtccatgtgcgtgcacgtcgaggtgtcgcaccggccattcatgggcgaggtcgtgcaggcgctgaagctgattcacagcggcgggagcggcgacggggcctgcagcggctgaggctccttcagagttcagaggcggcgcgacggaggagtcccctggaacgacgccagctggagctcgcggaacgacgacc

SEQ ID NO: 98481 - DNA, 2094 bp, Zea Mays
atggcctcgatcagtgctcccgcagtagcatgccgcgtcgcgccggcgcgcgcaacaacctcggttcttcccgcgcactcgcggcggccgggatgcaggtcggtggtgtggcggtgctgggccgcgacgagggggagacggaggcggtgggcagggctgcgggcaaggtgccgcataagctgcgacgtcagccagccgtcagccgtgcagccagattctgagagctctggggagggattggtggcgcaggacgacgggccgcggcggccgccattcgacatcaacctcgccgtcgtgctcgccgggttcgcgtttgaagcctataccagtcctccggcagatgtgggctggcgcgaaactgatgcggctgactgtcagacagtgttcctgtccgatgtgtttcttcgtgaagtatacgatggacggcttgtcgtcaggctgaagaaaggcataaaccttcctgcaatggatccatggggtactagtgatccttatgtaattctacaactgaatggccaaactgcaaaaagccaaattaaatgggcgacaaaggagccaacatggaatgaagatttcacgtttaacattagaaaatctcgtgaaaatcttctgcaggttgcagcttgggatgcaaaccttgttaccccacacaaacgcatgggaaatgctggattataccttgaatcattttgtgatggtaacaatcatggtgttactgttgaattagaaggcctcggtggtggtggaactatagagatagaggtcaaatataagagttatgacgatatcgagcgtgaaaaacaatggtggagaatacctttcgtgtctgactttcttgtgaagagcagcctgggatctgctcttaggatggttcttggatctgaaagtataaatgctagtcagtttgtgaagtctgcatttgggcaactgagttctttcacatacacctatcttccaaagccatcatcattggaaagtggagttgatgtttctaaaagtgatgaagaatcctcagatggcccaactaattcaaatgagcttcaacaacagaatattgattctgaaatcatttcagattctcattctcatagtgaagttcaatctcctactgctgttgttaatagtgaaggaaattcatcgtctgatatgaagaaatcagatgaatatttttggagagctctgaacaatgtactaaaccaaaatgtactacagaactttggattttctctcccggaggtcaagcaattgggtggttttgacctattaagttcacttggtctgaaatcacgcaatattgctgaacaggaatatctagaatctggacttgcaatggcagatacttcaacaaatggtggcagtgaaacaacttctgaaaatacagttggtgttgagaatgaaaatagaacattgacaaccaaagaggaggtgcaatcttcctttccagatataaataaagtatctcgggatgtattgtctcaaacagaaaatatactcggagctctgatgatactttccaaaaatctctcaccacatgatcagtcagtaccgacaactggaacaaatgggaaatatgacatgattagagaagagcaaggtgcttcagctgcagattctgttcaaaaggctgatactgtttcatctgcgttactgtccattgatgcacaggaagcagaggatatgcggcgcttgtttgcaagtgcagagactgccatggaggcatgggctatgcttgccacttcactgggacgtaacagtttcatcaagtcggactttgaaaagatatgttttcttgacaatatttcaacagacacacaagttgccatatggtgcgattcttctcgaagaagactaaaccctgagaggctaggtggtgacttcaaacaagaagttcaagttcacagtggattcttaggtgcatatgactctgttaggaacaggatcatgactctcatcaaatatgccattggatacgatgatgaagaagatgcagaaaacatacctaggtggcatgtttatgtgactggacacagtttaggtggagcactagcgactcttcttgctcttgaactttcatcaagtcaaatggccaagtag

SEQ ID NO: 98482 - DNA, 474 bp, Zea Mays
atggatgcactaactaattcaaaccaaaagaaagtaaaggacagttggagaattgtcaaccaccgggatatcattccaacagtgccacgtcttatgggctattgccatgtggaagcaccagtttatcttaaatttggggacgcaaaagatgcaccggtatccatgttttactgtaccagacctccagttgtcaccaaaaacataaaattgcatttgtatgtgatacagatgaaaggcgagaagcaacttgtggaaaaactactgcaaacagaaataaatttactccgctcaatcagggatggttcggctcttatgcagcacatggaagacttctactatgtcacccttcttgaggtttttgagaactatttctgcttttctcataccaaattgtgtcaaaagctcctcaagaatgtgagatcaagttatcaagtggcagatactgccaatgatgaataccaattgacagcgtga

SEQ ID NO: 98483 - DNA, 825 bp, Zea Mays
atggatccactgcgctcggcgcaggagctcttcgcgcgcgttgctctcctccatggatccactgtgctcggtgcaggagctcttcacgcgcgcacctcgcctttccttctcctgttgttggggaatgttgagggtgacaagttcaatgatttttctaatcaggacacatttatttggcatgagcatattgcatctttgtttccccatgtttactttgccagctcgggttaccctgtggacctaacagatcctgagtatgatcacaagtctatatttgggaggacacattttgttgtggcattcttgccaaattcaaaagctggtaaaaagaagaacttgctaggagattcagaagagcctaaagagcaagcaccacataaggttgttattttcatcctttgtcatcaagtactagctttcagggacataaacgctcaagctccaacacacatcctcatcatccccaaagtcaaggatggactaactggtctgtcaaaggtctacgatggatccatcctgttggacaatcgctcgagcatcgtgtcagagaatcggacccctcttagaataagacgatttggagtgctacaattttgttttcttctcagctcctcctcttggtcccagcagctcctcgacgtcggcgtccgcatcatccaagagaaagaatcaaagatggatgcttctcaggcatctgatggggagctccacactagcgtgctcaaccactatgctatcaacgtttgcaccatagacctcagtaccattttatggaggaggagctggcaggaacaagacctcaagcccaagcagttgaaagtgtga

SEQ ID NO: 98484 - DNA, 234 bp, Zea Mays
atggactgttcctgcggcgtcacgttcgacgacagcgaggagatggtcagctgcgacgagtgcagtgtgtgggtgcacacgcggtgtgcacgctatgtccgcggtgtccacacatccttctgccacaaatgccggaggtccaagcgcgtgccttcctccaccgacgaggccgaggttgctgagctcctcgccgagctgccaacccaccgcccgcctccgctgtaccgccgctag

SEQ ID NO: 98485 - DNA, 290 bp, Zea Mays
gatgccatggcaactttaagacacatggagaatatttggagtggaaccttagtcaccgctacaccatctcagcctatgtaataaccatgtgtaaagttcagtttggacataagatgatttgtttgaacttttggggctataaaattctgttttcagctcaactagaagaactattcgttttcagaagttattgattattgtgcttttgataaataataacatgtgttttgttcaaatacaaaacttaaataggaaaggacaaatctattgtcttgtggagcatccaagac

SEQ ID NO: 98486 - DNA, 237 bp, Zea Mays
atggggtcgtcaagcatggcacgcagggccgcagcagagtggggtgtcgggcctgcactagtgagggcaggcattgtagacgtgctggccaacgagctagggtgcaggggcgatgaaggtgacaggagccgtgctggggggcaactaggatgggtgtcgcgcctgtgccacggatggggaaggcagtcgcacccactgcggcgcttggagtggggtcggcaagggaaacgtcggtga

SEQ ID NO: 98487 - DNA, 2080 bp, Zea Mays
gtgtcccgtcctcgcatcccgcgccacaccctcccaatcccctccccctcgcgtatccacacttttcacacgcgacgccggagagacagagcgcgcgcgcgcccgaaagatgtcgacgtgcgcggcggacctggcgccgctgctcggcccggcggcggcgaacgccacggactacctgtgcgggcagttcgcggacacggcctccgcggtggacgccacgtacctgctcttctcggcctacctcgtgttcgccatgcagctcggcttcgccatgctgtgcgccggctccgtccgcgccaagaacaccatgaacatcatgctcaccaacgtgctcgacgccgccgcgggggcgctcttctactacctcttcggcttcgccttcgccttcggcacgccctccaacggcttcatcggcaagcagttcttcgggctcaagcacctgcccaggaccggcttcgactacgacttcttcctctaccagtgggccttcgccatcgccgccgcgggcatcacgtcgggctccatcgccgagcggacccagttcgtcgcctacctcatctactccgcgttcctgacggggttcgtctaccccgtggtgtcgcactggttctggtccgccgacggctgggccggcgccagccgcacgtccggcccgctgctcttcgggtccggcgtcatcgacttcgccggctccggcgtcgtccacatggtcggcggcatcgcggggctgtggggcgcgctcatcgagggcccccgcatcgggcgcttcgaccacgccggccgctccgtggcgctcaagggccacagcgcgtcgctcgtggtgctcggcaccttcctgctgtggttcggctggtacgggttcaaccccgggtccttcaccaccatcctcaagtcgtacggccccgccgggaccgtccacgggcagtggtcggccgtgggccgcaccgccgtcaccaccaccctcgccggcagcgtcgccgcgctcaccacgctgttcgggaagcggctccagacgggccactggaacgtggtggacgtctgcaacggcctcctcggcgggttcgcggccatcacggccgggtgcagcgtggtggagccgtgggcggccgtcatctgcgggttcgtgtccgcgtgggtgctcatcggcgccaacgccctcgcggcgcgcttcaggttcgacgacccgctggaggcggcgcagctgcacggcgggtgtggcgcctggggcgtcctcttcacggggctcttcgcgaggcgaaagtacgtggaggagatctacggcgccgggaggccctacgggctgttcatgggcggcggcgggaagctcctcgccgcgcagatcatccagatcctggtgatcgccgggtgggtgagctgcaccatgggcccgctcttctacgcgctcaagaagctgggcctgctgcgcatctcggccgacgacgagatgtccggcatggacctgacccggcacggcggcttcgcctacgtctaccacgacgaggaccctggcgacaaggccggggttggtgggttcatgctcaagtccgcgcagaaccgtgtcgagccggcggcggcggtggcggcggcgaccagcagccaggtgtaaaaaaaaaatcaggagcaaattgaaaccgagctgaagttacgtgcttgcctttttcagtatgttgtcgcgtatcacgtttgaggtggatcgtatctgccggtcagtacgcagtgtttgggcaaatacttggctacttgggagtcgcaagaaattgtgtaaattatatagaggaggatggcgacgaagcacgcatgtgttacgtagttggggtttgtgtgcacatggtggtgggcaggggctaggagagggtttatctttaggttattttcgtagtggaatgaatcttatgatcggatatccatcgtcggaaggtgtggcgggctgctggtcaagataggtggcttctatgactatgagggttgaaacaacaagtggacgattctgtcctgtggtcactgctcatcatccaatctagcggctttgacggtcgtgcctttttagtatcaataatattattccaagtttaaaatacca

SEQ ID NO: 98488 - DNA, 477 bp, Zea Mays
atggtgagtggctctgtgaggaggcacacaagctcacattggcggcagcaagaacggtgtcgcctccttggtgggtggcaaccaggcgcacgacacctgctccctcccacaccgcgccagcaccagaatagcggcgtcgcgtcggcgagcacagcgcagcgcgcaacggcccgggtgcatgaggagggggcgtcggctgccgaggccgaggctgtgacgaaggagcgcggagggcgatgccgctagtcaggttcgaggtgcggaatgaggtggggctgggggaccccggcctctacggcggcggagcttccgctgccgccgctaccgcgggggaggaggaggagcccaatgcgctgctcgagggcgtcaccgtcgcgggcctcgtcgggatcctgcgccagctcggagatctcgcggagcgaggcaggttcatatccagacaagaagccacgatggaatctggatttcccctctatc

SEQ ID NO: 98489 - DNA, 1207 bp, Zea Mays
atgggagggaagggggtggtgccctgcgcgctgtggaggtgcagggggttcgcgcgcttcgtgaacgtgcgggacgacaccggagcgacgccgctgcacctcgcggcgaggcagggctggcggcgctgcgtccacgtcctactcgagaacggcgccatcgtgtctgcctccagtggcgccttcgggagaattccgtatgaggtcgccgcgaagcgagggcacgtcgcgtgcgcggcgctgctgaacccgtcatccgcggagccccttgtctggccgtccgctctcaagttcatcagcgagctggaacccgatgccaaatctttgctcgaagcagccctgatggaggccaacagagagagggagaggaggatcctgaaaggcgccaagaatgcattgccctcaccatcgcaccccgatgatggcgctcatgacaccgccatagctgagggccagcgacgcgtaggtgtgcagcatctgcttcgagcaggcgtgcagcatcgaggtccgggagtgcgggcaccagatgtgtgcggcgtgcacgctggcgctgtgctgcactgctgccacgccaagcccaacccggcgatgcagtcccagccgctgccgacctgcccgttctgccgcggcggcatcgcccggctggtggtggccacgcgcacgagggccggcgacgacgaggagcggggcaagctggagtctcccaggcactgccggtcccgccggtccatgagcctcagcggcgacgcgggcagcaccagcacccttatgggcagcatcgcctcctccatcggcaagatgggccaccggcgaacagagagcagcgagcaggtcgacgacgacaagccgtagcaaaatcattgtttcctttcatgcatccatccatgcgtaatccacatgtgaaaatcggtgcgtatgataatcctgcaacgtcggcgtcgaacaaggcacaacttttgtagattatttttttggcaagtgagctcttcacctgtgtaggttcattcaagagagagtcagtgcgctggcgtgctgtctaggctagatccgatcagcgatgatccgaataagcagctcgtccttgcctgtcagcccccatgcggccatgccccccgtggtccgtgtatggagttcttgaaagactgctgagaaaacatgcctgattcgcaaagacctggtccggcatggccatgagaaacagtacaaatcc

SEQ ID NO: 98490 - DNA, 703 bp, Zea Mays
aagttgaagaatcctaagctgaagaaaagtgtaccgatttcttatcaatttgagaatcctgatattataagggagagggaagaggagcagaagctgatgaaagaaaagcagaagaaggagaaggccgaaagaaaaaagggaaagagtaagaggaagcatcgatcgccgagtgattcagatagcaacagtagtggtgctttggtgttcgactccgaatctgaatcatgagtgacaggctctgaatactcttctggaagcagttcaagttatagttcatcagactccgagggcaagaagcgacaacacagaaggaagcagaagaagagaaggcacaggagggacatcacatcatcatcatcatcttctgaatctgagtctgcgtctgacagtgattctgatgataagggcagacggaggaagagtaaaagacgggctggtaggtgctgaatttaatgatctagacaaagcagtgtggaagttgaatatcattatatacttccgttctattcatgaatgacctttcatcatcatctgaacatgtgtcgggcttctcggatccaagaaacagatttagcatttgctttcctgaacggtagcactgataattttcactgtatgttcctatgatctttgtgtgaaccattgaatcctgtaacaatattcacctatggatttttcttaagtttggtgtggttcatcgtca

SEQ ID NO: 98491 - DNA, 1563 bp, Zea Mays
atggccgacgacgagtggtgctacgcgatcaaccgcctggaggatgacgagcgcggctataccggcgataaccgcagggcttggccacagtggccatcgggcccgaactccgcgtctgcccaccgtggcgatgatagtcttcgtccctccggctcgcgtccgccgaagagacgccggcacagagcaggtgatctccccaagcctgtacattttgtctcagcggccgtctcgtcgcccgatgagcatgggggttctcgtgatctcgaatcctcgtctgaggatccgcctcggcaggccacgccgccggagccggggagcctggcgtccaacgcggtggtggcgcagatgatgaagcggatgaattacaaggaaggcgccggcctcgggaggcacggacaggggatcatcgctcccatcgaggtggccgtccgtcccaagaacgccggcctcggcaccgtcgagagatccatccgtggagcggaccagccgccgccacccagcgacgaaaactggcccacgtgggacgaagctggaggagcgaggaaacggaagcgcgatcgggaactcgacgacgacaagatcctagccggacgtctggaggagagcgccgccgaggctgtcgtgcgtgtgaaggagtcactcgcgcgggcggcccggtggccatcgacgtcgagtggcctaggagacctgggaccccgggatgagatgcagagcgcgtcggggacgctcacgacgggagagctggtccgcgagttcgcggccttgaaggagaggtgcccccgggagtacacggcgtaccgcctcgggcacgcggcgcgcgcaatcgcagcgccgctgctgcgcgcggcgttccagcggtgggaaccgctggaggacccgtcgcgcgggctggagacggtgaccactctcagagacatactctcggacgacggctcggccgcctcgccgtacggagcgctggtcgacgacgtggtggtgggacccgcgctggcatcggcggccgagacgtgggaggccaggaacccggagccgatggcccggttcttggagacgtggggcgacgcgttgccgctctccgccgtccagcgcctcctggagcaggtggtcgtgccgaagctgtcggccgccgtggagtcgtgggagccgcgttgggagcctgtgccgtgccacgtctgggtgcagcggtggatcccgctcctcgggcgacgacggcttgagccgctgtacgtgacagtgcagcgcaagctcgggaaggcgctggtgggatggcacgcggcgcgcgcctgcgctgactacggcatggtattgccgtggaaggaagcgttcagggcggaggcctgggaggagttcgtcggccggcacgttgtgccttacctgaggcagggcctgcgggcactgcacgtcacaccgccgaagcaggacgacggcgggttcgccggggtgatgagttcaccgcctgaggatctttgtttgtccatcacgccgatttcattaccagtctatgcaaataagttcaatctcttctggctgatccatttgaacccaaactggtttacaggataa

SEQ ID NO: 98492 - DNA, 1200 bp, Zea Mays
tatagaatcttttaaaatgcaagggtgtcatactcgcagtcgcacagacaagtagataatcgctcgagccatcgagggccagcctgtgctgttggaagcgtggatgcggccgggctcagccgttgatcgttgcgcggtggccgtgagtcgtgtgactcgtgaccaaccaaaccgttcagctcccccatgacgtgtgcgtgacctcactctcagccagagatccacaaccggtgaaccgccgcgaatcctcggcctcgcatccgccggtggccgccgggggcgtggagcaccaacttttcacctgctgtgagacccccactcacctccacggaagcacacacccgaagaagaagagaaggcgagaaccatggcgccacctgccgtgtccatctcgcccatctgctgcgtcccataccccgcctccggcccccgtcgcgctcgcacgcccccctcctccctcagaaggttccccagattcgcagcccggaggagtagcgggggcggcgggggcacgcgcccggagcccaaaccagatgacaacgagagcaaagccgtcctcgacgccttcttcctcgggaaggccttcgcagaggcgctcacggagcgggtcgagtcggtggtgggcgaggtgttcagcgtcgtcgggcagtggcaggccgagcagcagaagcaagtgcaggatttccaggaggaagtagttcaaagagcccaaaaggctaaggagaaagctgcaactgaagtcagtgatgataagggggcgaagtctctaagggaaccttcagcaacaattgtggcgactacaactacgtcatctcccccagctactcccacacagacagaatagttgtagacttcttggtggcagtgaagagttgttgctgcaagttgatgcagttctttgtgcagccaaaaagtctgtagttggctttcacatgatatatgtcgatggatagtatatctgctagtgaaacatccagcatttctagtgacaaacccagcatctcaattataaaaaaaaactaatttacatttttttcatatgaatggaagtactttttgcatctagtgcgttctggtatatgtgtaatatatgttatatgccattcttaagaaatgcagcttcaaaaaccttgggtaagaatatagaattactgtctcgatttatgctattggctgtaatttataactttgatttatgct

SEQ ID NO: 98493 - DNA, 889 bp, Zea Mays
gacgacctgcagttacagacaggagtacaggactagctccggcggcaaatatcaaccgccacgccacggccgagaaatatccaccatccacggctagtgtccgtgtcctcgcagctgcagttcactcccggtcctggtgacccacgcccgatcctgctcccggacaatgatcgccgccgccgtcgcggcaggcgcggccaccgccttcccgttcgtctccaccgcctaccgccgcccgcgcctccagcagccctgtccgcgccgcgccgcggccgtcctcccggcccgcgccaccggcggtgcctcgtcctgggaggagcgcgaggaggcgcggtggctccgcgaggagcagcgctggctgcgggaggagcagcggtggctccgcgaggagtcgcgctggcgcgccgagcgcgaggccctcctcgccgaggtggccgcgctgcggctccgcctccgcgcgctcgagggcgctcgccctgaccacctcgcggtcgccgtcgacgccgtggcctcgcctgcgcccccgcccgcggtgcccgcgccgcagcccaggccggcgctcatccaggaggcagccgcggtggaggtcgaggtcgaggtgaggaaggaggtggtggtggtccaagagaagaaggtggcgcccaaggccgaggcggcggtgagcggcgcagctggtgccagcgagagcaggaggacgctgaggacgggggccgagggcgaggacgtgcgcgcgatgcaggaagctttgcagaagctcggtttttactcaggcgaggaagacatggagtactccagtttctcgtctggcaccgagcgagctgtcaagacatggcaggttattaatactcctcaagattatccttcacactacattgcatctatatatgct

SEQ ID NO: 98494 - DNA, 790 bp, Zea Mays
cgtctccccaagatccatcggctcacgcactgacgcacatccattaccttctataatacgtctgcggtgtcaaaatttccctctcagccgtgttgctcgccgccgccccgccgtgttgctcgccgacaccgccccgccggcagccaaaatgccgttcaagaggttcgtggagatcgggcgagtggcccttgtaaactacggcaaggagtatggccgcctcgtcgtcatcgtcgacgtcgtcgaccagaacagggctcttgttgatgcccccgacatggttcgttgccaaatgaacttcaagcggctttccctgactgacatcaagattgacattaaacgtgtcccaaagaagactacactgatcaaggcaatggaggaagctgatgtgaaaagcaagtgggagaatagctcatggggcaagaagctgattgttcagaagaggagagcatcactcaatgactttgacaggttcaaggtcatgttggcgaagatcaagaggggcggtgccattaggcaagagcttgctaagcttaaaaaggtggctgctgctgcttagattgctttggtggttcctctattcgatctcttgaaatgtaatgcacgaattactttgacagttagcttgtcaagatgtcaattttaaactggcttatttagatattttgtccaaaatgctattctgaatctgagatagtgttgtattctgatatctatcaagtgttgcattgttgttacattcaacgttgttgccggctggctttcagtttcatgtgaccaatatttgccatct

SEQ ID NO: 98495 - DNA, 327 bp, Zea Mays
atgggggtgtcgggatggaagctctgtgtgtggacgcctatgttttctgggaagacaactgatagagtgtttggcgccttgtacttcgttattgtcacaatgacctcggttggctatggggatcttttcccaaacagtgacacgacaaagctaattgcttgcacttttgtattcataggaatggcgatcattgctctcttaatcagcaatgtggcagattaccttattgagaaacaggaggtgttgttcttcaaatcactgcacatgaatatgaagggaaacaaaacccaaatgctcagagcaatggaaacaaataggaaaatgtag

SEQ ID NO: 98496 - DNA, 107 bp, Zea Mays
ttttttttatcaaattagcattgtgttgttgtgtggtcatagacacaaaactaatagcagcacaagttggtgtacttgttgtgtgttgtttgaggcaatttgtgttg

SEQ ID NO: 98497 - DNA, 236 bp, Zea Mays
agggaacgtcgaacgccgacagttgtagtaccgacgcagtggacatagtgcgtttgagggcttggaaggcctcatccgcgtccggccccactgatcgcttctgacttgtgaaaatggcggatgaactacgctctacttctatggtccagagggttcatgggcagtctgtgttgttgagcagcatatcttcctattctaccatgaacaatcatgtatgcatattctgcttacaatgt

SEQ ID NO: 98498 - DNA, 2043 bp, Zea Mays
acccatgttcctgttcccacactcgactgtcatcctgtgatatccgctcgccagtcgccactccgtttcggcattccgcctcctcccgacacacctctttaactcgcttccgtttccaaaaaaatgctccagttaatttaatccagacgaggaatcgcctcgccgcggatctctccgctcgccgacaagacccgctatcggctccggcgggaagactcgcactacggtggggcgcgtcgccgccgctcggcacgtggctcgtcggttcgacgttcgcttgtggaggtcgtcggggccagcggtgccggggcaatgcggtcagtttgtggagccgtctgaggcgcttggctgggatctgagggtgtcaggtagggggcgcgagcgagctctgtcggtggggagttggtggtggttgtagcgtagggcgcgtcgcgtgtttggctgccgggatggagcacgtagttgggggcaagttcaagcttgggaagaagatcgggagcggatcatttggggagctctacctcggcgtgaacatgcagagtgacgaggaggtggctgtcaaactggaatcggtcaaatcacgacatccccagcttcactatgaatcaaaactctacatgcttttgcagggtggaactgggattccacatcttaagtggtttggggtggagagggagtacaatgtcatggtgattgatctgcttggcccaagtatggaggacttatttaactactgcagcagaaagttctcccttaaaacagtactaatgcttgctgatcagatgatcagtagggtagaatacatgcacacaagggggtttctacatcgtgatatcaagcctgataatttcctcatgggtttaggacgtaaagcaaaccaggtatttgtcatcgactatggccttgcgaaaaagtatcgagatctccaaactcataagcacataccatacagggaaaacaaaaatctcacaggaacagcacgatatgccagtgtaaatacccatcttggagtagagcaaagcagaagagatgatctggaatctcttggttatgtgctgatgtatttcttaagaggaagtcttccttggcaaggcctgaaagctggcacaaagaagcaaaagtatgatataatcagtgaaaagaaaatgcttacaccagttgaggtcctctgtaaatcgcatccatcagagttcactgcatactttcattactgtagatcactacgatttgaagataaaccagattactcctatttgaagagactcttccgtgacttatttctccgcaaggggtaccaactagattatgtatttgactggaccattatgaagtatcctcagtttagagataaaaacaaatttcagtctagcggcaagactagtgggttggcaggcccttctgcagaaaggaccaatagaactgcagctgaagctttgtttagaagaactagatccggttccggtcacaatcgagaacacaccaagcacagaagtcttctagagtcactgatgccatccaaggtgactgttgattcggataaaataaggccatcgtcatcatcgcgcaatggaagcacgtcaagaagagctgtgctttcatcaagcaaaccaagctcttctggagatccaagcgacccaaaccgcgtgggcggcttggccccgagtagcagcatacgcccattgagtgcccaaagggcacatcattcaggtggaacagagatcaaatcattatcttggtcaaaaatgggaaggtcttcacatgatgacgctatcaggaacttcgagttgctctcactttgtgctgacaagagaaaaataaggaactaacgaaatgggctaggatctggactctggatgatgacgattgattgctgggggtattatgagcaggcagctccagtatttctatgttggaaaatgttcttttaaaaataaaaaatgatttaacttatgagattgttttcctccagtctaaataagctcttcccaaaggggatataattctagcatagcatctagtcaaaccattttgaattcgaccaaa

SEQ ID NO: 98499 - DNA, 2040 bp, Zea Mays
acccatgttcctgttcccacactcgactgtcatcctgtgatatccgctcgccagtcgccactccgtttcggcattccgcctcctcccgacacacctctttaactcgcttccgtttccaaaaaaatgctccagttaatttaatccagacgaggaatcgcctcgccgcggatctctccgctcgccgacaagacccgctatcggctccggcgggaagactcgcactacggtggggcgcgtcgccgccgctcggcacgtggctcgtcggttcgacgttcgcttgtggaggtcgtcggggccagcggtgccggggcaatgcggtcagtttgtggagccgtctgaggcgcttggctgggatctgagggtgtcaggtagggggcgcgagcgagctctgtcggtggggagttggtggtggttgtagcgtagggcgcgtcgcgtgtttggctgccgggatggagcacgtagttgggggcaagttcaagcttgggaagaagatcgggagcggatcatttggggagctctacctcggcgtgaacatgcagagtgacgaggaggtggctgtcaaactggaatcggtcaaatcacgacatccccagcttcactatgaatcaaaactctacatgcttttgcagggtggaactgggattccacatcttaagtggtttggggtggagagggagtacaatgtcatggtgattgatctgcttggcccaagtatggaggacttatttaactactgcagcagaaagttctcccttaaaacagtactaatgcttgctgatcagatgatcagtagggtagaatacatgcacacaagggggtttctacatcgtgatatcaagcctgataatttcctcatgggtttaggacgtaaagcaaaccaggtatttgtcatcgactatggccttgcgaaaaagtatcgagatctccaaactcataagcacataccatacagggaaaacaaaaatctcacaggaacagcacgatatgccagtgtaaatacccatcttggagtagagcaaagcagaagagatgatctggaatctcttggttatgtgctgatgtatttcttaagaggaagtcttccttggcaaggcctgaaagctggcacaaagaagcaaaagtatgatataatcagtgaaaagaaaatgcttacaccagttgaggtcctctgtaaatcgcatccatcagagttcactgcatactttcattactgtagatcactacgatttgaagataaaccagattactcctatttgaagagactcttccgtgacttatttctccgcaaggggtaccaactagattatgtatttgactggaccattatgaagtatcctcagtttagagataaaaacaaatttcagtctagcggcaagactagtgggttggcaggcccttctgcagaaaggaccaatagaactgcagctgaagctttgtttagaagaactagatccggttccggtcacaatcgagaacacaccaagcacagaagtcttctagagtcactgatgccatccaagactgttgattcggataaaataaggccatcgtcatcatcgcgcaatggaagcacgtcaagaagagctgtgctttcatcaagcaaaccaagctcttctggagatccaagcgacccaaaccgcgtgggcggcttggccccgagtagcagcatacgcccattgagtgcccaaagggcacatcattcaggtggaacagagatcaaatcattatcttggtcaaaaatgggaaggtcttcacatgatgacgctatcaggaacttcgagttgctctcactttgtgctgacaagagaaaaataaggaactaacgaaatgggctaggatctggactctggatgatgacgattgattgctgggggtattatgagcaggcagctccagtatttctatgttggaaaatgttcttttaaaaataaaaaatgatttaacttatgagattgttttcctccagtctaaataagctcttcccaaaggggatataattctagcatagcatctagtcaaaccattttgaattcgaccaaa

SEQ ID NO: 98500 - DNA, 717 bp, Zea Mays
acacaaatacgcctctgctttagcagtagtttccaaccagaggcaggcacctcgagaggcgggtgaacatggagggcgataagaaggcgggcgccgtggcagagaagaaggcggcggcggcggatcagagcaaggaggtggccgctggtgatgtgagcctgaaggagctgtccaggaggctcaacgacttcgccaaggagagggactgggagcagtaccatagcccccggaacctgctgctcgccatgatcgctgaggtcggggagctgtcagagctgttcatgtggaaaggggaggtgcgcaagggcctcgcggactgggacgaggcggagaaggagcacctcggcgaggagctctccgacgtgctgctctacctggtccgcctctccgacatgtgcggcgtcgacctcggcgacgccgccctcaggaagatcgtcaagaacgccgtcaagtacccggcgccgtccaaggaacaaggcgcctgatgatgacgaacaataccacctgtgatgctttctttgatgcttttgggatagctggtgcctggtagaaccaggcagcgagatatatgaactgattcttggacccttcacccccctcccccccctcccccccccccccccccttttttttttgcggtgcatgcagcatgctcgaaggttaataattgatacaattattgctcggctgatagctttttttttttgccttttgaaa

SEQ ID NO: 98501 - DNA, 1484 bp, Zea Mays
gcttattgcctggcatgacacaggcacagcgcacgccacagctagcgatcccgcgtcgtcgtcctggcttcctccctataaaaggatccggccggagacgcagccacgctcaagagtcaagatacatcagagtagctcattgcatagtttcagtgtgtaattatatatttgtctcctctagtgcagtactagagtctagtctagctagtttagattgagtctgcttgttcatctagcgcgtgttttggggtaggtagctagctagctagacacgcgcacccggacaaacgcacgcagcagacaccaagcaggaatcatcggcggcaggcggagggatggggctgagggagattgagtcgacattgccgccggggttcaggttctatcccagcgacgaggagctggtatgccattacctctacaggaaggtggccaacgagcgctccgtgcaggggacgctggtggaggtcgacctgcacgcgcgggaaccatgggagcttccagacgcggccaagctgacggcgagcgagtggtacttcttcagcttcagggaccgcaagtacgcgaccgggccgcgcacgaaccgcgccaccaagacgggctactggaaggccaccggcaaggaccgcgaggtgcgcgacccggccgcccgcgccgtcgtcgtcggcatgcggaagacgctcgtcttctaccagggccgtgcccccagcggcgtcaagtcatgctgggtcatgcacgagttccgcctcgactcgccgcgtacgacgacgacgccaccgaaggaggactgggtgctgtgcagggtgttccagaagcggaaagtcgacggcagcgagcaagacaacggcgtctccccctcgccgccggtctttgccggcgcatcgcagtcgcagggggtcgtcctgccgccggaccagccctgcgtggtggacgcgtacgtcgtggtagaccagccgggctcttcttccgtcggactcgcgccgccgcaggagaacctcggtagcggcctggacgcgttgctgacgaacggagcgatgtggcagtacacctcgtcggtcttcggtcacttgttgccgcaggaggcgaccagctccccgccggtgatggacctaggctccaggggaggagaaggaggagactacgggtgcagcttcttctacgacagcagcttcgaggacatggccaacatcgggttccgacaagggtggatgggctgatccaggaccaggaagcacacgtacgtgcgtgcagtcatgcgatatggaatgtgcatttgtgaaggaagtgattgaattaattgattccattagtagtagcaccctctagtgttgtacagtaggtacgtatatagtgtgagattagattattattgggaattgttagagtgcaccggcctctcaaatccaaagaagtaacagcggaaagaaaagctagtagctagagcacacatgtatatatttgcacaaggtagatggtttgatcaa

SEQ ID NO: 98502 - DNA, 1606 bp, Zea Mays
aaagaaacaggtctgtagtagcaactagcaagtgcagtccgcatcatcgtcctcattgatcatcgtggtcgtcatcatcataccatacagagaatatgcatgcggtgccggtgcagcgctagctgcagttgggttgcggccgcagagcagcagcaggaaggatggcgaccaaggtggtggtggacctgcggtccgacacggtcaccaagccttccgaggccatgcgcgcgtccatggccgcggccgacgtcgacgacgacgtccggggcgcggacccgaccgcgcgccgcttccaggaggagatggcggcgctcatgggcaaggaggccgcgctcttcgtcccgtcggggaccatgggcaacctcgtgtccgtcctcgcgcactgcgacgtccgcggcagcgaggtcatcctcggcgacgactcgcacatccacctctacgagaacggcggcatctccaccctcggcggcgtgcaccctaagaccgtcagaaacaactccgacggcaccatggacatcgacagcatcgtcgctgcaatcaggcctcccggcggtggcctgtattacccgaccaccaggctcatctgcttggagaacacacatgggaattccggagggaagtgtttatccgcagaatacactgaaaaggttggcgaaattgccaagagtcatggcctgaagcttcatatcgatggagctcgcattttcaacgcctctgtggcacttggagttcctgtggacagacttgtgagagctgcagattcagtttcggtatgcatttctaaaggtttaggcgcccccgttggatcagttattgttggctcgaaggccttcatcgacaaggccaaaattctccggaagaccctaggtggtggaatgaggcaggttggagttctctgtgctgctgctcatgttgccgttcgtgacaatgtgggaaagcttgcagatgaccacagaaaggctaaagctttggcaggttctgggaacgcacaatgtgctcgcaagtccaaggagtccaaaaagtgtcaggcttgtccttcattaccaaatttcagatgatgatgttcaatatgcactgacgtgttttaagaaagctgctgaacagctactaatgggcagtactgaactcgagcatttggctgaacagctactgatgggcactaccaagaactcgtacgggcaatagggcaccctgatgcataagctcggtgtggtcttatctgtaatcagctcgaaatattgtagccgcaccaaacctttgctgaataactgttgcttctcacttgtttattggatgtgttcgttcctgtgctttggcctgtttggtttaacttttctctgaccggtttttctgagaatctggttgtgcaaaaaatcctgctatagagagaatctagtatcatggggattacgagtggaggaagatgaaggtgttcataaggttcaggatctagaaataaatggatttctactatttcaaagactcggctgattatgtgtttatgtcaattttagatatattaccaaatcggttcttatagaagctagccgaaaagctgagtgtttggcagtccgcaacagcttttggtggctagaaaatgaaaaaa

SEQ ID NO: 98503 - DNA, 1761 bp, Zea Mays
aacagcgcgaaacatctgtcagttttccttcaaaaatggaaaagcgaaggcaaaaccaaagtttgttgtgggagtgggacgtgacaccccgcacacatcagttcatttcagtttcagcaggtcagttttcgtcctgatactctgtcgctgcagcggtgccggtgcagcgctagctgcagttgggttgcggccgcagagcagcagcaggaaggatggcgaccaaggtggtggtggacctgcggtccgacacggtcaccaagccttccgaggccatgcgcgcgtccatggccgcggccgacgtcgacgacgacgtccggggcgcggacccgaccgcgcgccgcttccaggaggagatggcggcgctcatgggcaaggaggccgcgctcttcgtcccgtcggggaccatgggcaacctcgtgtccgtcctcgcgcactgcgacgtccgcggcagcgaggtcatcctcggcgacgactcgcacatccacctctacgagaacggcggcatctccaccctcggcggcgtgcaccctaagaccgtcagaaacaactccgacggcaccatggacatcgacagcatcgtcgctgcaatcaggcctcccggcggtggcctgtattacccgaccaccaggctcatctgcttggagaacacacatgggaattccggagggaagtgtttatccgcagaatacactgaaaaggttggcgaaattgccaagagtcatggcctgaagcttcatatcgatggagctcgcattttcaacgcctctgtggcacttggagttcctgtggacagacttgtgagagctgcagattcagtttcggtatgcatttctaaaggtttaggcgcccccgttggatcagttattgttggctcgaaggccttcatcgacaaggccaaaattctccggaagaccctaggtggtggaatgaggcaggttggagttctctgtgctgctgctcatgttgccgttcgtgacaatgtgggaaagcttgcagatgaccacagaaaggctaaagctttggcagacggactgaataaaatcgaacagttcagagtggattcagcatcagtccagaccaatatggtattcttggacatcgtggattcacgcatatcatctaacaagctgtgccaggttctgggaacgcacaatgtgctcgcaagtccaaggagtccaaaaaggcttgtccttcattaccaaatttcagatgatgatgttcaatatgcactgacgtgttttaagaaagctgctgaacagctactaatgggcagtactgaactcgagcatttggctgaacagctactgatgggcactaccaagaactcgtacgggcaatagggcaccctgatgcataagctcggtgtggtcttatctgtaatcagctcgaaatattgtagccgcaccaaacctttgctgaataactgttgcttctcacttgtttattggatgtgttcgttcctgtgctttggcctgtttggtttaacttttctctgaccggtttttctgagaatctggttgtgcaaaaaatcctgctatagagagaatctagtatcatggggattacgagtggaggaagatgaaggtgttcataaggttcaggatctagaaataaatggatttctactatttcaaagactcggctgattatgtgtttatgtcaattttagatatattaccaaatcggttcttatagaagctagccgaaaagctgagtgtttggcagtccgcaacagcttttggtggctagaaaatgaaaaaa

SEQ ID NO: 98504 - DNA, 1747 bp, Zea Mays
agttttccttcaaaaatggaaaagcgaaggcaaaaccaaagtttgttgtgggagtgggacgtgacaccccgcacacatcagttcatttcagtttcagcaggtcagttttcgtcctgatactctgtcgctgcagcggtgccggtgcagcgctagctgcagttgggttgcggccgcagagcagcagcaggaaggatggcgaccaaggtggtggtggacctgcggtccgacacggtcaccaagccttccgaggccatgcgcgcgtccatggccgcggccgacgtcgacgacgacgtccggggcgcggacccgaccgcgcgccgcttccaggaggagatggcggcgctcatgggcaaggaggccgcgctcttcgtcccgtcggggaccatgggcaacctcgtgtccgtcctcgcgcactgcgacgtccgcggcagcgaggtcatcctcggcgacgactcgcacatccacctctacgagaacggcggcatctccaccctcggcggcgtgcaccctaagaccgtcagaaacaactccgacggcaccatggacatcgacagcatcgtcgctgcaatcaggcctcccggcggtggcctgtattacccgaccaccaggctcatctgcttggagaacacacatgggaattccggagggaagtgtttatccgcagaatacactgaaaaggttggcgaaattgccaagagtcatggcctgaagcttcatatcgatggagctcgcattttcaacgcctctgtggcacttggagttcctgtggacagacttgtgagagctgcagattcagtttcggtatgcatttctaaaggtttaggcgcccccgttggatcagttattgttggctcgaaggccttcatcgacaaggccaaaattctccggaagaccctaggtggtggaatgaggcaggttggagttctctgtgctgctgctcatgttgccgttcgtgacaatgtgggaaagcttgcagatgaccacagaaaggctaaagctttggcagacggactgaataaaatcgaacagttcagagtggattcagcatcagtccagaccaatatggtattcttggacatcgtggattcacgcatatcatctaacaagctgtgccaggttctgggaacgcacaatgtgctcgcaagtccaaggagtccaaaaagtgtcaggcttgtccttcattaccaaatttcagatgatgatgttcaatatgcactgacgtgttttaagaaagctgctgaacagctactaatgggcagtactgaactcgagcatttggctgaacagctactgatgggcactaccaagaactcgtacgggcaatagggcaccctgatgcataagctcggtgtggtcttatctgtaatcagctcgaaatattgtagccgcaccaaacctttgctgaataactgttgcttctcacttgtttattggatgtgttcgttcctgtgctttggcctgtttggtttaacttttctctgaccggtttttctgagaatctggttgtgcaaaaaatcctgctatagagagaatctagtatcatggggattacgagtggaggaagatgaaggtgttcataaggttcaggatctagaaataaatggatttctactatttcaaagactcggctgattatgtgtttatgtcaattttagatatattaccaaatcggttcttatagaagctagccgaaaagctgagtgtttggcagtccgcaacagcttttggtggctagaaaatgaaaaaa

SEQ ID NO: 98505 - DNA, 1220 bp, Zea Mays
caacagatgatgaagctggtgctctccctgcagatcccccaatcaccggatgagtgagccagcaccggcagctgcaactgtgagtctgtgaccagcatcaccacccactgcgcaagagctaaagaatccaggctccaactcccacaattgcgagaaccaaagctaagctagctgctataactccacccaagctaagctgatccatggacatgccgccgaaccccgacagcccctcgtcaggagggagcaacagcatcggccggccgagtggcggcggcgcatcgccgtccgtcggttctacgatgccgcagtcgtcgccgagccggtacgaggcgcagaagcggcgcgactggaacacgttcggccagtacctgcggaaccaccggccgccactgagcctggcgcagtgcagcggggctcacgtcctcgagttcctccgctacctggaccagttcggcaagaccaaggtgcacggcccggcgtgccccttcttcggccacccgaacccgccggcgccgtgcccctgcccgctccgccaggcctggggcagcctcgacgccctcgtgggccgcctccgcgccgcctacgaggagaacggaggccgcccagagtccaatcccttcgccgcgcgcgccgtacgcctctacctctgcgaggtccgcgagcaccaggcccgcgcccgcggcgtcagctacgagaagaagaagcgcaggaagccgcagcagctgccgggcccgggcgacagcagcggccttcacggccacgcgcaccagccgccgcctccaccgcccgcgggcgccgcctgctgagctagctgatcgatccaccgctctttcgtgcgctctcccattcggccggtatgatgccagccagattgagcttgagcatgctcatatattttatgtatcattccgtgcgcgtatgcatgcatgtgcatggcgcagtgtagccatgcagctccatgctgctgatccgtctactctacctacctgctgctgagtgtaccgcattgcttgtctttatctgtgtttcgattcgatttagcattggtgttgtcgaatctatttgcttgtaggagtgagcaagtgtttgctgtactgtcaactgagtatatatgtccctttgagatctactagctagggactgggagatacatatatggtgatctctcttgctgtttctgttcgtggaaaatttaaaagcctgcgtagtgtgtgtcc

SEQ ID NO: 98506 - DNA, 1351 bp, Zea Mays
cagatgatgaagctggtgctctccctgcagatcccccaatcaccggatgagtgagccagcaccggcagctgcaactgtgagtctgtgaccagcatcaccacccactgcgcaagagtaagaagcaacagatgagatcaaccagcagctatactctcgactgtgcaaatgcttgatccttaaccccctgtctgctacttgtgtgatcatcatttgcttctcagctcattatgctgttggatcttatgcaggctaaagaatccaggctccaactcccacaattgcgagaaccaaagctaagctagctgctataactccacccaagctaagctgatccatggacatgccgccgaaccccgacagcccctcgtcaggagggagcaacagcatcggccggccgagtggcggcggcgcatcgccgtccgtcggttctacgatgccgcagtcgtcgccgagccggtacgaggcgcagaagcggcgcgactggaacacgttcggccagtacctgcggaaccaccggccgccactgagcctggcgcagtgcagcggggctcacgtcctcgagttcctccgctacctggaccagttcggcaagaccaaggtgcacggcccggcgtgccccttcttcggccacccgaacccgccggcgccgtgcccctgcccgctccgccaggcctggggcagcctcgacgccctcgtgggccgcctccgcgccgcctacgaggagaacggaggccgcccagagtccaatcccttcgccgcgcgcgccgtacgcctctacctctgcgaggtccgcgagcaccaggcccgcgcccgcggcgtcagctacgagaagaagaagcgcaggaagccgcagcagctgccgggcccgggcgacagcagcggccttcacggccacgcgcaccagccgccgcctccaccgcccgcgggcgccgcctgctgagctagctgatcgatccaccgctctttcgtgcgctctcccattcggccggtatgatgccagccagattgagcttgagcatgctcatatattttatgtatcattccgtgcgcgtatgcatgcatgtgcatggcgcagtgtagccatgcagctccatgctgctgatccgtctactctacctacctgctgctgagtgtaccgcattgcttgtctttatctgtgtttcgattcgatttagcattggtgttgtcgaatctatttgcttgtaggagtgagcaagtgtttgctgtactgtcaactgagtatatatgtccctttgagatctactagctagggactgggagatacatatatggtgatctctcttgctgtttctgttcgtggaaaatttaaaagcctgcgtagtgtgtgtcc

SEQ ID NO: 98507 - DNA, 279 bp, Zea Mays
atggaaagcgggcggtgcttggtccggttgaaggaggctgcacagtggttttggctgccgcgtctacagttgccctctgctccaccggaggaagcaccggatggtggcgagcaggtagctgaggggcgcggccatgggtgccagggaggagctgaggcgcggtccggtggaggaaagatcgagctggggaagaagacatcagagatgggcgcgcagcgagccagggatgaagctcacgccggcgaggaagaagacgcagggtgccgtgggagctcgtag

SEQ ID NO: 98508 - DNA, 2093 bp, Zea Mays
tcccccgatccaatctgtcgtccagacatcagcgaaatgacgacctgcttgccgtctgccgctctgagaactccaatttggacgcgccgtttgaccgaatactgatctccgcattccaacgctcaaacaccacccgggcggctgcgcccccaactccccccgtccgcccaacgcccatcccccaaaaggctccgatctgattccgagccccgccaggcgccagccttctcccgccgcgtcgcacgtgcgccccaccccatactcacgctcgagccgcgatcccatccgggggttccgatgcggtcgccggcgctcctggccgccgccctagccgcggtggcactcctagctgccggtgccggattcgcggtggccgcgacggaggaggcctacgtcacgctactgtacggcgacgagttcgtgctcggcgcgcgcgtccttgggaagtccctccgcgacaccggcacgcggcgcgacatggttgtgctcgtctccgacggcgtttccgagtactcgcggaagctcctacagacggttggatcgtgaatcgtataacgttactggctaatcctaatcaatttaggccaaagaggttttggggcgtctacaccaagctgaagatatttaacatgacaagctacaaaaaagttgtttaccttgacgcagatactatagttgtgaaaagtatcgaggatcttttcaagtgtggcaagttttgtggaaacttgaagcattctgaaagaatgaattctggtgtgatggttgttgaaccctctgaaactcttttcaatgatatgatcaaaaaaatggatcaattgccttcttacacaggaggggaccaaggttttctaaattcatattattctgattttgccaactcccgtgtctatgagccagactcgcctttaactcctgaaccagcgacacaacgcctttctaccttgtataatgctgatgttggtctttacatgctagcaaacaagtggatggttgatgaaaaggaattaagaatcatccattacacactgggtcccctaaaaccctgggactggttcacagcgtggcttgtaaaacctgttgaaacatggcaggatattaggcaaaaacttgaagaatctcttccaggaactggtgggggaaggaaccctcatgaccagctggttgtcaaaatattgttcattctcccattttgcttgctgctatttggttattaccaatcatgttttcagacagacaaggagttggtaagtataagatctctatgtgcttttgctagaagagctcgccataaatacaagtctgaagagtcacttccatcttattcagtggtgggttcatcttctgcatttggtatttcaagccaaaggttatcaaatggacatttgaaactaccttcttattttggggcaattgcggtgttagtctgcttcgtgtctgctggtttctctcttgcatttgctttcgctatcattccacggcaggttatgccatggacaggtttgctactgatgcttgagtggacctttgtggcattcttcttattgtttgggagttatctccgttttgtctaccggtggggaagtatcagtgcaaaccatgtgggatttagcaattctgactcatcggagaatcatatgggtccaggccatcagcgaaatatgtctgactgcgacatggatgcaacattttactggatagggatggcatctatagctactattactgtactgttaccgactatcttgggcataactgcattgttcacaaagctaggattaatggtcgctggtggtattgtgctggcatcttttatgacatacgcagcggagcatcttgcaatctcagtcttcaacaagggtcaaaaatacaggaatgcgtcaagaactcgaagcttttgtttttaacgtttaagtaaaaaatccttgttgtattgtaggtagttttgtacacaaaaagaatgatgattcatttttaacacgtggcttcctgcccatggcccctttttttgtagcgctgatgtcacgccaacttgtggtaaataggtttccgacattgtttctgtagcacagttggcatgaagattacagacatgt

SEQ ID NO: 98509 - DNA, 2168 bp, Zea Mays
tcccccgatccaatctgtcgtccagacatcagcgaaatgacgacctgcttgccgtctgccgctctgagaactccaatttggacgcgccgtttgaccgaatactgatctccgcattccaacgctcaaacaccacccgggcggctgcgcccccaactccccccgtccgcccaacgcccatcccccaaaaggctccgatctgattccgagccccgccaggcgccagccttctcccgccgcgtcgcacgtgcgccccaccccatactcacgctcgagccgcgatcccatccgggggttccgatgcggtcgccggcgctcctggccgccgccctagccgcggtggcactcctagctgccggtgccggattcgcggtggccgcgacggaggaggcctacgtcacgctactgtacggcgacgagttcgtgctcggcgcgcgcgtccttgggaagtccctccgcgacaccggcacgcggcgcgacatggttgtgctcgtctccgacggcgtttccgagtactcgcggaagctcctacaggcagacggttggatcgtgaatcgtataacgttactggctaatcctaatcaatttaggccaaagaggttttggggcgtctacaccaagctgaagatatttaacatgacaagctacaaaaaagttgtttaccttgacgcagatactatagttgtgaaaagtatcgaggatcttttcaagtgtggcaagttttgtggaaacttgaagcattctgaaagaatgaattctggtgtgatggttgttgaaccctctgaaactcttttcaatgatatgatcaaaaaaatggatcaattgccttcttacacaggaggggaccaaggttttctaaattcatattattctgattttgccaactcccgtgtctatgagccagactcgcctttaactcctgaaccagcgacacaacgcctttctaccttgtataatgctgatgttggtctttacatgctagcaaacaagtggatggttgatgaaaaggaattaagaatcatccattacacactgggtcccctaaaaccctgggactggttcacagcgtggcttgtaaaacctgttgaaacatggcaggatattaggcaaaaacttgaagaatctcttccaggaactggtgggggaaggaaccctcatgaccagctggttgtcaaaatattgttcattctcccattttgcttgctgctatttggttattaccaatcatgttttcagacagacaaggagttggtaagtataagatctctatgtgcttttgctagaagagctcgccataaatacaagtctgaagagtcacttccatcttattcagtggtgggttcatcttctgcatttggtatttcaagccaaaggttatcaaatggacatttgaaactaccttcttattttggggcaattgcggtgttagtctgcttcgtgtctgctggtttctctcttgcatttgctttcgctatcattccacggcaggttatgccatggacaggtttgctactgatgcttgagtggacctttgtggcattcttcttattgtttgggagttatctccgttttgtctaccggtggggaagtatcagtgcaaaccatgtgggatttagcaattctgactcatcggagaatcatatgggtccaggccatcagcgaaatatgtctgactgcgacatggatgcaacattttactggatagggatggcatctatagctactattactgtactgttaccgactatcttgggcataactgcattgttcacaaagctaggattaatggtcgctggtggtattgtgctggcatcttttatgacatacgcagcggagcatcttgcaatctcagtcttcaacaagggtcaaaaatacaggaatgcgtcaagaactcgaagcttttgtttttaacgtttaagtaaaaaatccttgttgtattgtaggtagttttgtacacaaaaagaatgatgattcatttttaacacgtggcttcctgcccatggcccctttttttgtagcgctgatgtcacgccaacttgtggtaaataggtttccgacattgtttctgtagcacagttggcatgaagattacagacatgttttgggatcgtgacccgcttttactcgcttatattgatgtttatggtgagattgtagtatatcagaaaaaa

SEQ ID NO: 98510 - DNA, 837 bp, Zea Mays
caatacaaacaaacgaagatccgccatccggctccgcttatgtgatagcccggcccaacactacaactgcctctcggccctctcctcggcgacgccactactcctgcctcacgccgccgctcaaaccgcagaagagagaagagaagcacgcccaaaaattccgaggttttcacctcttggagcgcaccaacaccacccggagaccggagcgactcgccaccggcgcggaaaaggagggcggaggctcgatggcggatgagaatcaggctggaaagaaagaggaggaggaatttagcacaggccctctgtcagtcctaatgatgagtgttaagaacaacacccaggtcctcatcaattgccgcaacaacaagaagctgcttggccgtgttcgtgcttttgatcgccactgtaacatggtgctcgagaacgtgcgtgagatgtggacagagatccccaagactggcaagggcaaaaagaaggctctgcctgtgaacaaggatagattcatcagtaagatgttcctcaggggcgactcggtcatcatagtgctgaggaacccgaagtgatcgcccaaccagtcaccttgcagcagttatgccccttctctgggttcacggaatccgtgcctctgttgaaaaaaactgtagcttatgtatgtcttggcggattagctggttatcttgaactgacgttcatgtgacatggcaatggcacatgaacatacgtttcatgagtttggttgttaattggcgcttgcagtactttgatccctgaatgttgagattgcacttctgcttattgtcttgccccattgcgtgacgtggaatacttgctaaa

SEQ ID NO: 98511 - DNA, 793 bp, Zea Mays
aagatccgccatccggctccgcttatgtgatagcccggcccaacactacaactgcctctcggccctctcctcggcgacgccactactcctgcctcacgccgccgctcaaaccgcagaagagagaagagaagcacgcccaaaaattccgaggttttcacctcttggagcgcaccaacaccacccggagaccggagcgactcgccaccggcgcggaaaaggagggcggaggctcgatggcggatgagaatgctggaaagaaagaggaggaggaatttagcacaggccctctgtcagtcctaatgatgagtgttaagaacaacacccaggtcctcatcaattgccgcaacaacaagaagctgcttggccgtgttcgtgcttttgatcgccactgtaacatggtgctcgagaacgtgcgtgagatgtggacagagatccccaagactggcaagggcaaaaagaaggctctgcctgtgaacaaggatagattcatcagtaagatgttcctcaggggcgactcggtcatcatagtgctgaggaacccgaagtgatcgcccaaccagtcaccttgcagcagttatgccccttctctgggttcacggaatccgtgcctctgttgaaaaaaactgtagcttatgtatgtcttggcggattagctggttatcttgaactgacgttcatgtgacatggcaatggcacatgaacatacgtttcatgagtttggttgttaattggcgcttgcagtactttgatccctgaatgttgagattgcacttctgcttattgtcttgcccca

SEQ ID NO: 98512 - DNA, 632 bp, Zea Mays
cctgcaagtttattttttctgatttactagttcctagcttccgtttagcatcaggagggcggaggctcgatggcggatgagaatcaggctggaaagaaagaggaggaggaatttagcacaggccctctgtcagtcctaatgatgagtgttaagaacaacacccaggtcctcatcaattgccgcaacaacaagaagctgcttggccgtgttcgtgcttttgatcgccactgtaacatggtgctcgagaacgtgcgtgagatgtggacagagatccccaagactggcaagggcaaaaagaaggctctgcctgtgaacaaggatagattcatcagtaagatgttcctcaggggcgactcggtcatcatagtgctgaggaacccgaagtgatcgcccaaccagtcaccttgcagcagttatgccccttctctgggttcacggaatccgtgcctctgttgaaaaaaactgtagcttatgtatgtcttggcggattagctggttatcttgaactgacgttcatgtgacatggcaatggcacatgaacatacgtttcatgagtttggttgttaattggcgcttgcagtactttgatccctgaatgttgagattgcacttctgcttattgtcttgcccca

SEQ ID NO: 98513 - DNA, 844 bp, Zea Mays
gttcagattagctatgacccacaagacaagtctgccttcgtcgtcctcaaccctcgtagtcatagagcatcagaggcgccgctcctttcggatctgggcgaggtgagctgcggcgccggacgtcgcggggaagaggatgaactggatcgggcgcaagatccacctctacaatgtcaccatcggcctctacatgctcgattggtgggagcgctacctcttcagtatccttcttccgattgcttctctcgctccctcccctcctgaaaccagttgattcatttagcacccagctcagtctagttgtcttctcctggttttgctttgctagatctgagaaaggtgtgaggatatatcctgcgatgtgtcgaatttagatatctgtcactgtccgtgcgcattccgtttacaccctttcaaccgcggcaatgtctcatcttcagtttttatagttggcaaccagaatactagagcctcctttgaggaatttttagtaataagattatagtttcgttttcgtagcactaaaacattcagatattatgaatttcctagcaatttttatattacctaggaagttcaggaaattaagattgccctgcagacgtttgtctgccaatcattagcagagcttcgtcctagccttgaagtgatccagacttgaagctcaatgttagtaagggggtgttgaatgcactagagctaatagttagtggctaaaattagttagagacatccaaacaccctagctaatagttcaactatgagctatttttagtaaattagttaatagttagctagatatttgttagctagctaatttcactagcaattttttagccaacta

SEQ ID NO: 98514 - DNA, 547 bp, Zea Mays
gttcagattagctatgacccacaagacaagtctgccttcgtcgtcctcaaccctcgtagtcatagagcatcagaggcgccgctcctttcggatctgggcgaggtgagctgcggcgccggacgtcgcggggaagaggatgaactggatcgggcgcaagatccacctctacaatgtcaccatcggcctctacatgctcgattggtgggagcgctacctcttcaatattttgatggtttgcctcttctggtacattctccgctatctccttgggttcttccaaagtaatgtgaagactcttttccaagaggggaactaccttgggcaaggcagtacataaccattgtcaaacaagatctgcttatgatcatttgccccatgtaattccatgtgtttaattagttgttaactacttaactgaggagctgagaagaagtaatttaagcaagtgttacagtgtagccatcgtctgtatcttccctggaagccaatagtctctagtgttaatttcaatggaataaaaaaaatacgttgtgcaagttttgattaa

SEQ ID NO: 98515 - DNA, 833 bp, Zea Mays
gttcagattagctatgacccacaagacaagtctgccttcgtcgtcctcaaccctcgtagtcatagagcatcagaggcgccgctcctttcggatctgggcgaggtgagctgcggcgccggacgtcgcggggaagaggatgaactggatcgggcgcaagatccacctctacaatgtcaccatcggcctctacatgctcgattggtgggagcgctacctcttcaatattttgatggtttgcctcttctggtacattctccgctatctccttgggttcttccaaaggttgcagggcatcccgccttcccgcacctcctcctgctgctgctgctggacaagatccgtctatccacgcactcctgttctgtctccgtcaagcacctgccagttccgcacgcggacgcaacggagcgcttcctgcgtcgccggcgccggcttcaccttgcgccccgcctctccgacaagcacggccgcaatactgtccacaatcagtgattcaatggactataaacgccgacaggtccaaaacatcaagcaacacacggtggcagtctcattttggcgagaaggtgctttagagtgccattccagcgaagcagcttattgggagtgtcataaacgcaaatgtctcgtacgagaccgtgcagtggtggggctgatggtccagtccaggcacgtgtgcctgatcacttgccactgacatggtggtccgtgtgtttagactgatctacggatccagccttgaatttcgtactgctcccattcatggccctgccgtgccgctgattctcggttgtcatcgtactgtgaatttgtggcccgatcgcattgccttc

SEQ ID NO: 98516 - DNA, 808 bp, Zea Mays
atccttcagttaagggtgccatgctgcatgttcttcctggtcactttgaacctgcaatgccaagttcttcaaaattcaaatgcttgcattcatgtcccatcatttgcaactttacctccacagtacagacaatttcggcaaacaagacaatgtcattacagtgcccctacttcctcgaccctaaaactgttcaagaaattttacagccttctatttagtaagttaattattttcatctgtccttttttatatctatcaatggaaaaaaggtttgtttaatacatgtacagagcctgttgatgatctctagtaggttcttggaagtttgggtgctcttatgattgggctgaagaatatcataagctctaaaggtttttcaataaagtaacatgttatcccttgactatatgttagatattttgatggtttgcctcttctggtacattctccgctatctccttgggttcttccaaaggtacaaacttcttacattcagactcagcactacctgctacggagtaacattgtttccagctgccacatagtcccctgaattcagtttttgtaataaaagtcaattacacaactggctacacgagcagattatttctttatgttacatcttctgtgaagatgcaagttcatgaatgtagtggagtagatacagtagcaaatccaagcaggcaacgcgatcacttaacacttgtattagggatctgtaaataattcatagtttcatcactgcctcttttatggtgtagtatgtctcatatttcttgttttccctctttgttaaaaaaaaatagaa

SEQ ID NO: 98517 - DNA, 2026 bp, Zea Mays
ggcgggtcccaccaccgccggccctgactagtgtatatataaccgcgaagtggtggtgcaaaccgagtgcagtaaagcttgcgacgctgtagtgggatctctctccgttctactgtgctgtgctctgtgcatgccaccattgctgctgcagagaaggtgaacacaaacagggagcgctagtggtagatggacgcagcagaacatcacgtggaggagaccaaggaggaggaagcagcgcaggtgatggagacgacgacggcgcactctcggttcgggaggatctgcgtcttctgcggaagcagccaggggaagaagaagagctaccaggacgctgccgtcgagctcggcgaggagctggtctcgaggaacatcgatctggtctacggtgggggaagtgtcgggctaatgggcctggtctctcgagcggtctacaatggagggaggcacgtcatgggggtgattcccaagaccctcatgccgagagaggtactgtatgtaaccacgctctcacgcctccctaaaacccctgtcattgtttaatcgcatgcaatgattcccatgaattcgacaaagcatggtagatcagattctttaatttgtttttttcctagtacttgtatgttatgtttagttttacaatgcaagtagtttttttttatatttacatgtgaaaatagattttctttctttctctgaaatgaaaataaggatgcaggcttaattatcttctctggactgaaagaccacgctgaatgttcagtgaaaatccgggtttccttttcccctggtgatagatgagatcttgtggcatcttgctgatcctgactgctgcttgcctgcttctagtgtctgccccttcgtcctttaagcagataatgacttttgttaacaaaaatagatgtccctcacatttccctttttgtcccccacaacaacaccatgattacttctcctgaacaatgcatgcacacctagggtaaaataaaatactctcagtacagccacccacccttaggctatggagtgtgttgattacattacaggcatgcagcatccgtgtttgcttgtgtgtgcagataacaggtgagacggttggggaggtgaaggctgtggcaggtatgcatcagaggaaagctgagatggccaggcaatctgacgccttcatagcacttcctggtagtgacttctttttactaccatgctgattgagccgacatgtttgtagatgtggttcactttttactgtcgctttcgctaacgaacctggccatgtcacatatatatactggatccatgcgtagtggcaacatgggtggaaagttgtaaacctcccaaattggtttgtccggttggttggttggttggtgccatgaggtttctctcatcttttgaaaatcctcaggaccctttcgtctagctcaatttgctcagcgaaggccttattatttctgtcacagaaagtaaactgttccttcgatgacacaggagggtatggaacccttgaggagctgctggaagtgatcacctgggcgcagcttggcattcacgacaagccggttggcctgctaaacgtgaacggatactacaactccctgctgtccttcatcgacaaggccgtagaggaagagttcatcagcccgactgctcgccacatcgtcgtcctggcaccgacgccaaaggaactgcttgacaagctagaggagtattccccgcggcacgagaagctaggtcgtgccgaagacgaggtgggagacggagcagctgatgagcaactgcaagagctgcgaggtcccgccggggctcaagctcaaagatgggaagccgatcgtccaggcgcagagagctaggaaccatgctctgaattagtgccagtagcacgcgcctaatgtcgggatatcgactggtcaatgtaatctggtattggctatgtatcagctgtatttattctaggagatgagatttttatgtgcgttatgcaattcgagtttctagtagcagatgcaaatgaggaggtgttactggacta

SEQ ID NO: 98518 - DNA, 1127 bp, Zea Mays
ggcgggtcccaccaccgccggccctgactagtgtatatataaccgcgaagtggtggtgcaaaccgagtgcagtaaagcttgcgacgctgtagtgggatctctctccgttctactgtgctgtgctctgtgcatgccaccattgctgctgcagagaaggtgaacacaaacagggagcgctagtggtagatggacgcagcagaacatcacgtggaggagaccaaggaggaggaagcagcgcaggtgatggagacgacgacggcgcactctcggttcgggaggatctgcgtcttctgcggaagcagccaggggaagaagaagagctaccaggacgctgccgtcgagctcggcgaggagctggtctcgaggaacatcgatctggtctacggtgggggaagtgtcgggctaatgggcctggtctctcgagcggtctacaatggagggaggcacgtcatgggggtgattcccaagaccctcatgccgagagagataacaggtgagacggttggggaggtgaaggctgtggcaggtatgcatcagaggaaagctgagatggccaggcaatctgacgccttcatagcacttcctggagggtatggaacccttgaggagctgctggaagtgatcacctgggcgcagcttggcattcacgacaagccggttggcctgctaaacgtgaacggatactacaactccctgctgtccttcatcgacaaggccgtagaggaagagttcatcagcccgactgctcgccacatcgtcgtcctggcaccgacgccaaaggaactgcttgacaagctagaggagtattccccgcggcacgagaagctaggtcgtgccgaagacgaggtgggagacggagcagctgatgagcaactgcaagagctgcgaggtcccgccggggctcaagctcaaagatgggaagccgatcgtccaggcgcagagagctaggaaccatgctctgaattagtgccagtagcacgcgcctaatgtcgggatatcgactggtcaatgtaatctggtattggctatgtatcagctgtatttattctaggagatgagatttttatgtgcgttatgcaattcgagtttctagtagcagatgcaaatgaggaggtgttactggacta

SEQ ID NO: 98519 - DNA, 1897 bp, Zea Mays
ggagaacaaccaccgcctctctcccccgtctatctcttcttggagcctggagaagaggaaggatcagggaacgggggaagaggttgctgccacagctcaggtctcaagtttggattcagacaagtagacaaacaccagttggttaagatggcagctggtttccagatcggtgtgatcgggtcacttgcactctctgttgcatcttcagtttccattgtcctctgcaacaaagctctcatcagcacacttggttttccattcgctacaacattaacaagctggcatctgatggtgaccttctgcaccctccatgtggcacagcgcttacgtttcttcgagcccaaggcaattgatggacagacagtcatactctttgggttgctgaatggcacgtcaattggtcttctcaatctgagtttaggattcaactccattggattctaccagatgacaaaattggcgatcatacctttcactgtgctattggagactatcttcttgaagaaaagattcaggtttgagagcagttttctcacaatattgaacctcatttatggtcaaaggaatgatagaaaataacttaagtaaacactaaattcttctggatccattttgttcttttgattcaggagaacaatcaagtttcagatatttccaaataaactcttggatcaactgattgattaaatgtgtgtatgactttctgggcctaaatggtccctgtgatattaactgctatttccactgagctaataccaattcaatgatgtgcagcgagagtatcaagctttctcttctggtcttacttcttggagtaggaattgcttcagttactgatctcaagctaaatctgcttgggtccatcctttctggcctcgccattgccaccacctgtgttggccaaattgtatcctacattaaatttaatagtaatacaattatcaatagtctcaaaactgtcaggtgaaagcaaatcaaacaaatatattttagttctttccaacccacttctcgttgcaatgtacattgataaagtagttcattattaaaaaaacatacaaggacccagtactaaaaatcttctagtttgagccactttatgaatcacttggcatgaatctgccacacgcttcgtataccagtgctacatgctaatccttgaccaaatttttgtttggacgaagctcacaaatacaatacagaagaggttgaaggtctcctcaacgcagcttctgtaccaatctgcgccttaccaggcggcaattctgtttgcatctgggccttttgtagatcaactccttactaaccggagtgtctttgcacacaaatactctgctacagttctgggtttcattgtcctctcttgcttgattgcggtgtctgtgaacttcagtacatttcttgtgattggaacaacatccccagtgacgtaccaggtgcttggtcaccttaagacatgtctggttctatcatttggctacactctattacatgatcctttcactctaaggaacatattgggcattctaattgccatatttgggatggcactatactcctatttctctgtaagagagggcaagaagaagtcagcaaatgatgccctgccagtttcacagatgccagataaggaggttgaaccgcttttggcaactaaagacagcaatgacaccgagaaagcaaatggtttatctcacgactgctagggcttttcttgtagtttaggtctagtatgaactgcccttagaatttaatggacttggaaagccattcttttcattcttgatttcctttttaggaaaggaagattttaaaatttgtagagaatgtgtattttgacgttaaagttattgtttgattatattctacacacagcagttccagctgaagttttatt

SEQ ID NO: 98520 - DNA, 1361 bp, Zea Mays
ggagaacaaccaccgcctctctcccccgtctatctcttcttggagcctggagaagaggaaggatcagggaacgggggaagaggttgctgccacagctcaggtctcaagtttggattcagacaagtagacaaacaccagttggttaagatggcagctggtttccagatcggtgtgatcgggtcacttgcactctctgttgcatcttcagtttccattgtcctctgcaacaaagctctcatcagcacacttggttttccattcgctacaacattaacaagctggcatctgatggtgaccttctgcaccctccatgtggcacagcgcttacgtttcttcgagcccaaggcaattgatggacagacagtcatactctttgggttgctgaatggcacgtcaattggtcttctcaatctgagtttaggattcaactccattggattctaccagatgacaaaattggcgatcatacctttcactgtgctattggagactatcttcttgaagaaaagattcagcgagagtatcaagctttctcttctggtcttacttcttggagtaggaattgcttcagttactgatctcaagctaaatctgcttgggtccatcctttctggcctcgccattgccaccacctgtgttggccaaattctcacaaatacaatacagaagaggttgaaggtctcctcaacgcagcttctgtaccaatctgcgccttaccaggcggcaattctgtttgcatctgggccttttgtagatcaactccttactaaccggagtgtctttgcacacaaatactctgctacagttctgggtttcattgtcctctcttgcttgattgcggtgtctgtgaacttcagtacatttcttgtgattggaacaacatccccagtgacgtaccaggtgcttggtcaccttaagacatgtctggttctatcatttggctacactctattacatgatcctttcactctaaggaacatattgggcattctaattgccatatttgggatggcactatactcctatttctctgtaagagagggcaagaagaagtcagcaaatgatgccctgccagtttcacagatgccagataaggaggttgaaccgcttttggcaactaaagacagcaatgacaccgagaaagcaaatggtttatctcacgactgctagggcttttcttgtagtttaggtctagtatgaactgcccttagaatttaatggacttggaaagccattcttttcattcttgatttcctttttaggaaaggaagattttaaaatttgtagagaatgtgtattttgacgttaaagttattgtttgattatattctacacacagcagttccagctgaagttttatt

SEQ ID NO: 98521 - DNA, 824 bp, Zea Mays
aacgacaccatagccctcctagtcccgctcccgcactcctcgtacgtagcgtcacggccgtacgtagaggcgctagcacgtcagagagcgccactggttctgttctgaccgatcggcatggccgggagcgcgaggtcggcggccgcgaagcacgcgtaccggatgttcgcgccgccgtccatgggcgccagcgccggcgccggcgcgggcgttggcggcgcggaggagctcgacgaggcggacgtctggggctcgttcggcgcggcctgccactccagcgccgtgtcgtccgacgacctggccggcgccgccggctgggcgcgcccggtccacggcccccgcgcggggcggaagaagcccgtggacggcggcggcggcgcggtggggtcgctgccgatgaacataccggactggcagaagatcctcggggtcgagtaccgcgaccaccagcacgcgggcgagtgggaggccgacgcggacgacggcggcggcggcggcggcagctacggcggggcggagatggtgccgccgcacgagctggcgtggcgcagccgcgcggcgtcgctgtccgtgcacgagggggtcgggcggacgctcaaggggcgcgacctcagccgggtaagggacgccgtctggaagaggaccggcttcgaggactgagccgatgctgatcccccgccgcgcaggccgccggtatgtgtagtgtaggggccagggtagtagtaagctctttttttttgtttcgttcatgttgatgtgagccaacagtgcgggggtgtgtcattcatatggtgtgatgattttaaggacaccttgagaaaaaa

SEQ ID NO: 98522 - DNA, 780 bp, Zea Mays
gcgccggtcattccaggtgtgtctagtctctagtctagctaggcactactctagctcccaagtggccaagtatactcgccagagtacgtagagtgtagttgagcgtcgtccaaggatggcgtggacctcccgccgcatggtcgcgtccgcgctcgtcttcctgctgatgctgctcgccgcctcagagatggggacgacgagggtggcggaggcgaggcactgcacgtcgcagagccaccggttcgtcggcgcctgcatgagcaagagcaactgcgagaacgtctgcaggacggagggcttcccgtggggcgagtgcaggtggcacggcatagagcgcaagtgccactgcaagcggatctgctagtaattaactagccggctggccagcgcatgcatgcacgacgaccgacctacctgctgctggtccgtttgcgtttgtttcttgtcctttgggccttgctgtggcgcgcagtcttgcgtacgtgcgtgtgcgtgtgtcttttcagttactctcaattagtcatagcagacgtgcgtgggtgcgagcgtgtgtctcgttgcattgatgaaccggcttcacgtgctgtggttttacagtttctgatgtgttttagctaatctcgaataataaataataaggccccgtcttcacgcagttgcgtactgggtgcttacgtacattgtggttgttactttcgtcacgcagttgagtggatgtattagtcaaaaaggccggaatactggttggttgattgtggaatgcaataacccttcgaaaac

SEQ ID NO: 98523 - DNA, 784 bp, Zea Mays
tacgcacgcagagcgaacccacggccacggggggtctgtaaaatccgtaggcgattgagcgagcaaaagaatctgccctctccccttccctttctacaggcgctgtcccgcaagcggcgcatcgcaggaggcggtgaactggtggcgaggcgagaggtctcgatcttcccggccccacacacaacaaagcggggcgatggaccagcacgaccacgagatggagcagaaggggtgcctctgccggatcaagaactgcgccattgaactcttgtcgatggaggaggacctggagacggacgacgaggagtcgtgggacctcgttgggagggacctccggctcaaggccaccttcctgtgcatcgacctcagccgcttgatcgccttctgccagggcgaagagcacaagaaggcgctcactgtcgtcgccaacaagttcttctactccatggatgagcttggcgacgcagtggagagcagaagcctcccgctgacgcaggtgcgctacggcgacaccgccgacgcgctccgcgaggtggtcgccgtcctcgggccgtccctgtagctgggcggcctgcacgaagcggaggaatagagaaatccagatgagatcacagatgcgtcccccaccccagcacatcttattataggataggattaggatatagacagacaagacagtacggtgaggcgggaaggatgatgagccagcgcggcagaaatgctgtgtgcgatcatcttcacctgtgtggctgtgtatacatgtctcaaatttctgttgccgtct

SEQ ID NO: 98524 - DNA, 655 bp, Zea Mays
agctacacaagctaagtaaaacagattagctacacaagctaagaacaagtgagcaactattttattataggtatgactagatatacaagagcatacacgagcaacaaatactcactagcataagtatatgaacaagtaaatacaagctagtgaggaaagttgcaaaccaacgggaagatgatgacacgtggcacaatgatttttttcccgtggtgtcgatgacttgccggtcacccctagtccacgttgaggtagattcaaagctcccaaccgctcctctatcaagtctccacttgatctcttgagccggattggtcaatgaaccctcaaacctcgattccactagagttgtttttcaccgctccggcgaggcaagcacaacgcctctcacaatcaccaccgcggcctcttcacaatctcctttgaagagctcacggggaaccaccaccaagccgtctaggaggcggcaacctccaagagtaacaagccaacgacctcacttgatgatctccctagtgcctcaaagatcaacaacttgatgcaatgcactagatggctctcaatctcactagaatgcaatcccaaccaatatgagtgagagagagggagaggaaaggctccaatatgctcacaagtgttccaactagcctccttc

SEQ ID NO: 98525 - DNA, 1159 bp, Zea Mays
ggaagaagaaagaaactaagaaagcttcctttgttccttttctgttgtttatgtgttgtttgtcccgtcggttgcaggcacaggggaggtggtgacatgctcgcccacccagagcccggagcttttcttcgccgttcttggtgggctcggccagttcggtatcataaccagggcaaggatcccgctgcaacttgctccgcccaaggtgagatgggtgagggccttctacgacagcttcgagaccttcaccaaggaccaggagctgctggtctcaatgccggagctggtggactacgtggaggggttcgtggtcctgaacgagcagtccctccgcagctcctccgtcgccttccccgcccaggtcgacttcagcccggacttcgcctccggcgccggcagcaacaaggtccactactactgcatcgagttcgcagtgcatgaattccaacagcaagactccgccgctgatcacgttgtggacctggtctcggggcagctgagctatctgaggccccacgcgtacagcgtgcaggtggcctacctggatttcctcaacagggtgcggatggaggaggagagcctcaggagccggggcctctgggacgtgccgcacccctggctcaacctcttcgtgcccaggcatggcgtcgcgcgcttcaaggacctgctcatggacaccatcacgcagggagacttcgagttcgaggggcccgtcctcgtctaccccctcctcgctaacaggtgggacggcaacacgtcggcggtggttccggcggcgccggacggggtgatgtacgtcttcagcgtgctccggtcgacggacccggcgcggtgcggccgcgcctgcgtggaggggatcctggagcagcaccgccggcttgccgacgaggcctgccggcgcctcggcgccaagcagtacctggcccggcagccgtcgccggcgcactggcgcgaccacttcggggcgagctgggaccggttcgtggcccggaaggcccgcttcgatccctcgcacgtgcttgggccgggccaggggattttcccgtggacggactccgcgaccgcgagctcggtgtgacggtgttggtggtggcctggtgggctatggttcccactcaggtacaggtacttagctgaggaatttttttggctaagctga

SEQ ID NO: 98526 - DNA, 336 bp, Zea Mays
atgacggtgttctcctgtcgcgtgaaggggtgcttcagcaagcccacgctctcgatcgccttcgtccagaggcggacgaggaagtagccgagaaggctggcggagacgttgagcgaggggatgacgccggtggtgagattcagcttcatgacgatgacgctgaacaagacggcgaggatgaaccccaccacgaaggcgcgcaccgtgagctgctccctccacgacggcacgggctcgtccgcgaacgcctgctccactgaggccgccacctcttcggcattgccgaccccgtcgtcgtcgcccgcgcccgcgaggccgccggcgtggcgtcgccgc

SEQ ID NO: 98527 - DNA, 2089 bp, Zea Mays
atgcatcgggaacccttacacaggtagataccacaaccctgtgcagagttcttgcattctcgtcaaggtgacaggaacgacataggaaatggaggccaccctgtgcccaaagccccatttcgtggtcatcccatggccagccaccagccacatgatccccatcgtggacatcggctgcctcctcgccgcgcacggcgccgcggtcacgatcatcaccacgccctccagctcgcaactcgtccagagccgcgtggaccgcgccgggcaaggctcagcgggggtcacggtcaccgcgatcccgttcccgggcgcggaggccggcctgccggacggctgcgagaggacggaccacatcccctcccctgacctcgtgcccaacttcttcgtcgccaccgcgcggttcggcgaggccgtggcgcggcactgccgccgcctgcccacggccacggcggcgcacccccggccgagctgcgtcgtcgccgggatgtgccacacgtgggcgcacggcgtggcgcgcgagctcggcgccccctgcttcatcttccacggcttctgcgcgttcgctctgctgtgctgcgagtacctcaacacgcacaggccgcacgaggcggtcgggtcgccggacgagctcttcgacctccccgccctgccgccgttcgagttcaggttcgccaggaggcagctgccgatccacttccagccgtcttcctccatcccggaggaccgccaccgggagctccgggagttcgagctggccgtggacggcatcgtcgtgaacagcttcgaggagctggagcacggctcggtttcgcgcctcgcggcggccacgggcaaggccgtgctctccgtcggccccgtctcgctgtgcggcgccgccgcacctcctagcctcctcgactcgcgggccaactcggacgatgccaggctgtgcatggcgtggctggacgccaagagagccgactccgttctctacgtcagcttcggcagcgccgggcgcatgcctccagcgcagctgatacagctcgggctggcgctcgtgtcgtgcccctggcctgtcctttgggtcatcaagggcgcagacacgttgcccgatgacgtcaacgagtggttgcagcgcaacaccgatggaagcggcctcccggagagccagtgtcttgcgcttcgcgggtgggcgccgcaggtcgccatcctggagcacccggccgtcggcggctttctgacgcactgcgggtggggctcgacgctggagagcgtcgccgcgggcgtgcccatggccacctggccgttctccgccgagcagttcctgaacgagaagttgatcgtccacgtgcttggcatcggattgtctgtcggcgtgacgaagcccacggagagcgtgctgaccggtgccaaagacggcggtggcaaggcggacgcagatgtgggaatggaacaggtgaagcaagccttggatatgctcatggatggaggggcggatggggaggcaaggaagacgaaagctaaggaactgaaggccaaatcaaagactgctctggagcatggaggatcgtcatatatgaacctggagaagctgatacagtttggtgcttgaaaatggagtggtcgtggactcgtggtctgtttcggcacccaaacttagtttatttctccctaataaaggttaataaactaggactgcaagcaaaacgtggtacatgtaggtttcaggaacgctgcaggccgggcaaactttgtccaggattgcgagtggacaggacaggagcagaggaaaaacggcaacagaagcgacaaaatgaagagtaacaaagagccgttggattgaagatcaatgactcatgtgcgttgcctaagaattagacatatagtcatatgagcgtcttctctatgatacctgaggtttcttcgattccacgtttttccgtctagtttctccacttagtacgcgttcggttagctctcaatccatgtgctcgattccacgtttttccgtctagtttctccacttaggacgcgttcggttagctctcaatccatgtggattaaatgtaattgggtggatttaaatctcaaataagtcaaacttattctc

SEQ ID NO: 98528 - DNA, 1589 bp, Zea Mays
cggggagcccagtcgagcgccggggaagacgacgcagacaggcgcggtgcagacagtcggccgtggatccgttctaagaaacggactgccgtaacaacgatttgagcgccgactaaatcttacacagataccgaaattccaaagttcaacggattataatactaaaattccaattacgttgttcgggatatatattttcagaagcccaatgttaatgatatcacgtttccaaaaagctcagccatggcggcacgacgccacctgactccgttgaaagaaacccaccttggccacctctctgccccaccatgcggccccctggtcccatttgtctgacactaccccctacctccccgtcccaacctcgtctaatcgctgcggcgccagtgcccaaatctaaaccctagcgccgccaccgccatgctgcgccgcatcgccgccgtcgccccgcgggccttcttctcctcgtcacccccgcacgccccgtcgcttccggcgtcgggctacatcccgcgccgcgagtacggcctggtgcccatggtgatcgagcacacctcccgcggggagcgcgcctacgacatcttctcgcgccttctcaaggagcgcatcgtctgcatccatggccccatcaccgacgacacggcctccctcgtcgtcgcccagctgctcttcctcgagtccgagaaccccgccaagcccgttcacctctacattaactccccggggggcgtcgtcacggcgggcctcgccatctacgacacaatgcagtacatccgctcccccgtcaccacgctctgcatcggccaggccgcctccatggcgtcgctactcctcgccgcgggggcgagcggagagaggcgggcgctgccgaacgcgcgggtcatgatccaccagccctccggtggcgcgtcggggcaggcctcggacatcgccatccacgccaaggagatcctcaaggtgcgcgaccggctcaataagatctatgccaagcacacgggccaggccatcgaccgcatcgagcagtgtatggagagggacatgttcatggacccggaggaggcacatgaatgggggctcatcgacgaggtcatcgagcaccgccctgtctctcttgtgtctgatgctgttggcagtgatccgccaaacctcggtggaggcggaactgaggtgaataaagggacggacgagccatctccagcgtgatggcattgggcagtcacaaggtgcaatccttttttgtgttcctgtagctgtcttattggagttataaggtttaattcgtacatgagggtgaataacttaattttatgtctgctgggctaatccactagcaacactgttgttttgctactttattaattgatctgttgctgataatgagtgctctctggtatgagccctcatcagtggtgatatatgcattgttatagatttgttcgtctgaaatcaaacagtgctgtttaaaggataaaggccacagccttgaaaaattatgttgtattttgtctaaggctaattcagagtgtcatttctgtattcaacaaagattcgaattttctaattatcactgcatgttgtctggtattttt

SEQ ID NO: 98529 - DNA, 1583 bp, Zea Mays
ctaccccctacctccccgtcccaacctcgtctaatcgctgcggcgccagtgcccaaatctaaaccctagcgccgccaccgccatgctgcgccgcatcgccgccgtcgccccgcgggccttcttctcctcgtcacccccgcacgccccgtcgcttccggcgtcgggctacatcccgcgccgcgagtacggcctggtgcccatggtgatcgagcacacctcccgcggggagcgcgcctacgacatcttctcgcgccttctcaaggagcgcatcgtctgcatccatggccccatcaccgacgacacggcctccctcgtcgtcgcccagctgctcttcctcgagtccgagaaccccgccaagcccgttcacctctacattaactccccggggggcgtcgtcacggcgggcctcgccatctacgacacaatgcagtacatccgctcccccgtcaccacgctctgcatcggccaggccgcctccatggcgtcgctactcctcgccgcgggggcgagcggagagaggcgggcgctgccgaacgcgcgggtcatgatccaccagccctccggtggcgcgtcggggcaggcctcggacatcgccatccacgccaaggagatcctcaaggtgcgcgaccggctcaataagatctatgccaagcacacgggccaggccatcgaccgcatcgagcagtgtatggagagggacatgttcatggacccggaggaggcacatgaatgggggctcatcgacgaggtcatcgagcaccgccctgtctctcttgtgtctgatgctgttggcagtgatccgccaaacctcggtggaggcggaactgaggtgaataaagggacggacgagccatctccagcgtgatggcattgggcagtcacaagagttttctaccgagacgggagaactgagtgcagcttgcattttatctctgctatatgggattgagtgttggcggactaagagacgacatatccaacaactaagtgtcgcagagatgcgtatgttgtgttggatatatgggcacacaagattggaccgagtcagaaacgatgacatacacgatcggctagtagtaacgccaattgaaaaaaacttattcaacaccggttgagatggtttgggcatgtccaccagagaccccagaggcaccgctgtatagagacatcataagacgggacaataatgtgaagagaggtagaggtcgaccaaatttgacatgagaggaggcaatcaaaagggacttgaaggaatggattatcccaatggagctgtgtttggatagaggtgcttggaaagaagctatccacgtgcctgaaccgtgattaggtctttttccttttagtgctctcaaaagctttttcccttctctttctttctctttttggtgacatgttgggtttcaactttagcctactctaacttgtttgggactaaaatgctatgttgatgttggaggaactggatactgaattttctgtgtcagaaactaagaagggaccttggcattattatttttaagatagattataaaccatatgtaacattacccaataacaataatctttttaactgcttctct

SEQ ID NO: 98530 - DNA, 958 bp, Zea Mays
cccgacgttcggagcctcctgccgcaatttttttttgaggctggtctgtttcgtgacgtcccgcgagaagagaacccccgtggcccctggccgcgacggagcggtcagaagcagcggcggccggcgcggtttcggtttcctggttggcccgagaattccgattcctctcctgatttgtgttgcctggaggccccgtcgctgtccccgcgctctctgtctcctcacgcttggctgttcgccgcggcgccaccgtcggaggcagctgctaatcgcgcgtccggtggccgcgttgcagcggcggagcgtctcttgttgtgcagtgctgcagcggattgtcgcggcctgcccgcggtgaggccggcatccctcttcggaaggcgtgctcgggcggggccagcccaaccgccgttcgtgcgctagagttcctcgctcagaaagtggagaaataagatacatagtggaagatgagatcagttgttcggtcacttcgccagctccgccgatttatccagcactatgcagaggggaactcacaagcaaccagattgttcgggctgcagaatgctttaatcatgtgcggatcgacaccccgttcactgagcatgttacgtcgtaatggtgaaattagcagatttgcaagccctggcatggagttgatgaggtccatgttctctaatgtagcggctggttctatcaaagatattggaagaggtggcccgatggtggaatatgagaggagaatagcatcaggagacctagtagatggcgatagctttcaggttgatacaattcaacaattacaagggctctatgaggagttgattgagaatggagaagactgccagctggatagatataagtcatctgagaaatcaggacggtaagagcagtttccgtgcactaagatgacatattttgtattatcttaagcttagtcttttctttggaaaaaaaataa

SEQ ID NO: 98531 - DNA, 1907 bp, Zea Mays
cccgacgttcggagcctcctgccgcaatttttttttgaggctggtctgtttcgtgacgtcccgcgagaagagaacccccgtggcccctggccgcgacggagcggtcagaagcagcggcggccggcgcggtttcggtttcctggttggcccgagaattccgattcctctcctgatttgtgcggcggagcgtctcttgttgtgcagtgctgcagcggattgtcgcggcctgcccgcggtgaggccggcatccctcttcggaaggcgtgctcgggcggggccagcccaaccgccgttcgtgcgctagagttcctcgctcagaaagtggagaaataagatacatagtggaagatgagatcagttgttcggtcacttcgccagctccgccgatttatccagcactatgcagaggggaactcacaagcaaccagattgttcgggctgcagaatgctttaatcatgtgcggatcgacaccccgttcactgagcatgttacgtcgtaatggtgaaattagcagatttgcaagccctggcatggagttgatgaggtccatgttctctaatgtagcggctggttctatcaaagatattggaagaggtggcccgatggtggaatatgagaggagaatagcatcaggagacctagtagatggcgatagctttcaggttgatacaattcaacaattacaagggctctatgaggagttgattgagaatggagaagactgccagctggatagatataagtcatctgagaaatcaggacggagtcgatggctatggtcccgcctcattactcagccttctagctttgctccagttaagggcctttacctctatggtggtgttggtacagggaagacgatgcttatggacttgttctatgaacagctgccatctaattggagaaaaaaacgtattcactttcatgatttcatgttgaacgtacatagtcgtcttcagatgcataaaggtgtttcagatccccttgatgttgtagcagctgagatttcagatgaggccatcatattatgtcttgatgagtttatggtaactgatgttgctgatgctatgattctgaaccggctgttcagacaattgttcagcaaaggcattattcttgtttcaacttctaaccgtgctccagataagctttatgaaggtggcttacaacgggaccttttcttgccatttattgacaccttgaaagaaaggtgcatcgtgcaccccattggatctgcggtggactatcgtcaactgggttctgctgaacaaggtttctattttgtcggaaagcattacagtacgcttctgaaacagaagctccagtctttaattggagatgaggaacccagcccacaaactgttgaagtaattatgggaaggaaattacaggtttctctgggagcaaatggctgtgcatattttccttttgaagatctctgtgatagacctttaggtgcagcagattactttggactcttcaaaaaatttcacaccctggcacttgatggtgttccaaagtttgggtctagtaacagaacagcagcttatcggttcgtcacactgattgatgttatgtacgagaacaaagcaaggctgttatgtacagccgaggctggaccagtagaactgtttgagaatatcatgactcttgctgaagcacagaaggtttcaccaagatcttcgcgctcacagaaaagtgacgaccctgacctatgtgtggacaatgagcttggatttgccaaggatcgtacgattagcaggttgacagagatcaacagcagagaatatttggaggacttcgaaatgagattagggcaacagcagctgctgcccttgcaagctctagataatggtggtgatgttgtactagcataataagtagaaggcttctgggcctcatttga

SEQ ID NO: 98532 - DNA, 2155 bp, Zea Mays
cccgacgttcggagcctcctgccgcaatttttttttgaggctggtctgtttcgtgacgtcccgcgagaagagaacccccgtggcccctggccgcgacggagcggtcagaagcagcggcggccggcgcggtttcggtttcctggttggcccgagaattccgattcctctcctgatttgtgttgcctggaggccccgtcgctgtccccgcgctctctgtctcctcacgcttggctgttcgccgcggcgccaccgtcggaggcagctgctaatcgcgcgtccggtggccgcgttgcagcggcggagcgtctcttgttgtgcagtgctgcagcggattgtcgcggcctgcccgcggtgaggccggcatccctcttcggaaggcgtgctcgggcggggccagcccaaccgccgttcgtgcgctagagttcctcgctcagaaagtggagaaataagatacatagtggaagatgagatcagttgttcggtcacttcgccagctccgccgatttatccagcactatgcagaggggaactcacaagcaaccagattgttcgggctgcagaatgctttaatcatgtgcggatcgacaccccgttcactgagcatgttacgtcgtaatggtgaaattagcagatttgcaagccctggcatggagttgatgaggtccatgttctctaatgtagcggctggttctatcaaagatattggaagaggtggcccgatggtggaatatgagaggagaatagcatcaggagacctagtagatggcgatagctttcaggttgatacaattcaacaattacaagggctctatgaggagttgattgagaatggagaagactgccagctggatagatataagtcatctgagaaatcaggacggagtcgatggctatggtcccgcctcattactcagccttctagctttgctccagttaagggcctttacctctatggtggtgttggtacagggaagacgatgcttatggacttgttctatgaacagctgccatctaattggagaaaaaaacgtattcactttcatgatttcatgttgaacgtacatagtcgtcttcagatgcataaaggtgtttcagatccccttgatgttgtagcagctgagatttcagatgaggccatcatattatgtcttgatgagtttatggtaactgatgttgctgatgctatgattctgaaccggctgttcagacaattgttcagcaaaggcattattcttgtttcaacttctaaccgtgctccagataagctttatgaaggtggcttacaacgggaccttttcttgccatttattgacaccttgaaagaaaggtgcatcgtgcaccccattggatctgcggtggactatcgtcaactgggttctgctgaacaaggtttctattttgtcggaaagcattacagtacgcttctgaaacagaagctccagtctttaattggagatgaggaacccagcccacaaactgttgaagtaattatgggaaggaaattacaggtttctctgggagcaaatggctgtgcatattttccttttgaagatctctgtgatagacctttaggtgcagcagattactttggactcttcaaaaaatttcacaccctggcacttgatggtgttccaaagtttgggtctagtaacagaacagcagcttatcggttcgtcacactgattgatgttatgtacgagaacaaagcaaggctgttatgtacagccgaggctggaccagtagaactgtttgagaatatcatgactcttgctgaagcacagaaggtttcaccaagatcttcgcgctcacagaaaagtgacgaccctgacctatgtgtggacaatgagcttggatttgccaaggatcgtacgattagcaggttgacagagatcaacagcagagaatatttggaggacttcgaaatgagattagggcaacagcagctgctgcccttgcaagctctagataatggtggtgatgttgtactagcataataagtagaaggcttctgggcctcatttgaaattcttgtattcgcgcccacctggcttacataggcaactgagaagctatgcttttccaaccgtggtgcatgtaaatgtgcaataaagctatgaaagagtattttttgctaataggtgggtgatctataaaa

SEQ ID NO: 98533 - DNA, 2164 bp, Zea Mays
cccgacgttcggagcctcctgccgcaatttttttttgaggctggtctgtttcgtgacgtcccgcgagaagagaacccccgtggcccctggccgcgacggagcggtcagaagcagcggcggccggcgcggtttcggtttcctggttggcccgagaattccgattcctctcctgatttgtgtacatatagttgcctggaggccccgtcgctgtccccgcgctctctgtctcctcacgcttggctgttcgccgcggcgccaccgtcggaggcagctgctaatcgcgcgtccggtggccgcgttgcagcggcggagcgtctcttgttgtgcagtgctgcagcggattgtcgcggcctgcccgcggtgaggccggcatccctcttcggaaggcgtgctcgggcggggccagcccaaccgccgttcgtgcgctagagttcctcgctcagaaagtggagaaataagatacatagtggaagatgagatcagttgttcggtcacttcgccagctccgccgatttatccagcactatgcagaggggaactcacaagcaaccagattgttcgggctgcagaatgctttaatcatgtgcggatcgacaccccgttcactgagcatgttacgtcgtaatggtgaaattagcagatttgcaagccctggcatggagttgatgaggtccatgttctctaatgtagcggctggttctatcaaagatattggaagaggtggcccgatggtggaatatgagaggagaatagcatcaggagacctagtagatggcgatagctttcaggttgatacaattcaacaattacaagggctctatgaggagttgattgagaatggagaagactgccagctggatagatataagtcatctgagaaatcaggacggagtcgatggctatggtcccgcctcattactcagccttctagctttgctccagttaagggcctttacctctatggtggtgttggtacagggaagacgatgcttatggacttgttctatgaacagctgccatctaattggagaaaaaaacgtattcactttcatgatttcatgttgaacgtacatagtcgtcttcagatgcataaaggtgtttcagatccccttgatgttgtagcagctgagatttcagatgaggccatcatattatgtcttgatgagtttatggtaactgatgttgctgatgctatgattctgaaccggctgttcagacaattgttcagcaaaggcattattcttgtttcaacttctaaccgtgctccagataagctttatgaaggtggcttacaacgggaccttttcttgccatttattgacaccttgaaagaaaggtgcatcgtgcaccccattggatctgcggtggactatcgtcaactgggttctgctgaacaaggtttctattttgtcggaaagcattacagtacgcttctgaaacagaagctccagtctttaattggagatgaggaacccagcccacaaactgttgaagtaattatgggaaggaaattacaggtttctctgggagcaaatggctgtgcatattttccttttgaagatctctgtgatagacctttaggtgcagcagattactttggactcttcaaaaaatttcacaccctggcacttgatggtgttccaaagtttgggtctagtaacagaacagcagcttatcggttcgtcacactgattgatgttatgtacgagaacaaagcaaggctgttatgtacagccgaggctggaccagtagaactgtttgagaatatcatgactcttgctgaagcacagaaggtttcaccaagatcttcgcgctcacagaaaagtgacgaccctgacctatgtgtggacaatgagcttggatttgccaaggatcgtacgattagcaggttgacagagatcaacagcagagaatatttggaggacttcgaaatgagattagggcaacagcagctgctgcccttgcaagctctagataatggtggtgatgttgtactagcataataagtagaaggcttctgggcctcatttgaaattcttgtattcgcgcccacctggcttacataggcaactgagaagctatgcttttccaaccgtggtgcatgtaaatgtgcaataaagctatgaaagagtattttttgctaataggtgggtgatctataaaa

SEQ ID NO: 98534 - DNA, 2361 bp, Zea Mays
cacgcattatccattccgtttggacccatgagatttttcgctgggatgaccgtgcacgagacgaatcccgttcggtaaccgataccccaagtcaaggcggatcatccgtcagtccgtcaccgcagtccagggagcgagcgacgacgacgccagggtcgtggtgctagttgcggggtcccggcccgtcgagtccgcctccggttctcccccttctcccgttgcggcgactccggcggcggagacagaggagcctaagcaggaggaggcggcggcggcagcagcagcaggtgtgcaggccatggctgtcacggtagtgcgggacgtcgagacgggcctggacgcgagcaccagcgaccgggacggtgacgccggggacaacccttcctggttcacacctaagagactacttgtcatgttctgcattatcaacatgctgaactatattgatcgaggagcaatagcaagtaatggcgtcaatggtacccgcaaaagttgttcgggtggtacatgcacctcaggctcaggaattcaaggggacttcgatcttaataatcttgaagatggtacattgtcctcagcatttatggttggactgttggtgtcttcgctgatatttgcatgccttgtaaaaagatataatcctttcaggcttattggtgttggcttgttagtgtggactatcgcaacagctggttgtggggtatcatttgatttctggtcaattactatatgccgcatgtttgtgggcgttggcgaagcttcatttataagtcttgcagctccatttattgatgacaatgcaccagtagctcagaaaacagcgtggcttggtatgttctacatgtgtataccaactgggattgcattaggctatgtttatggcggactggttggaaaatacctgaactggcgtgttgctttctggggagagtcaatattgatggttccttttgttattcttggttttgttataaagccactagacctcaaaggatttgctcacaacacaggaaaagaatatggccagatgcttaatcctgaggttcaagatcagataaataataatgggacaaaaaatgttttgcctagtcgaatcgaggatctttcaggaaaggttcggcaaaacttctccttgtccagtttttgccatgttctcatgactgaaattggtcgcttcagcaaagatatgaaacaactattacaagagaaggtttttgtcattgttgtcttaggttatatctcctacaacttcgtcattggtgcttattcctactggggcccaaaggcaggtcaagagatctacaatatggcgagtgcggatattatgtttggtggaattactatagtgtgtggaattgttggaacactagcaggaggtttcatccttgacaagatagggtctactattcctaatgctttcaagcttctttctggtgcgacatttgtaggggcaatattctgctttggtgctttttgtttcaagagcctttatgggttcataccctcctttgcagttggggagctttcagttttcgcaactcaggcacctgtaaattttgtatgccttcacgccgtgaagccacatttgcggccattggcaatggccgtatccactgtttcgatccatatatttggtgatgtcccttcttcacctcttgttgggctgcttcaggacaaaatcaataactggagggagacagctcttatattgacatccatccttttcgctgcagttgtgttctggttcattggcatatttgtccccagcgtcgaccgtttcaacgaagagagcgaatatggccttactgccgctgagagatcaagtatcaggccactgcttggtgaaaacgagccacggacatctgactaaaatctgcgcaatccataaccatttattacttggaagggcaattttaggatatgtttgttttcctcctagattatatgagctggattatagtgaaaataagctaaaataagctcgcattgggtaacttatttcagttgcatgccagttgcaatcttagggtacgaggttacaatatcactttggaaggctaaaataagttatcataatccaacttatgtaatctagaagaaacaaacagggccgtagtccgtagtattatcctctgtctgtgccagcaacatgtgaaatgtaaagttgtatgcccaacatgtgaaatgtaaagttgcatgccagttcaatgtagatgtacatatacgaggtctgtttgccttgcgttttttatctctacaggctacagaaacaagcgagagaacgttacaatttatttttacggatgtaaaacattttggattgtgacatgatataacttactggctacaatattactccct

SEQ ID NO: 98535 - DNA, 1511 bp, Zea Mays
tttttttgctaatggttactgttatgcataattcgtcatgtcttttatgagccaatgatttctacttattgttaccagaaaacagcgtggcttggtatgttctacatgtgtataccaactgggattgcattaggctatgtttatggcggactggttggaaaatacctgaactggcgtgttgctttctggggagagtcaatattgatggttccttttgttattcttggttttgttataaagccactagacctcaaaggatttgctcacaacacaggaaaagaatatggccagatgcttaatcctgaggttcaagatcagataaataataatgggacaaaaaatgttttgcctagtcgaatcgaggatctttcaggaaaggttcggcaaaacttctccttgtccagtttttgccatgttctcatgactgaaattggtcgcttcagcaaagatatgaaacaactattacaagagaaggtttttgtcattgttgtcttaggttatatctcctacaacttcgtcattggtgcttattcctactggggcccaaaggcaggtcaagagatctacaatatggcgagtgcggatattatgtttggtggaattactatagtgtgtggaattgttggaacactagcaggaggtttcatccttgacaagatagggtctactattcctaatgctttcaagcttctttctggtgcgacatttgtaggggcaatattctgctttggtgctttttgtttcaagagcctttatgggttcataccctcctttgcagttggggagctttcagttttcgcaactcaggcacctgtaaattttgtatgccttcacgccgtgaagccacatttgcggccattggcaatggccgtatccactgtttcgatccatatatttggtgatgtcccttcttcacctcttgttgggctgcttcaggacaaaatcaataactggagggagacagctcttatattgacatccatccttttcgctgcagttgtgttctggttcattggcatatttgtccccagcgtcgaccgtttcaacgaagagagcgaatatggccttactgccgctgagagatcaagtatcaggccactgcttggtgaaaacgagccacggacatctgactaaaatctgcgcaatccataaccatttattacttggaagggcaattttaggatatgtttgttttcctcctagattatatgagctggattatagtgaaaataagctaaaataagctcgcattgggtaacttatttcagttgcatgccagttgcaatcttagggtacgaggttacaatatcactttggaaggctaaaataagttatcataatccaacttatgtaatctagaagaaacaaacagggccgtagtccgtagtattatcctctgtctgtgccagcaacatgtgaaatgtaaagttgtatgcccaacatgtgaaatgtaaagttgcatgccagttcaatgtagatgtacatatacgaggtctgtttgccttgcgttt

SEQ ID NO: 98536 - DNA, 1045 bp, Zea Mays
ccccatcggcttcctccccacaagtcgtgtccaccaccaacaaactcgtacccttattcccacgagacagtgcgtggccatggcctctcgcgacggcgccaccttccaagtgtaccgggccatgcccgcgccgacgccgatgtctctggcgtccgccgctccagccgccgccgacgccgcggcgccgaagaaggcgggcgcgggcgcgggcaaggaccggcacagcaaggtgaacgggcgcgggcggcgcgtgcggatgccgatcgtgtgcgcggcgcgcgtgttccagctgacccgcgagctggggctcaagtcggacgggcagaccatcgagtggctgctccggcaggccgagccctcgatcctggcggccacggggtccggcaccacccccgccgtcttctcctgctcctccgcgccgtccacctccgcggccagcgccggtgccggcgccggtgtctccctcccgctcctcgggaagcgcccgcgcgaggagcacgagccggcggtggcggtggcagtggcgccggcgccgttctgggccaccctgcaggcgcggcccgtggcggcggcgtgggggctctcgccggcgcaggaggcggcggcgcaggcgtacgcgtcggtggcggcgcagggacaccacctcaacctgctctccgtgctctccggcgccgcgaggccgtcggaggaggagtcccggtgactcgccgcactgttgctacgtaatcgcatgcgttgacgcgtggtggcatgccgcatgcgtctcgtttccgtgcatctccgggggggggggggggggggggggggggggtgcgttgcgcgtgttttccctgtggttttgcggtgtgagaggaatgcggcgagctggacaaggaggatccagagcgcgagatcggaatcggatcggggttagcggctgtagatagcattcgtcaggtttgtgtttgtgataatgagctcgccgtggttctgtggtgtggttatgtatgcatgcatgcatgcatgccgaattgtcaactgatctgaatcctaacactaaataatg

SEQ ID NO: 98537 - DNA, 1373 bp, Zea Mays
tcatcagtacgcgcggttgcctcgatgtaaaagatgggaacagagttcagttcacacaatctagttcgtcgcacaagcatttgtggttttcatgacacatgttacatgtaaacctcatccgagacacttttacgctggcgccgtagaagatttactcagcatcaccgattacgcaatcaatctaatatcccattttttcctcctgtataatgtataccggacttgctccaatgccaaaaacgccaagcaataatccatcatcaagaaaaccgaaaccctactacatatgcacacagatgaagcagaccacacaggagcacaacaatcgccgggccggccggcggatcgcctgaggtcattgcgactgcgactgcgcgacggccttctccagctcctgcagggacgcctggtacctgacgaagcccatgaaccagaagtcgaagccgtcgcgcgtgacgacctgcacgtacttgtgctccggccggtccctgttctggcccggcctggccgccgcgaccctgcgcagcgggatggacaccttgtacggcacccgcagcaccgtcgtcgtgccgctgccgctgccgccgccggccggagacgtcagcggcagcgccagcgagcggtcgctccggaacgcgaccctctcggtggacacgaacagcatgccggcgatcgggccggccgtggtcgacaggtagcactgcgacgccctgagcagccgctcgccgcccccgccgacgggggaggagaaccagcgccggaacaccttccccacgccgcccgcccgcaggatcctcgcccccagcgacagcttgcccttcacggtctcgtacagcttcgggcccagcgtcactgcaaacacggtaagagcacgttcagttcagtctctcgagatacaggaggtgccaatccacggatggatgggcagctggaaagatgacagacaaaggatgcacggtagaagcatcgaatgttttggttggatcggagatagaagaacttaccgtgctctttcaggccttgggcgaccctgtccccggtcacccggcgccgtcccccggcgccggcggctgcgttcttggcggggccattgctggggaaatctggctcctcgataccgaacgccctgttgttcacggggatgccgatcacatgctcgtgctgccctgccttctccatcttctatctcttgttgaaaccacccaagactttttcctttccttcctgccgaattcacggctgagcttccggcggcctctgcctctgcgatcgaggtggttgctagcctagctggtgagctgtggcctgtgggccggtgtggcttgttggttggtgtgcgcgtgggttgtcgtcgctggctgctcgagctccgt

SEQ ID NO: 98538 - DNA, 136 bp, Zea Mays
cggggactagcggtgggtcgctataaagcaaggatcactatcaaatcttataaactggacgtacctgtagatgttagtgactaaaaattaattaaaataagtaaacattgatcgcaaattgtagtaaagaaaaaaa

SEQ ID NO: 98539 - DNA, 1981 bp, Zea Mays
gtagccgcctctcctcctccttctccttcttccccctctcaaggctcccctcctccacagcctgcagcccagctcacgaggaccaggaggagaagaagttgcatagccgcccatctgcatccacactccaacagttgagtccctctctccctaccaccccccccccccccccccagttgccttatctcctcacgtcctagctacaaccatacctgcgtgcgccggcagcgagaaaggaccagctaccggccgtgacgttcttctcaccgtacgtcgccgagggattagataaactaagcagggcgctgcacgaggatggggtgcggggcgtcgagccagaaggacgccggggcgccgcggaggcggccggtgagcgtcggcgacgtggtcgtcttcctcccgggcctccgcgtgccgagggccgtcgacttggcccaggcgctcggcggctgcctggccaggagcgccgtggaccggctgtcggctctgcgatcgcgggtcgtcgacatggcaatgcgagagtcggcggcggcgctcaagcccaggcggagggcggcggcacggcacgggtctagtacagccaatcttctacaggccctcgaagactacttgccggctctgctaggactggtaaaagaaggtagcgtcttgaggaacaaagtgcacttcacctggagtaaccaggaggataatgctgaggagacggccatgccagacgcctggtacgaggtgctgtccatgctgcatctgatggccatggtctgcctgctgcaggccaacgccctgcttctcccgaggtcatacggcgatggctatgccccaagggtttctgaagagagtcgacgggctactgttgatgtcttcttgaaggcagctggatacctagactgtgcagttcggcatgtactcccgaagatgccactggagctaaggagacaacttccagtagacctggctgaaggaaatctcaaagctctaagcctccaagccctgggtcagggggttgacatgcagcttggtttggctattgatagtccaaaggccactttagcagtaaaacggcgcttagcctgtgagatggtcaaatattggcaacaagttcaagagagcattccagagcttcctatctctgatggatggggtaaaaagcaccggctctttataaagtggaaatatgttgaagctaaggctgcagcatactatttccacggtttgattcttgacgagggaaataccgaaaaatcccatggaatggcaatagctgcactccaagcttcagaggaatttctaaaagaaagcaaaagggtttcagaagccttccatgcaactcctccaacatcgaggagtcccaatccattcggaacagcaaaatatctgtttgacaagatcccaagagatgcttccagcaaggttcgaatcaaccaggacctgtatactcaagaaaaggtcattggagcgccacccccattaccagattttgcattggcgctaacacctgaagaatatgatcttcctccactagatccactttggaacaaagaagacacaagccattaagtgtatatgcagcagaatggttgcttctggcaaaaatattggctctggagagaaaggaaggaccaagatctgccatgtcaagagctgatgtgtaatgaatgaagtgtacaaagtattttcaaacaaaaatacatgttcacaaatttacgcaaggcctgaagacaatctgaagagctttgtacaggcgattcttcttctgacaagggaaatgctatgtcaaagggttccttgatcattgtgcatcttgatgcttgcattttgtcaaaaacagattttcagcaatttatgtagaactgtaaactagcctctgatcgaaagtggcagccttcaaatttttttttgccataaaacatttacatcggcaccttaaaacatgccgtgggacaatcagtttcatctgagcacttaggtgaacaggattttc

SEQ ID NO: 98540 - DNA, 1545 bp, Zea Mays
gtagccgcctctcctcctccttctccttcttccccctctcaaggctcccctcctccacagcctgcagcccagctcacgaggaccaggaggagaagaagttgcatagccgcccatctgcatccacactccaacagttgagtccctctctccctaccaccccccccccccccccccagttgcctctgctaggactggtaaaagaaggtagcgtcttgaggaacaaagtgcacttcacctggagtaaccaggaggataatgctgaggagacggccatgccagacgcctggtacgaggtgctgtccatgctgcatctgatggccatggtctgcctgctgcaggccaacgccctgcttctcccgaggtcatacggcgatggctatgccccaagggtttctgaagagagtcgacgggctactgttgatgtcttcttgaaggcagctggatacctagactgtgcagttcggcatgtactcccgaagatgccactggagctaaggagacaacttccagtagacctggctgaaggaaatctcaaagctctaagcctccaagccctgggtcagggggttgacatgcagcttggtttggctattgatagtccaaaggccactttagcagtaaaacggcgcttagcctgtgagatggtcaaatattggcaacaagttcaagagagcattccagagcttcctatctctgatggatggggtaaaaagcaccggctctttataaagtggaaatatgttgaagctaaggctgcagcatactatttccacggtttgattcttgacgagggaaataccgaaaaatcccatggaatggcaatagctgcactccaagcttcagaggaatttctaaaagaaagcaaaagggtttcagaagccttccatgcaactcctccaacatcgaggagtcccaatccattcggaacagcaaaatatctgtttgacaagatcccaagagatgcttccagcaaggttcgaatcaaccaggacctgtatactcaagaaaaggtcattggagcgccacccccattaccagattttgcattggcgctaacacctgaagaatatgatcttcctccactagatccactttggaacaaagaagacacaagccattaagtgtatatgcagcagaatggttgcttctggcaaaaatattggctctggagagaaaggaaggaccaagatctgccatgtcaagagctgatgtgtaatgaatgaagtgtacaaagtattttcaaacaaaaatacatgttcacaaatttacgcaaggcctgaagacaatctgaagagctttgtacaggcgattcttcttctgacaagggaaatgctatgtcaaagggttccttgatcattgtgcatcttgatgcttgcattttgtcaaaaacagattttcagcaatttatgtagaactgtaaactagcctctgatcgaaagtggcagccttcaaatttttttttgccataaaacatttacatcggcaccttaaaacatgccgtgggacaatcagtttcatctgagcacttaggtgaacaggattttc

SEQ ID NO: 98541 - DNA, 1957 bp, Zea Mays
agccgcctctcctcctccttctccttcttccccctctcaaggctcccctcctccacagcctgcagcccagctcacgaggaccaggaggagaagaagttgcatagccgcccatctgcatccacactccaacagctgcggggacgggggagcaggggtagtggcagcggtcccgttctctgctgctggtggaggctttcggttccgggcgcgggcggtgtggttttctgtggtctcgagaatcccggaaagggagcgagcgcaaagataaactaagcagggcgctgcacgaggatggggtgcggggcgtcgagccagaaggacgccggggcgccgcggaggcggccggtgagcgtcggcgacgtggtcgtcttcctcccgggcctccgcgtgccgagggccgtcgacttggcccaggcgctcggcggctgcctggccaggagcgccgtggaccggctgtcggctctgcgatcgcgggtcgtcgacatggcaatgcgagagtcggcggcggcgctcaagcccaggcggagggcggcggcacggcacgggtctagtacagccaatcttctacaggccctcgaagactacttgccggctctgctaggactggtaaaagaaggtagcgtcttgaggaacaaagtgcacttcacctggagtaaccaggaggataatgctgaggagacggccatgccagacgcctggtacgaggtgctgtccatgctgcatctgatggccatggtctgcctgctgcaggccaacgccctgcttctcccgaggtcatacggcgatggctatgccccaagggtttctgaagagagtcgacgggctactgttgatgtcttcttgaaggcagctggatacctagactgtgcagttcggcatgtactcccgaagatgccactggagctaaggagacaacttccagtagacctggctgaaggaaatctcaaagctctaagcctccaagccctgggtcagggggttgacatgcagcttggtttggctattgatagtccaaaggccactttagcagtaaaacggcgcttagcctgtgagatggtcaaatattggcaacaagttcaagagagcattccagagcttcctatctctgatggatggggtaaaaagcaccggctctttataaagtggaaatatgttgaagctaaggctgcagcatactatttccacggtttgattcttgacgagggaaataccgaaaaatcccatggaatggcaatagctgcactccaagcttcagaggaatttctaaaagaaagcaaaagggtttcagaagccttccatgcaactcctccaacatcgaggagtcccaatccattcggaacagcaaaatatctgtttgacaagatcccaagagatgcttccagcaaggttcgaatcaaccaggacctgtatactcaagaaaaggtcattggagcgccacccccattaccagattttgcattggcgctaacacctgaagaatatgatcttcctccactagatccactttggaacaaagaagacacaagccattaagtgtatatgcagcagaatggttgcttctggcaaaaatattggctctggagagaaaggaaggaccaagatctgccatgtcaagagctgatgtgtaatgaatgaagtgtacaaagtattttcaaacaaaaatacatgttcacaaatttacgcaaggcctgaagacaatctgaagagctttgtacaggcgattcttcttctgacaagggaaatgctatgtcaaagggttccttgatcattgtgcatcttgatgcttgcattttgtcaaaaacagattttcagcaatttatgtagaactgtaaactagcctctgatcgaaagtggcagccttcaaatttttttttgccataaaacatttacatcggcaccttaaaacatgccgtgggacaatcagtttcatctgagcacttaggtgaacaggattttc

SEQ ID NO: 98542 - DNA, 1824 bp, Zea Mays
agccgcctctcctcctccttctccttcttccccctctcaaggctcccctcctccacagcctgcagcccagctcacgaggaccaggaggagaagaagttgcatagccgcccatctgcatccacactccaacaataaactaagcagggcgctgcacgaggatggggtgcggggcgtcgagccagaaggacgccggggcgccgcggaggcggccggtgagcgtcggcgacgtggtcgtcttcctcccgggcctccgcgtgccgagggccgtcgacttggcccaggcgctcggcggctgcctggccaggagcgccgtggaccggctgtcggctctgcgatcgcgggtcgtcgacatggcaatgcgagagtcggcggcggcgctcaagcccaggcggagggcggcggcacggcacgggtctagtacagccaatcttctacaggccctcgaagactacttgccggctctgctaggactggtaaaagaaggtagcgtcttgaggaacaaagtgcacttcacctggagtaaccaggaggataatgctgaggagacggccatgccagacgcctggtacgaggtgctgtccatgctgcatctgatggccatggtctgcctgctgcaggccaacgccctgcttctcccgaggtcatacggcgatggctatgccccaagggtttctgaagagagtcgacgggctactgttgatgtcttcttgaaggcagctggatacctagactgtgcagttcggcatgtactcccgaagatgccactggagctaaggagacaacttccagtagacctggctgaaggaaatctcaaagctctaagcctccaagccctgggtcagggggttgacatgcagcttggtttggctattgatagtccaaaggccactttagcagtaaaacggcgcttagcctgtgagatggtcaaatattggcaacaagttcaagagagcattccagagcttcctatctctgatggatggggtaaaaagcaccggctctttataaagtggaaatatgttgaagctaaggctgcagcatactatttccacggtttgattcttgacgagggaaataccgaaaaatcccatggaatggcaatagctgcactccaagcttcagaggaatttctaaaagaaagcaaaagggtttcagaagccttccatgcaactcctccaacatcgaggagtcccaatccattcggaacagcaaaatatctgtttgacaagatcccaagagatgcttccagcaaggttcgaatcaaccaggacctgtatactcaagaaaaggtcattggagcgccacccccattaccagattttgcattggcgctaacacctgaagaatatgatcttcctccactagatccactttggaacaaagaagacacaagccattaagtgtatatgcagcagaatggttgcttctggcaaaaatattggctctggagagaaaggaaggaccaagatctgccatgtcaagagctgatgtgtaatgaatgaagtgtacaaagtattttcaaacaaaaatacatgttcacaaatttacgcaaggcctgaagacaatctgaagagctttgtacaggcgattcttcttctgacaagggaaatgctatgtcaaagggttccttgatcattgtgcatcttgatgcttgcattttgtcaaaaacagattttcagcaatttatgtagaactgtaaactagcctctgatcgaaagtggcagccttcaaatttttttttgccataaaacatttacatcggcaccttaaaacatgccgtgggacaatcagtttcatctgagcacttaggtgaacaggattttc

SEQ ID NO: 98543 - DNA, 1953 bp, Zea Mays
ccagtgttcgttcgtcgtgctttgtgctgtgcggccgcgttcaggctgcggggacgggggagcaggggtagtggcagcggtcccgttctctgctgctggtggaggctttcggttccgggcgcgggcggtgtggttttctgtggtctcgagaatcccggaaagggagcgagcgcaaagataaactaagcagggcgctgcacgaggatggggtgcggggcgtcgagccagaaggacgccggggcgccgcggaggcggccggtgagcgtcggcgacgtggtcgtcttcctcccgggcctccgcgtgccgagggccgtcgacttggcccaggcgctcggcggctgcctggccaggagcgccgtggaccggctgtcggctctgcgatcgcgggtcgtcgacatggcaatgcgagagtcggcggcggcgctcaagcccaggcggagggcggcggcacggcacgggtctagtacagccaatcttctacaggccctcgaagactacttgccggctctgctaggactggtaaaagaaggtagcgtcttgaggaacaaagtgcacttcacctggagtaaccaggaggataatgctgaggagacggccatgccagacgcctggtacgaggtgctgtccatgctgcatctgatggccatggtctgcctgctgcaggccaacgccctgcttctcccgaggtcatacggcgatggctatgccccaagggtttctgaagagagtcgacgggctactgttgatgtcttcttgaaggcagctggatacctagactgtgcagttcggcatgtactcccgaagatgccactggagctaaggagacaacttccagtagacctggctgaaggaaatctcaaagctctaagcctccaagccctgggtcagggggttgacatgcagcttggtttggctattgatagtccaaaggccactttagcagtaaaacggcgcttagcctgtgagatggtcaaatattggcaacaagttcaagagagcattccagagcttcctatctctgatggatggggtaaaaagcaccggctctttataaagtggaaatatgttgaagctaaggctgcagcatactatttccacggtttgattcttgacgagggaaataccgaaaaatcccatggaatggcaatagctgcactccaagcttcagaggaatttctaaaagaaagcaaaagggtttcagaagccttccatgcaactcctccaacatcgaggagtcccaatccattcggaacagcaaaatatctgtttgacaagatcccaagagatgcttccagcaaggttcgaatcaaccaggacctgtatactcaagaaaaggtcattggagcgccacccccattaccagattttgcattggcgctaacacctgaagaatatgatcttcctccactagatccactttggaacaaagaagacacaagccattaagtgtatatgcagcagaatggttgcttctggcaaaaatattggctctggagagaaaggaaggaccaagatctgccatgtcaagagctgatgtgtaatgaatgaagtgtacaaagtattttcaaacaaaaatacatgttcacaaatttacgcaaggcctgaagacaatctgaagagctttgtacaggcgattcttcttctgacaagggaaatgctatgtcaaagggttccttgatcattgtgcatcttgatgcttgcattttgtcaaaaacagattttcagcaatttatgtagaactgtaaactagcctctgatcgaaagtggcagccttcaaatttttttttgccataaaacatttacatcggcaccttaaaacatgccgtgggacaatcagtttcatctgagcacttaggtgaacaggattttcaaataatcagtggatactgtggcaaagtcagcttccagccattcagtgcatgcatatacagtcataaaattttagttttgaac

SEQ ID NO: 98544 - DNA, 1819 bp, Zea Mays
tttctctctcgaaatccgttgtatgatatgatgacgaggaaaccccaaaaaatagaagaaagaattccaaaaccctccctctcctgttcagtatcttctgcggctccgccgtggattcttcgtgcgataaactaagcagggcgctgcacgaggatggggtgcggggcgtcgagccagaaggacgccggggcgccgcggaggcggccggtgagcgtcggcgacgtggtcgtcttcctcccgggcctccgcgtgccgagggccgtcgacttggcccaggcgctcggcggctgcctggccaggagcgccgtggaccggctgtcggctctgcgatcgcgggtcgtcgacatggcaatgcgagagtcggcggcggcgctcaagcccaggcggagggcggcggcacggcacgggtctagtacagccaatcttctacaggccctcgaagactacttgccggctctgctaggactggtaaaagaaggtagcgtcttgaggaacaaagtgcacttcacctggagtaaccaggaggataatgctgaggagacggccatgccagacgcctggtacgaggtgctgtccatgctgcatctgatggccatggtctgcctgctgcaggccaacgccctgcttctcccgaggtcatacggcgatggctatgccccaagggtttctgaagagagtcgacgggctactgttgatgtcttcttgaaggcagctggatacctagactgtgcagttcggcatgtactcccgaagatgccactggagctaaggagacaacttccagtagacctggctgaaggaaatctcaaagctctaagcctccaagccctgggtcagggggttgacatgcagcttggtttggctattgatagtccaaaggccactttagcagtaaaacggcgcttagcctgtgagatggtcaaatattggcaacaagttcaagagagcattccagagcttcctatctctgatggatggggtaaaaagcaccggctctttataaagtggaaatatgttgaagctaaggctgcagcatactatttccacggtttgattcttgacgagggaaataccgaaaaatcccatggaatggcaatagctgcactccaagcttcagaggaatttctaaaagaaagcaaaagggtttcagaagccttccatgcaactcctccaacatcgaggagtcccaatccattcggaacagcaaaatatctgtttgacaagatcccaagagatgcttccagcaaggttcgaatcaaccaggacctgtatactcaagaaaaggtcattggagcgccacccccattaccagattttgcattggcgctaacacctgaagaatatgatcttcctccactagatccactttggaacaaagaagacacaagccattaagtgtatatgcagcagaatggttgcttctggcaaaaatattggctctggagagaaaggaaggaccaagatctgccatgtcaagagctgatgtgtaatgaatgaagtgtacaaagtattttcaaacaaaaatacatgttcacaaatttacgcaaggcctgaagacaatctgaagagctttgtacaggcgattcttcttctgacaagggaaatgctatgtcaaagggttccttgatcattgtgcatcttgatgcttgcattttgtcaaaaacagattttcagcaatttatgtagaactgtaaactagcctctgatcgaaagtggcagccttcaaatttttttttgccataaaacatttacatcggcaccttaaaacatgccgtgggacaatcagtttcatctgagcacttaggtgaacaggattttc

SEQ ID NO: 98545 - DNA, 1786 bp, Zea Mays
ttgctttcttccatcttcgtcgtcgcatttttttttgtgtttggcggtgggttcctgatgtcgaagtgaattcatcatgcatgcgtggtgcagataaactaagcagggcgctgcacgaggatggggtgcggggcgtcgagccagaaggacgccggggcgccgcggaggcggccggtgagcgtcggcgacgtggtcgtcttcctcccgggcctccgcgtgccgagggccgtcgacttggcccaggcgctcggcggctgcctggccaggagcgccgtggaccggctgtcggctctgcgatcgcgggtcgtcgacatggcaatgcgagagtcggcggcggcgctcaagcccaggcggagggcggcggcacggcacgggtctagtacagccaatcttctacaggccctcgaagactacttgccggctctgctaggactggtaaaagaaggtagcgtcttgaggaacaaagtgcacttcacctggagtaaccaggaggataatgctgaggagacggccatgccagacgcctggtacgaggtgctgtccatgctgcatctgatggccatggtctgcctgctgcaggccaacgccctgcttctcccgaggtcatacggcgatggctatgccccaagggtttctgaagagagtcgacgggctactgttgatgtcttcttgaaggcagctggatacctagactgtgcagttcggcatgtactcccgaagatgccactggagctaaggagacaacttccagtagacctggctgaaggaaatctcaaagctctaagcctccaagccctgggtcagggggttgacatgcagcttggtttggctattgatagtccaaaggccactttagcagtaaaacggcgcttagcctgtgagatggtcaaatattggcaacaagttcaagagagcattccagagcttcctatctctgatggatggggtaaaaagcaccggctctttataaagtggaaatatgttgaagctaaggctgcagcatactatttccacggtttgattcttgacgagggaaataccgaaaaatcccatggaatggcaatagctgcactccaagcttcagaggaatttctaaaagaaagcaaaagggtttcagaagccttccatgcaactcctccaacatcgaggagtcccaatccattcggaacagcaaaatatctgtttgacaagatcccaagagatgcttccagcaaggttcgaatcaaccaggacctgtatactcaagaaaaggtcattggagcgccacccccattaccagattttgcattggcgctaacacctgaagaatatgatcttcctccactagatccactttggaacaaagaagacacaagccattaagtgtatatgcagcagaatggttgcttctggcaaaaatattggctctggagagaaaggaaggaccaagatctgccatgtcaagagctgatgtgtaatgaatgaagtgtacaaagtattttcaaacaaaaatacatgttcacaaatttacgcaaggcctgaagacaatctgaagagctttgtacaggcgattcttcttctgacaagggaaatgctatgtcaaagggttccttgatcattgtgcatcttgatgcttgcattttgtcaaaaacagattttcagcaatttatgtagaactgtaaactagcctctgatcgaaagtggcagccttcaaatttttttttgccataaaacatttacatcggcaccttaaaacatgccgtgggacaatcagtttcatctgagcacttaggtgaacaggattttc

SEQ ID NO: 98546 - DNA, 1867 bp, Zea Mays
gtggaccgcgaatacgctttcccccagcggcttgctgcctcccaccatctcggcggcctgcaaggctggaacacaccctccccaaaaatggcgaaatgcggcgagcgacgtaagacaggaagagaggagccgcgggggaatctgggggtccattagcagaagcccacctcgggcatcggcgaccggcccatatagttccgtggcccagtgaagatcgtgaccatcacgcgagtcgcccaggcgcccagcgtccagcgatccgacggctgggagtctgggacgcgccggcgctagtcgaactgcggttgaagtttccttccgacgttggcggtgagtgtcgctgcctcgactttgaccagcgttgcaattgcagcctactccgccgccctatcgttctcgcctctccctactaacccacctaccggaagagacgagggtggccgccgccttctcccgctctgcctctcttcatgggccaggtcgagagccaggctacccgtccgtcggaggagccttctccacccgtcgtggagccgtcgccgccgtcttctgccccgcctccgtcctcccttgaggcgcttgccgcaggtatgtgtacatgggaagccccgaagtgtggtttcctccactttactcggaactagttgagttacaattgcgctgggtcttcccgttgcttggatttggatggagcgttggttgaagggtgaacctcttgaactggttacattcggtttcgaagatattttttttagctagttgaattgcagatcgctcttctgacattgatgatttagaacatgtactgagcgcgatatcttcttaggctctttattgtagtctgttgctgaaattgcaatagtatttactgttaatttcgcctcagtgatgttgtatgttaataagcaggggcatggtccgtacttatgaggagaaagcgtaccttaggttagtctggtagcagatcaatgtctgtccagaatgactagcttgactaatcgagcacataggtctctagattactgcttatactttgcctgtcaccatgcaccaaggctcaagaggtctgacacgcatctgaagccaatcaatgctgcttctgactaaaacttggcagaactgtacgtagttcaggggctaatctgttggtgtcatagttcagaggcaaatgttgctgcagaagttctccatgcagcttgtaagataagttgggcgcttagtcgtttgtttacactgttctaagattgcaattttataaaatgtgcagaggccatgtcatttgacgaggatgacactgaggagtcaatcgaaatgaaggtacagaaagctctggactgtccatgtgtcgctgatttgaaaaatggtccttgtggaggtcaattcgtcgatgcattttcctgcttcctcaggagcacagaagaagagaagggatcggattgcgtgaaacccttcatcacattgcaggattgcattaaagcaaatccagaggcattctctaaggagattttggaggaagaggagaatgagaaggaggcagataagtccaacctgaaagttagagctccatcatggtccagagaatccaaccctaaggtttgagattgcatgatattaaatgataaccgtatagaagttctccagtagtggagtagcggattgattttagagagagcaaagaggcatcataaattgattggcagaaatacccatatttagtttggtagaaatgcctcacgatatttttttgagaatgtacacgtcaattcaagtatcaacctagaaacaatgaacatgtaattcgattctttaaggaaaatgtttagtgattttggtgtttgatggtgaaaataacattttggactaatat

SEQ ID NO: 98547 - DNA, 1208 bp, Zea Mays
gtggaccgcgaatacgctttcccccagcggcttgctgcctcccaccatctcggcggcctgcaaggctggaacacaccctccccaaaaatggcgaaatgcggcgagcgacgtaagacaggaagagaggagccgcgggggaatctgggggtccattagcagaagcccacctcgggcatcggcgaccggcccatatagttccgtggcccagtgaagatcgtgaccatcacgcgagtcgcccaggcgcccagcgtccagcgatccgacggctgggagtctgggacgcgccggcgctagtcgaactgcggttgaagtttccttccgacgttggcggtgagtgtcgctgcctcgactttgaccagcgttgcaattgcagcctactccgccgccctatcgttctcgcctctccctactaacccacctaccggaagagacgagggtggccgccgccttctcccgctctgcctctcttcatgggccaggtcgagagccaggctacccgtccgtcggaggagccttctccacccgtcgtggagccgtcgccgccgtcttctgccccgcctccgtcctcccttgaggcgcttgccgcagaggccatgtcatttgacgaggatgacactgaggagtcaatcgaaatgaaggtacagaaagctctggactgtccatgtgtcgctgatttgaaaaatggtccttgtggaggtcaattcgtcgatgcattttcctgcttcctcaggagcacagaagaagagaagggatcggattgcgtgaaacccttcatcacattgcaggattgcattaaagcaaatccagaggcattctctaaggagattttggaggaagaggagaatgagaaggaggcagataagtccaacctgaaagttagagctccatcatggtccagagaatccaaccctaaggtttgagattgcatgatattaaatgataaccgtatagaagttctccagtagtggagtagcggattgattttagagagagcaaagaggcatcataaattgattggcagaaatacccatatttagtttggtagaaatgcctcacgatatttttttgagaatgtacacgtcaattcaagtatcaacctagaaacaatgaacatgtaattcgattctttaaggaaaatgtttagtgattttggtgtttgatggtgaaaataacattttggactaatatatttgctagtgtttatgttt

SEQ ID NO: 98548 - DNA, 1921 bp, Zea Mays
gtggaccgcgaatacgctttcccccagcggcttgctgcctcccaccatctcggcggcctgcaaggctggaacacaccctccccaaaaatggcgaaatgcggcgagcgacgtaagacaggaagagaggagccgcgggggaatctgggggtccattagcagaagcccacctcgggcatcggcgaccggcccatatagttccgtggcccagtgaagatcgtgaccatcacgcgagtcgcccaggcgcccagcgtccagcgatccgacggctgggagtctgggacgcgccggcgctagtcgaactgcggttgaagtttccttccgacgttggcggtgagtgtcgctgcctcgactttgaccagcgttgcaattgcagcctactccgccgccctatcgttctcgcctctccctactaacccacctaccggaagagacgagggtggccgccgccttctcccgctctgcctctcttcatgggccaggtcgagagccaggctacccgtccgtcggaggagccttctccacccgtcgtggagccgtcgccgccgtcttctgccccgcctccgtcctcccttgaggcgcttgccgcagaggccatgtcatttgacgaggatgacactgaggagtcaatcgaaatgaaggtacagaaagctctggactgtccatgtgtcgctgatttgaaaaatggtccttgtggaggtcaattcgtcgatgcattttcctgcttcctcaggagcacagaagaagagaagggatcggattgcgtgaaacccttcatcacattgcaggattgcattaaagcaaatccagaggcattctctaaggagattttggaggaagaggagaatgagaaggaggcagataagtccaacctgaaagttagagctccatcatggtccagagaatccaaccctaaggtttgagattgcatgatattaaatgataaccgtatagaagttctccagtagtggagtagcggattgattttagagagagcaaagaggcatcataaattgattggcagaaatacccatatttagtttggtagaaatgcctcacgatatttttttgagaatgtacacgtcaattcaagtatcaacctagaaacaatgaacatgtaattcgattctttaaggaaaatgtttagtgattttggtgtttgatggtgaaaataacattttggactaatatatttgctagtgtttatgtttatagtttaaagaattcagagtggacttgaactgaggcattaagggagcaactcctcaaagaagacatttagaaaacttattgatgatttatcaacatcatgtaagggtacaagacacaaaacaataaaagtccaagtgaagaaacatgaagaaaagaagattagtctgaaattggatgcgttggatatgtcatgtggtgcatcgaacctggcactagacgtggcactccgagagggtgcaaaacgcatccgagctttgtggcacacaggaccaatcatgtgcacaccgatggcacgacagaccctagaggctcaacgtcgacaacggctagctctagcggtcaagtgacatggcaggcaccagactagttcgatctacgttgttgactcatttgttgggtctagtgtgttgttagaaagttgctagcatctaacggctagctaatgttgttgggtctagtgtgttgttagaaagttgctagcatctaacggctagctaatgtggaaggcgccagatctggtctcatatacatagatggcacatgggaccggtctggtgtggcgtagaaaagtcggttccttttcaacggctcttttgggcttggggctatatatacccacctaaccggccattctcaagtgtggagaggtgagaaacatagtgcatgttttgagacacaaatcctttagctcaaaacaccaagtgctaataga

SEQ ID NO: 98549 - DNA, 2600 bp, Zea Mays
gtggaccgcgaatacgctttcccccagcggcttgctgcctcccaccatctcggcggcctgcaaggctggaacacaccctccccaaaaatggcgaaatgcggcgagcgacgtaagacaggaagagaggagccgcgggggaatctgggggtccattagcagaagcccacctcgggcatcggcgaccggcccatatagttccgtggcccagtgaagatcgtgaccatcacgcgagtcgcccaggcgcccagcgtccagcgatccgacggctgggagtctgggacgcgccggcgctagtcgaactgcggttgaagtttccttccgacgttggcggtgagtgtcgctgcctcgactttgaccagcgttgcaattgcagcctactccgccgccctatcgttctcgcctctccctactaacccacctaccggaagagacgagggtggccgccgccttctcccgctctgcctctcttcatgggccaggtcgagagccaggctacccgtccgtcggaggagccttctccacccgtcgtggagccgtcgccgccgtcttctgccccgcctccgtcctcccttgaggcgcttgccgcaggtatgtgtacatgggaagccccgaagtgtggtttcctccactttactcggaactagttgagttacaattgcgctgggtcttcccgttgcttggatttggatggagcgttggttgaagggtgaacctcttgaactggttacattcggtttcgaagatattttttttagctagttgaattgcagatcgctcttctgacattgatgatttagaacatgtactgagcgcgatatcttcttaggctctttattgtagtctgttgctgaaattgcaatagtatttactgttaatttcgcctcagtgatgttgtatgttaataagcaggggcatggtccgtacttatgaggagaaagcgtaccttaggttagtctggtagcagatcaatgtctgtccagaatgactagcttgactaatcgagcacataggtctctagattactgcttatactttgcctgtcaccatgcaccaaggctcaagaggtctgacacgcatctgaagccaatcaatgctgcttctgactaaaacttggcagaactgtacgtagttcaggggctaatctgttggtgtcatagttcagaggcaaatgttgctgcagaagttctccatgcagcttgtaagataagttgggcgcttagtcgtttgtttacactgttctaagattgcaattttataaaatgtgcagaggccatgtcatttgacgaggatgacactgaggagtcaatcgaaatgaaggtacagaaagctctggactgtccatgtgtcgctgatttgaaaaatggtccttgtggaggtcaattcgtcgatgcattttcctgcttcctcaggagcacagaagaagagaagggatcggattgcgtgaaacccttcatcacattgcaggattgcattaaagcaaatccagaggcattctctaaggagattttggaggaagaggagaatgagaaggaggcagataagtccaacctgaaagttagagctccatcatggtccagagaatccaaccctaaggtttgagattgcatgatattaaatgataaccgtatagaagttctccagtagtggagtagcggattgattttagagagagcaaagaggcatcataaattgattggcagaaatacccatatttagtttggtagaaatgcctcacgatatttttttgagaatgtacacgtcaattcaagtatcaacctagaaacaatgaacatgtaattcgattctttaaggaaaatgtttagtgattttggtgtttgatggtgaaaataacattttggactaatatatttgctagtgtttatgtttatagtttaaagaattcagagtggacttgaactgaggcattaagggagcaactcctcaaagaagacatttagaaaacttattgatgatttatcaacatcatgtaagggtacaagacacaaaacaataaaagtccaagtgaagaaacatgaagaaaagaagattagtctgaaattggatgcgttggatatgtcatgtggtgcatcgaacctggcactagacgtggcactccgagagggtgcaaaacgcatccgagctttgtggcacacaggaccaatcatgtgcacaccgatggcacgacagaccctagaggctcaacgtcgacaacggctagctctagcggtcaagtgacatggcaggcaccagactagttcgatctacgttgttgactcatttgttgggtctagtgtgttgttagaaagttgctagcatctaacggctagctaatgttgttgggtctagtgtgttgttagaaagttgctagcatctaacggctagctaatgtggaaggcgccagatctggtctcatatacatagatggcacatgggaccggtctggtgtggcgtagaaaagtcggttccttttcaacggctcttttgggcttggggctatatatacccacctaaccggccattctcaagtgtggagaggtgagaaacatagtgcatgttttgagacacaaatcctttagctcaaaacaccaagtgctaataga

SEQ ID NO: 98550 - DNA, 597 bp, Zea Mays
gcatcttggtactccgagtgccactggtcagtcaaataacattttgcttgtacagtcaatcgaaatgaaggtacagaaagctctggactgtccatgtgtcgctgatttgaaaaatggtccttgtggaggtcaattcgtcgatgcattttcctgcttcctcaggagcacagaagaagagaagggatcggattgcgtgaaacccttcatcacattgcaggattgcattaaagcaaatccagaggcattctctaaggagattttggaggaagaggagaatgagaaggaggcagataagtccaacctgaaagttagagctccatcatggtccagagaatccaaccctaaggtttgagattgcatgatattaaatgataaccgtatagaagttctccagtagtggagtagcggattgattttagagagagcaaagaggcatcataaattgattggcagaaatacccatatttagtttggtagaaatgcctcacgatatttttttgagaatgtacacgtcaattcaagtatcaacctagaaacaatgaacatgtaattcgattctttaaggaaaatgtttagtgattttggtgtttgatggtg

SEQ ID NO: 98551 - DNA, 494 bp, Zea Mays
accaccgttgacttttttattcatgtatttttcttgtctaaatttactggcaccaaactttgctgtctggcttttcagggatcggattgcgtgaaacccttcatcacattgcaggattgcattaaagcaaatccagaggcattctctaaggagattttggaggaagaggagaatgagaaggaggcagataagtccaacctgaaagttagagctccatcatggtccagagaatccaaccctaaggtttgagattgcatgatattaaatgataaccgtatagaagttctccagtagtggagtagcggattgattttagagagagcaaagaggcatcataaattgattggcagaaatacccatatttagtttggtagaaatgcctcacgatatttttttgagaatgtacacgtcaattcaagtatcaacctagaaacaatgaacatgtaattcgattctttaaggaaaatgtttagtgattttggtgtttgatggtg

SEQ ID NO: 98552 - DNA, 1747 bp, Zea Mays
cttcgcctcatcgggcgccaaacctttccgatttacaaaccgcgctttgcgcaacgagaagacgaagccacgaaagtaaagggagaagccgccgccgccgtcgtcgtagagcaagccatgaagttcaaggccttctttaccgacgatggcatctccctcctcgacaagcgattcctaccggccatggacaaggtggggcgcgtctgccacgttttcttcacgcccacgcacgccatgctcctccacaacctgctcggcgccacggccgctgggcccgacggcggcggcccgcagtgcgtcgctcagttcgccaaggacctcctcttccgtgagtacaacctgtcctcgcgaaacgggaaccaaatcgccttctccgtcgaagtcgcgctgcttcaccgcgcgctccgcagcgtgctcgccgtccacgcgcagccgccggccgccggggacgccgctggtgcccccgctatacaggtgaggctcgtcaacaagctgcccgcagggtcacgaaccgccacgccattcctcactttcgaaaccaagggcgcccacgcggccgtcgtgcaggatgtgcccatctcgcgccctctctcacgctccgacgtcgagcggttgcacgccgcccttgacgctgccaaggatctccctaagactctagtccaggttcctgatctgccacaactgcaaagcttagtggatcgtttgaaaaatgttggtgatctgctaactgtggctgtcacccaatatggtgatctccatctacaagtttcaacttctcttgttacggttggctctgaatttaggaagcttagggttattggggatcgtgcaaatgcacctgttggtgatcaaaatttgacttcttcgactcgtatggatatggcggttgagagaagggaagcactttcagtgcaagtgaatatgaagcaccttgttaagagtctacactgtcatttggccaagccagactgtaccttctatggcattgctcctgatggtgcttgtttaacagtcgtgttccagtatttcatcccaggaactagactggcagacaagtccattagcttctactgcaggcttccagtcctcgaccctggatccagttaaataattaaccaggcataactagatttatgtatcagcaaagaatattaggtagcaagactattagattagctgctgcatattttccttctcgtctagtgtctaccttaggtgcgaaagggcctctagctgagttggttagttggtctgagtagcactcctcaggtcctgggtttgactccccgtgggagcgaatttcaggctgtggttaaaaaaatcccctcgtctgtcccatgccaaagcacaggtctaaggctcagccccggtcgtggtcgttctcacatgggcttcgatgccgctgtgtatgggtggggcaggggttcgggggttttcttgacctgtgtgagaaggtcttcttcttaatacaatacccgggggctgtcttacccttcgcaggtcaagtttttttttagtgtctaccttagggacatgggctacaggcttcacagttagtgtggtatgctgctttatgtgaaaggctgatatgacatgttgtacaagcagacatggatcaacttcgttattgcagtgaatccttactggcagcactacaaaagcatattaggtgctgtttggtttacatatttgtaacgtgaatggtaaccaataacattaaactatgtttgtttaaattcaatcgtaa

SEQ ID NO: 98553 - DNA, 1654 bp, Zea Mays
cttcgcctcatcgggcgccaaacctttccgatttacaaaccgcgctttgcgcaacgagaagacgaagccacgaaagtaaagggagaagccgccgccgccgtcgtcgtagagcaagccatgaagttcaaggccttctttaccgacgatggcatctccctcctcgacaagcgattcctaccggccatggacaaggtggggcgcgtctgccacgttttcttcacgcccacgcacgccatgctcctccacaacctgctcggcgccacggccgctgggcccgacggcggcggcccgcagtgcgtcgctcagttcgccaaggacctcctcttccgtgagtacaacctgtcctcgcgaaacgggaaccaaatcgccttctccgtcgaagtcgcgctgcttcaccgcgcgctccgcagcgtgctcgccgtccacgcgcagccgccggccgccggggacgccgctggtgcccccgctatacaggatgtgcccatctcgcgccctctctcacgctccgacgtcgagcggttgcacgccgcccttgacgctgccaaggatctccctaagactctagtccaggttcctgatctgccacaactgcaaagcttagtggatcgtttgaaaaatgttggtgatctgctaactgtggctgtcacccaatatggtgatctccatctacaagtttcaacttctcttgttacggttggctctgaatttaggaagcttagggttattggggatcgtgcaaatgcacctgttggtgatcaaaatttgacttcttcgactcgtatggatatggcggttgagagaagggaagcactttcagtgcaagtgaatatgaagcaccttgttaagagtctacactgtcatttggccaagccagactgtaccttctatggcattgctcctgatggtgcttgtttaacagtcgtgttccagtatttcatcccaggaactagactggcagacaagtccattagcttctactgcaggcttccagtcctcgaccctggatccagttaaataattaaccaggcataactagatttatgtatcagcaaagaatattaggtagcaagactattagattagctgctgcatattttccttctcgtctagtgtctaccttaggtgcgaaagggcctctagctgagttggttagttggtctgagtagcactcctcaggtcctgggtttgactccccgtgggagcgaatttcaggctgtggttaaaaaaatcccctcgtctgtcccatgccaaagcacaggtctaaggctcagccccggtcgtggtcgttctcacatgggcttcgatgccgctgtgtatgggtggggcaggggttcgggggttttcttgacctgtgtgagaaggtcttcttcttaatacaatacccgggggctgtcttacccttcgcaggtcaagtttttttttagtgtctaccttagggacatgggctacaggcttcacagttagtgtggtatgctgctttatgtgaaaggctgatatgacatgttgtacaagcagacatggatcaacttcgttattgcagtgaatccttactggcagcactacaaaagcatattaggtgctgtttggtttacatatttgtaacgtgaatggtaaccaataacattaaactatgtttgtttaaattcaatcgtaa

SEQ ID NO: 98554 - DNA, 1476 bp, Zea Mays
cttcgcctcatcgggcgccaaacctttccgatttacaaaccgcgctttgcgcaacgagaagacgaagccacgaaagtaaagggagaagccgccgccgccgtcgtcgtagagcaagccatgaagttcaaggccttctttaccgacgatggcatctccctcctcgacaagcgattcctaccggccatggacaaggtggggcgcgtctgccacgttttcttcacgcccacgcacgccatgctcctccacaacctgctcggcgccacggccgctgggcccgacggcggcggcccgcagtgcgtcgctcagttcgccaaggacctcctcttccgtgagtacaacctgtcctcgcgaaacgggaaccaaatcgccttctccgtcgaagtcgcgctgcttcaccgcgcgctccgcagcgtgctcgccgtccacgcgcagccgccggccgccggggacgccgctggtgcccccgctatacaggatgtgcccatctcgcgccctctctcacgctccgacgtcgagcggttgcacgccgcccttgacgctgccaaggatctccctaagcaaatgcacctgttggtgatcaaaatttgacttcttcgactcgtatggatatggcggttgagagaagggaagcactttcagtgcaagtgaatatgaagcaccttgttaagagtctacactgtcatttggccaagccagactgtaccttctatggcattgctcctgatggtgcttgtttaacagtcgtgttccagtatttcatcccaggaactagactggcagacaagtccattagcttctactgcaggcttccagtcctcgaccctggatccagttaaataattaaccaggcataactagatttatgtatcagcaaagaatattaggtagcaagactattagattagctgctgcatattttccttctcgtctagtgtctaccttaggtgcgaaagggcctctagctgagttggttagttggtctgagtagcactcctcaggtcctgggtttgactccccgtgggagcgaatttcaggctgtggttaaaaaaatcccctcgtctgtcccatgccaaagcacaggtctaaggctcagccccggtcgtggtcgttctcacatgggcttcgatgccgctgtgtatgggtggggcaggggttcgggggttttcttgacctgtgtgagaaggtcttcttcttaatacaatacccgggggctgtcttacccttcgcaggtcaagtttttttttagtgtctaccttagggacatgggctacaggcttcacagttagtgtggtatgctgctttatgtgaaaggctgatatgacatgttgtacaagcagacatggatcaacttcgttattgcagtgaatccttactggcagcactacaaaagcatattaggtgctgtttggtttacatatttgtaacgtgaatggtaaccaataacattaaactatgtttgtttaaattcaatcgtaa

SEQ ID NO: 98555 - DNA, 1645 bp, Zea Mays
cctcattttctctctaccgcaattcatcgagcacgccccatgcgctcccacggtctttgccgtgcaggattcctaccggccatggacaaggtggggcgcgtctgccacgttttcttcacgcccacgcacgccatgctcctccacaacctgctcggcgccacggccgctgggcccgacggcggcggcccgcagtgcgtcgctcagttcgccaaggacctcctcttccgtgagtacaacctgtcctcgcgaaacgggaaccaaatcgccttctccgtcgaagtcgcgctgcttcaccgcgcgctccgcagcgtgctcgccgtccacgcgcagccgccggccgccggggacgccgctggtgcccccgctatacaggtgaggctcgtcaacaagctgcccgcagggtcacgaaccgccacgccattcctcactttcgaaaccaagggcgcccacgcggccgtcgtgcaggatgtgcccatctcgcgccctctctcacgctccgacgtcgagcggttgcacgccgcccttgacgctgccaaggatctccctaagactctagtccaggttcctgatctgccacaactgcaaagcttagtggatcgtttgaaaaatgttggtgatctgctaactgtggctgtcacccaatatggtgatctccatctacaagtttcaacttctcttgttacggttggctctgaatttaggaagcttagggttattggggatcgtgcaaatgcacctgttggtgatcaaaatttgacttcttcgactcgtatggatatggcggttgagagaagggaagcactttcagtgcaagtgaatatgaagcaccttgttaagagtctacactgtcatttggccaagccagactgtaccttctatggcattgctcctgatggtgcttgtttaacagtcgtgttccagtatttcatcccaggaactagactggcagacaagtccattagcttctactgcaggcttccagtcctcgaccctggatccagttaaataattaaccaggcataactagatttatgtatcagcaaagaatattaggtagcaagactattagattagctgctgcatattttccttctcgtctagtgtctaccttaggtgcgaaagggcctctagctgagttggttagttggtctgagtagcactcctcaggtcctgggtttgactccccgtgggagcgaatttcaggctgtggttaaaaaaatcccctcgtctgtcccatgccaaagcacaggtctaaggctcagccccggtcgtggtcgttctcacatgggcttcgatgccgctgtgtatgggtggggcaggggttcgggggttttcttgacctgtgtgagaaggtcttcttcttaatacaatacccgggggctgtcttacccttcgcaggtcaagtttttttttagtgtctaccttagggacatgggctacaggcttcacagttagtgtggtatgctgctttatgtgaaaggctgatatgacatgttgtacaagcagacatggatcaacttcgttattgcagtgaatccttactggcagcactacaaaagcatattaggtgctgtttggtttacatatttgtaacgtgaatggtaaccaataacattaaactatgtttgtttaaattcaatcgtaa

SEQ ID NO: 98556 - DNA, 1661 bp, Zea Mays
ttttctctctaccgcaattcatcgagcacgccccatgcgctcccacggtctttgccgtgcaggattcctaccggccatggacaaggtggggcgcgtctgccacgttttcttcacgcccacgcacgccatgctcctccacaacctgctcggcgccacggccgctgggcccgacggcggcggcccgcagtgcgtcgctcagttcgccaaggacctcctcttccgtgagtacaacctgtcctcgcgaaacgggaaccaaatcgccttctccgtcgaagtcgcgctgcttcaccgcgcgctccgcagcgtgctcgccgtccacgcgcagccgccggccgccggggacgccgctggtgcccccgctatacaggtgaggctcgtcaacaagctgcccgcagggtcacgaaccgccacgccattcctcactttcgaaaccaagggcgcccacgcggccgtcgtgcaggatgtgcccatctcgcgccctctctcacgctccgacgtcgagcggttgcacgccgcccttgacgctgccaaggatctccctaagactctagtccaggttcctgatctgccacaactgcaaagcttagtggatcgtttgaaaaatgttggtgatctgctaactgtggctgtcacccaatatggtgatctccatctacaagtttcaacttctcttgttacggttggctctgaatttaggaagcttagggttattggggatcgtgcaaatgcacctgttggtgatcaaaatttgacttcttcgactcgtatggatatggcggttgagagaagggaagcactttcagtgcaagtgaatatgaagcaccttgttaagagtctacactgtcatttggccaagccagactgtaccttctatggtttgtttacggctataatctcaatgatattttttgttcaacatacttttgacttaacgttgttcttactgtttgtttaggcattgctcctgatggtgcttgtttaacagtcgtgttccagtatttcatcccaggaactagactggcagacaagtccattagcttctactgcaggcttccagtcctcgaccctggatccagttaaataattaaccaggcataactagatttatgtatcagcaaagaatattaggtagcaagactattagattagctgctgcatattttccttctcgtctagtgtctaccttaggtgcgaaagggcctctagctgagttggttagttggtctgagtagcactcctcaggtcctgggtttgactccccgtgggagcgaatttcaggctgtggttaaaaaaatcccctcgtctgtcccatgccaaagcacaggtctaaggctcagccccggtcgtggtcgttctcacatgggcttcgatgccgctgtgtatgggtggggcaggggttcgggggttttcttgacctgtgtgagaaggtcttcttcttaatacaatacccgggggctgtcttacccttcgcaggtcaagtttttttttagtgtctaccttagggacatgggctacaggcttcacagttagtgtggtatgctgctttatgtgaaaggctgatatgacatgttgtacaagcagacatggatcaacttcgttattgcagtgaatccttactggcagcactacaaaagcatattaggtgctgtttggtttacata

SEQ ID NO: 98557 - DNA, 417 bp, Zea Mays
cataggaacaagatgtccaatagggccacccatgggtgctatgcctgtcggcggccaattcaccgtcgtggacaggataccatttgttccggctgcaatgatggttttatccaggaaagcagtgagatgggtggagtactgaacacttatgggctcattgaaccggactttgaagagcgtcgagccaaaagaattggaatgatggatgccatatctgcccttatccagcaacagatggctattgactccatgtcgattgggtacaataccaccatatcagtgccacaaatgcatgcagtttgcccggagctcctcgagaagaatcttcagccgggaatgcgagctctcaacgttggttcatggattggtgtggctgctggccttgttccttctggtctagctaggtgctgttactag

SEQ ID NO: 98558 - DNA, 3214 bp, Zea Mays
agccaggcgcgcggcacggggcaggaaccctggcccgtccgacgagacgacgaaccggccgcgggcctcgtgcccgtggtggtggatatctgactgactgacgccacctgcgcgtagccgcgggcgctttgcttccctcctcgtcgaggcgtgccgacgggacgatttctatccgcggggcggcgctgtgtcgactgtcgactccaactcccaggccggtcaatgagggcgcggagatgagcgccggcggcggggaggaggtgttctacgagtcgcgggacggcgtgctctcctcctcctgctcctccgcctcggacgacgacgacgacgacagcgaccacccgcgacggcggcggcgggacggggccgcctctaccgccgccgcagcggcgctcgacgtgtggacgtccgagccggcgcccgtgcaggagcggcgccggaagctgctccagatgctggggctcgccggggaccccgccctggcgcgcctcgagatgggccgatcggtctcctacgacgacgggcctgtgcccgtccgcccggcgccggcctcgccgcccatctcccgatccagatcagacggcggcgccgtgccggcctcggcgaccaagccgccgctgggagggcggtcgccgggctcctccgaggccacgcccgaaggggaggaggaggaggaggaggaggccgacccgaggtgtctgatccggaacctcgacgacggcagcgagttcgtggtcaaggaagggtccgagctccgcgaggtcggcacgggccggcagctcaccatggaggagttcgttgacctctgcgtcggccgctcgcctatcgtccaggagctcatgcggcggcgcgagaacgttgcgagctccggctcgtccacccccgtccagcgctccaactccgactccagcaacggagcgacgcgccaccggcggcggcggcggcatagcagctggcttcggggcatccggaacgtcgccggctccgtggtggccagctcccgcgaccgccgcagcagcgacgacaaggacacgtgctcggagaaaggcggccgccggtccagctcggccacagacgacagccaggacagcgctggagccgtgcgccacggcccggtgcgcgttaaggtgaggcagtatgggaagtcgtacaaggagctcagtggcctgttcatgaaccaggagatccaggctcacgatggctccatctggagcatcaggtttagtccagatggccggtacctcgcgagtgctggggaagactgcgtgatccatgtctgggaagtgtcagagttcgagaggaaacgcgaggagaacggagcgtgcaatccttttgttgcgatggtgtgcaacggttcgccggagccaacattagccgtggccagcagtgtggatgggagcaatcgtgagaagaagcgtcgggcaaggttcttggagggtcgtaggtctgtgagctcagaccggctaatgctgccagagcatgtgtttgcgctgtcagaaaaaccgattcggaccttcatggggcactcagaagatgtgcttgatctctgctggtccaaatcccagtacttgctttcatcttcaatggataaaacggtgaagttgtggcacatttcgagcacttcctgtctgaaaacattctcacacagtgattatgtgacttgcatccagttcaaccctgttgatgatagatacttcattagtggatcactagatgaaaaagtccgcatatggagcattcaaaaccgtgaaattgttgattggaaagatttgcatgaaatgatcactgctgcttgctataccccagatggacagagcgcactaattggttcccataaaggcagctgccatatttatgatacatctgataatatgcttctccaaaagaaacaaattgacctgcaaaataagaaaaagaagtccagtcagaagaaaatcactggatttcagttcctcccagggagtacttcaaaggtccttatcacatctgcagattcaagaatcagggttgttgatggccttaatcttgttcacaagtacaaaggtttccgaaacagtaacagccagatttcagccagtttagctgcaaatgggagttatgtgatctcagcaagtgaggattcccacgtgtacatatggagaatcgatgataaccttgaacagggcagaagcaaggggaatgttactgtcaccaattcctatgaatatttccactgccaggatgtgacagttgccgttgcactgccatctaacggctccccagtggtatccagagcaaactcggcgaagcacgatgagcgggattctgtatcggagcattctgcgctgcatgctgcccctgaaaaaccgcaagactcttctgatttccagcctcaaagtggctataccataagcaccggttcaaatgacagtggtgatagagcaacttggcctgaagagctcatgacgccaacaaagcagagccctcggtctagtgccagtcttcccagtggtgctgatcaagctccaggtcggtcagcctgggggaccgtaattgtcacggccggccgtggaggtcagatcagaacatttcagaatttcgggtttcctgctcgaatatagtagctctgaggctgctgcctggtcttggcgtctgccctgccgcaagccgccgggtgattttttgtgtatagataggcgaaagtttgggtgatttgcacagcagtctgggattggattttgttgctcctaggcgcacatgcttgcgaatttcaactaacctggtactcaaggtacggcgagttcgtttgcccggaattgtatatgggaatggagcccgggaaggacgagggggcgtcggccggttggagctagatcttttttaggatcttttgacagacatcttttcatctgtttcctccattgagtccagtttagcttttttttttgtactttatgttttactcgtcattatatattcttgtaagaaatcccagttctacagaaatagaaaagcgaaaaggagttgcatagagtggtgaattcgttgtactggtatagcaggcttgagatgttggtagtacaactggtataataattgagcggctaggaaaatatggagagagaaaaaaaaattgagttctgaagcttttggaccttgcttccggagaagtctggcaggtgcgtttctgatgtgtatctactgtcccaactgtcggttgtccaacaaatttctt

SEQ ID NO: 98559 - DNA, 1310 bp, Zea Mays
catcattaagcttcctgtcttactgaataatagttccttgaatagttcctcccagggagtacttcaaaggtccttatcacatctgcagattcaagaatcagggttgttgatggccttaatcttgttcacaagtacaaaggtttccgaaacagtaacagccagatttcagccagtttagctgcaaatgggagttatgtgatctcagcaagtgaggattcccacgtgtacatatggagaatcgatgataaccttgaacagggcagaagcaaggggaatgttactgtcaccaattcctatgaatatttccactgccaggatgtgacagttgccgttgcactgccatctaacggctccccagtggtatccagagcaaactcggcgaagcacgatgagcgggattctgtatcggagcattctgcgctgcatgctgcccctgaaaaaccgcaagactcttctgatttccagcctcaaagtggctataccataagcaccggttcaaatgacagtggtgatagagcaacttggcctgaagagctcatgacgccaacaaagcagagccctcggtctagtgccagtcttcccagtggtgctgatcaagctccaggtcggtcagcctgggggaccgtaattgtcacggccggccgtggaggtcagatcagaacatttcagaatttcgggtttcctgctcgaatatagtagctctgaggctgctgcctggtcttggcgtctgccctgccgcaagccgccgggtgattttttgtgtatagataggcgaaagtttgggtgatttgcacagcagtctgggattggattttgttgctcctaggcgcacatgcttgcgaatttcaactaacctggtactcaaggtacggcgagttcgtttgcccggaattgtatatgggaatggagcccgggaaggacgagggggcgtcggccggttggagctagatcttttttaggatcttttgacagacatcttttcatctgtttcctccattgagtccagtttagcttttttttttgtactttatgttttactcgtcattatatattcttgtaagaaatcccagttctacagaaatagaaaagcgaaaaggagttgcatagagtggtgaattcgttgtactggtatagcaggcttgagatgttggtagtacaactggtataataattgagcggctaggaaaatatggagagagaaaaaaaaattgagttctgaagcttttggaccttgcttccggagaagtctggcaggtgcgtttctgatgtgtatctactgtcccaactgtcggttgtccaacaaatttctt

SEQ ID NO: 98560 - DNA, 116 bp, Zea Mays
aaaatactttgttgttactgtttatctagcccacaaactacaacccaaagacacagtagagtacagacattagcagagcatgatttatcatcttcagaccattgtctactatcaag

SEQ ID NO: 98561 - DNA, 459 bp, Zea Mays
cacaggagagaatcctgcaagcggcggccgcgcagcctaggccgaggtgaacttggtgacggccttggtgccctcggagacggcgtgcttggcgagctccccgggaaggacgaggcgcacggaggtctggatctcacgggagatgccaatgtccgggtgcacctgcttcagcaccttgaagatgtagatcttgtaggtctccacgctcttcttgcccttcttcttgcccctcttgccctcgccgccttccttggcagcggacttgccagcggggacccgcttctccgccttcggcttcttcccggcgggcgccttctcggccgcgggctcctcctccgccggcttcttcgccgcgggtttcttctcggccttgggcgccatcgatgcggggcgagttggggttttggttgcgaaggggggatcggatgggaagaaatgcgaggagatgtgttcgctgtt

SEQ ID NO: 98562 - DNA, 273 bp, Zea Mays
atggctgccactccggaccgcgtcaatgccgaccttcatcgtcgcctcgccgtcgacactccaccgccgccccagggaggaatcgtccaggcactaagcacaaggaacagatggaatgggtactccatggattaccaaggaaaaaacaagctggtttttagcctaactgatccgaaatcatgcacagcacaaggtagagactgtacgatagttgattgcaccagaaaaatagtagcccagattaaaggcatatcccatgagagcagaaaataa

SEQ ID NO: 98563 - DNA, 783 bp, Zea Mays
accagagaacactcaagtctcccaactgcccgcctgccgaggttggatgtggctccaccagctctgcctccctacttcctctactgctgcggctactgctacatcatctatcgtgcctgtttttctaggaatcttaatggcatcaggctgacattttgttcaactcattagctggttacagtaacaaggaaccaccattttgatgcaaaggagcagatgcgacaggatcacaagtaggaggagctgcgacgatgctgtagcgagagacatgggtgccgaggtcgttgtgctgcggtggtggcaggacaggaaggaaacgaaaaagcaggagccagggttgttcaacaacgtgaccgagtcgctgaggcgaggaagagtaaggtgaaggcactcgtcgacgcctttgagactgacagagcgtcatctcgctgcaggaaaccagcaagcctgctgctgctccagctatgaaagtaggtgtcgtgccatgagtgcttcttgacctgcagtgtgcatgatcacctttcttggaattttaaactttttttggttgttagtgaccgtaaaagtggcgcttgttgaggtttgctcgttcccatgtaaactgacttttctcatgggagttttcatacttttgtagtgctagaaaaaggaaagtctgtacaggttttgtgtctatgcaaggcttgagaagttggcattgtactgataagtgataagtaaacaagttattgtaatgatttaaactagattgttttgaaaggaaatggaatgcataaagcaaat

SEQ ID NO: 98564 - DNA, 1063 bp, Zea Mays
caatgttgttagatctattaatgcgatgttctctgtcttatttttatcctacaagtcatttcgagatatgtggttgctgatcagatgcgggcaatgtcaattttattattggaattgttaacttgacactcattcaccttctggactgaaaaccaagacagtactgcatctatttagttaaacatatattacttggctgctaacacaactaagagaaatactgaaaatcaatccttcagtctatccttccataggattttaatttgtgcatgatagagagttttacatgtcagaaatttatagatgtcagagagttcattgcagttcatctccttcactgcatcttgcatattttttctctctttcagctggttacagtaacaaggaaccaccattttgatgcaaaggtaagcatctgcattttactcgagttacatgtcactgctaccccttaatcccggggtgcctttgatttgcgacatccaggagcagatgcgacaggatcacaagtaggaggagctgcgacgatgctgtagcgagagacatgggtgccgaggtcgttgtgctgcggtggtggcaggacaggaaggaaacgaaaaagcaggagccagggttgttcaacaacgtgaccgagtcgctgaggcgaggaagagtaaggtgaaggcactcgtcgacgcctttgagactgacagagcgtcatctcgctgcaggaaaccagcaagcctgctgctgctccagctatgaaagtaggtgtcgtgccatgagtgcttcttgacctgcagtgtgcatgatcacctttcttggaattttaaactttttttggttgttagtgaccgtaaaagtggcgcttgttgaggtttgctcgttcccatgtaaactgacttttctcatgggagttttcatacttttgtagtgctagaaaaaggaaagtctgtacaggttttgtgtctatgcaaggcttgagaagttggcattgtactgataagtgataagtaaacaagttattgtaatgatttaaactagattgttttgaaaggaaatggaatgcataaagcaaattaaa

SEQ ID NO: 98565 - DNA, 2541 bp, Zea Mays
gtaggccgcgatgtggcgcctctgtacacgcctacacagaaaagcgtctcccatcttgacgacccgtcttcgacctcgctcccacctcgccgcccgatcccgacgggctggatcgccggcgaccgaccgttgtcgatacgaagtgcagctgtaggctcttcctgccgatcccctgcgtttgcgttccataatagcacgaccagcgcatctcaccggctcaagagcatccgtggatctgaccggaggaggccgcggctgctactgctactgctctctcggcgatgtcgagggttcgggacaggacggaggacttcaaggaggccgtccgagttgccgcgctctcccatggatacacggaggcccaactggctgcgctgatgtcgtctttcatcatccggaagccgtcgcccaaatcgccgttcactaatgccgccatcaagacgcttgagagcatcagggagctcgagaggttcatagtgaagcataggagggattatgtggacctgcatcgcattaccgagcaagagagggataacattgagcatgaagtaagttgtatactgtgtcgtttggtttgatttgctatcacttttcctgtgatggcgcctgcatgaaatcttaaaatgtgtgtattactcaacccatgtgcttaatgttcataaaagaattgtctagtgtgctgtttgcctgtttggcactgcattacaattctctagcattgtaatatgcttgaagccttcaatgtttgaaaacttcaatggaagcttttatgcctggaggctgaagctcaattgcacaaaagatacctattgttgtagctgtaccatgtcatgtacctttttgtaaattatatacttggctgccaagtttttttcacaactgtacaaatctaatcttggattacaattatcgaagactgcaagccctaaaaaattgcttaagagcctgtatatatatgcacgatcagtatcctccttgatgttcaaacagtcagttaatgtaggctgtgcttctctctgcacactattaatctacgtttggatatagtggaatgttcctcttgtatagactattggcttgacaacctatattcatactggcacgctgcacattgattcatataacctgctttctgttatcaacctagtacttatttctaactactcaatgcatattagattggtgtttttgtaaaagcatgcaaggaacagattgatatcctaaagaacaggatccaagaagaagagaagaatggaagtggaaagacatggcttggcactagggatgggagttcccggttggacttgatagctcatcagcatggtgtggtatggttattctccttaccattgctgttataagttaaaaggttaatttgttctttgaggtatttagcagtagaactgacctgaatgcattccatttagagatgacgcaaagtaattccttagatacctgttacggtttctacatgtattatgaatttatgatccaagatttctttttattagagccaattgagcaggtcatcctgttgaggattgattgttttcaacatttcctttccaaatttttgagctggatgcatatttcactagctggtagtaggatatcagactttgattggttgatttcatttggtaggataaaaattatacagtgtgatttttagaggacagattgcctagtcaaaacaggtgaacttgaataatatctactttcattttcttgttcagggctgcataggtaagagcatgtacaggcgagtacctacctctatttttctttgttgttcatttttctctaatatccaaatcttagtagcagtcaatcatcagttctaagtctgaactacaatttttttgcagtagtcttaggaattttcttgtgcccagctccagtaagctgtttattctgtgttgaactttaccaggttctaattttaagtgagcgtctccactcggtaactgctcaattcgatcgtcttcggtccatgcgttttcaagatgctattaacagagctatgccaaggaagaatcagaagagaccagaaaaaaaacctgctgaaccgtccaagtccagtcttgttctaaaatctgatgtatcaaagattgtagatcaggaagcgtccacagcacctatgagagttcaagaacaactactggatgatgaaacaaaagccctccaggtggagttgacaagtcttcttgatgctgtccaagaaacggagacaaagatgatagaaatgtcagcacttaaccatcttatgtcaacacatgttctacaacaagctcaacaaatccagtatttgtatgaccaggctgttgaagctacgaataacgtggagcgtgggaacaaggagctatcccaggcgatccagcgcaacagcagcagtagaacctttctcctcctcttcttctttgttctcactttctcggttctttttcttgactggtacaacaactgagttagcatatgaagacattgtatgctgttcatgggaaatggttaaattatgaaagctggtctgtcttgaagtcc

SEQ ID NO: 98566 - DNA, 1540 bp, Zea Mays
gtaggccgcgatgtggcgcctctgtacacgcctacacagaaaagcgtctcccatcttgacgacccgtcttcgacctcgctcccacctcgccgcccgatcccgacgggctggatcgccggcgaccgaccgttgtcgatacgaagtgcagctgtaggctcttcctgccgatcccctgcgtttgcgttccataatagcacgaccagcgcatctcaccggctcaagagcatccgtggatctgaccggaggaggccgcggctgctactgctactgctctctcggcgatgtcgagggttcgggacaggacggaggacttcaaggaggccgtccgagttgccgcgctctcccatggatacacggaggcccaactggctgcgctgatgtcgtctttcatcatccggaagccgtcgcccaaatcgccgttcactaatgccgccatcaagacgcttgagagcatcagggagctcgagaggttcatagtgaagcataggagggattatgtggacctgcatcgcattaccgagcaagagagggataacattgagcatgaaattggtgtttttgtaaaagcatgcaaggaacagattgatatcctaaagaacaggatccaagaagaagagaagaatggaagtggaaagacatggcttggcactagggatgggagttcccggttggacttgatagctcatcagcatggtgtggttctaattttaagtgagcgtctccactcggtaactgctcaattcgatcgtcttcggtccatgcgttttcaagatgctattaacagagctatgccaaggaagaatcagaagagaccagaaaaaaaacctgctgaaccgtccaagtccagtcttgttctaaaatctgatgtatcaaagattgtagatcaggaagcgtccacagcacctatgagagttcaagaacaactactggatgatgaaacaaaagccctccaggtggagttgacaagtcttcttgatgctgtccaagaaacggagacaaagatgatagaaatgtcagcacttaaccatcttatgtcaacacatgttctacaacaagctcaacaaatccagtatttgtatgaccaggctgttgaagctacgaataacgtggagcgtgggaacaaggagctatcccaggcgatccagcgcaacagcagcagtagaacctttctcctcctcttcttctttgttctcactttctcggttctttttcttgactggtacaacaactgagttagcatatgaagacattgtatgctgttcatgggaaatggttaaattatgaaagctggtctgtcttgaagtccaaaccttttaggtagtctgttactttctaagagtagtgatcaagctgctgttcatctgaatacgccgggatttgtcatttcatttctgacgtgcaagctacagaagcgatgggattgtagagaggacagacagtggtcagggcatcaggccatttccagtcagttgtcaacagcgtcgtcgtcatccagagtaccttaagcattgaagtcgatattttctttgctcttgcgaaa

SEQ ID NO: 98567 - DNA, 1780 bp, Zea Mays
ccaaccaaacatccgaagaaacccaactaaaaccacagggaaacctcaagctcacaccgttacacatcctcctccgtccaccctgtcctccggtcccccgtcatcaaacccttccaatctcgtcttccccacacccgtacccatcagattctccgggagggggagggtagctgaagggcacccagtgggcgcaatgcgcgtcctcgccgtggtcctcctcgccgcagcgtgcgcggcggcggcggccggaggcggcggggagcttccggagttccgggaggctcctgcgttccgcaacggcgcggcctgcgcgggcgcgccgacgatccacatcgcgatgacgctggacgccacctacctgcggggctccctcgccggcgtcctctccgtgctccgccacgccgcgtgcccggagtccatcgccttccacttcgtggcctcctcggcgtccccggcgcgccgcctcgcctcgctccgccgcgcgctggcggccgccttccccacgctcccggccaccgtgcaccgcttcgacgcgcgcctcgtccggggcaagatctcctcctccgtccggcgcgcgctcgaccagcccctcaactacgctcgcatctacctcgcggacctcctgccgcgctccgtcccccgcgtgctctacctcgactccgacctcctcgtggtcgacgacgtcgcccgcctctgggccaccgacctcggccccgacgccgccctcgctgcccccgagtactgccacgccaacttcacctcctacttcaccgacgcgttctggcgccaccccgagtacgccgccgtcttcgccaaccggacgcgcgccccctgctacttcaacaccggggtaatggtcatcgacctggacaggtggcgctccggcgggtacaccgcgaagctggaatactggatggaggtgcagaagcaggaggccaggatttacgagctgggctccctcccgccgttcctcctggtgttcgccggcgaggtcaaggccgtggggcaccggtggaaccagcacgggctcggcggcgacaacgtggcgggccagtgccgggagctgcaccccggtccggtcagcctgctgcactggagcgggaaggggaagccgtggctgcggctggacgccggccggccgtgcccactcgacgcgctctgggcgccctacgacctccttcgccgccgcggtgcccgggacgatctcctcgatgccgtcgcctgacaatgctgtccccgcattgctggagcgcgatcgattcatatgccacggcccacggcgcttggctgctccgctcactccgccgtcccacgggtcgatgtcggcgtcggtccgccgagtcactgatacattagtcccacctggacactccgcatgggtcccattatgggtccatgctgtcagtcgttatggcgttggttggagtggcgctgtcggtactgaaattcgtcgggcccacacgttggtggcggatgggggttttgtggtgggggccgaggtgaaatgcagacatgggctgtgtacagctgtttttttggcctgttgggaccatagatcctatatattctttattttgttcaaattcttactttcataataggcaaaagtagtgcagacacaggttttatcaccatgggataaaactgggtatatttggagttagtgttgtgtgtgtacaactgtacatgtatagtataagtccatgatcgtcgttggttagagtttagtttgcggaaacaaggagtgttgttcttgggaaatgtcgcttggtgtagtctt

SEQ ID NO: 98568 - DNA, 1601 bp, Zea Mays
atgccccaccaggcaccaggttgctgggtttgggcctcacggtccagcagatgccagccagttgccacgcgtttcatcagcccgacccaaccaaagccagaagacacggtgccgtcagctgtgctcccggcgctcccgcaccacaagcaagcgcgtgcgcgccgtcaagtcgcctctacagcaacttccaccgcgtactccctccctccctcgtctcgtcttcgtctccaggtttcgcgggggccaaggtttctgccggagcagtcgcggtctgcgctgcggcacggcgacgaggtggggatggagtaccgcgacaagctcgtgctggcgcccatggtccgcgtgggcaccttgccatttaggctactggctgctgaatatggtgctgatattacttatggagaagaaattattgatcacaaattcttgaagtgtgagcgtgttacaaatgaatctcttgggactactgattttgtggagaaagggactgacagtgtagttttccgtacatgcccacaagaaaggggcagggttgtattccaaatgggcacatcaaatgctgtgagggcacttaaagctgctcagatcgtgtgccgtgatgtttctgctatagatatcaacatgggttgtccaaagtctttttcacttagtggagggatgggtgctgcattactctccaaacctgagcttatacacgatattctgacaacactgcggaggaacttggacacaactgtgacatgtaaaatccgtcttctgaacacacctaaagacactgtggagttggcacgccggattgagaaaactggtgttcctgctcttgctgtccatggaagaaagattaaagatagaccgagagatcttgccaagtgggatgagatagctgatgttgtgtcagcgctgtcaattccagttatagctaatggagatgtctttgagtatgaggattttaagagaattaaagatgcaacaggtgccgcgtctgttatggttgctagaggtgctatgtggaatgcctccatcttttgtgccaaaggaaaaacaccttgggaggatgtcaaaagagagtatgtaagaaagagcatattgtgggacaacgatgtgaagagcacgaaacataccttgaaagaaatgataatgcactattcttgccttgaacttcctgaggggaaaggcgttataaagtgtgatacatctgaagatttagcgagactatacggggaagaggactactataattttgttgttgcaaataggaaatgaatacaatttgatgttgtgagctctcatgtgtaccaggtatctatttccgaatacattgggtctagagctagtgaaaaaggaaataatattatgtgaaactgatgaagttgatagtttcatgtagtctacatgcggtactttttccttgcaaataacaattacttgcaaaataagcatgtttgttgacatgggtttcaaaactaaaattggttccagttccttggccaggtagccactcttaataggggcttgcatgctggtagtctgtaaactagcgattagagtttgtaaatgtatgatactgatcaagaagtcaagaactggctaaactaaatggt

SEQ ID NO: 98569 - DNA, 1759 bp, Zea Mays
atgccccaccaggcaccaggttgctgggtttgggcctcacggtccagcagatgccagccagttgccacgcgtttcatcagcccgacccaaccaaagccagaagacacggtgccgtcagctgtgctcccggcgctcccgcaccacaagcaagcgcgtgcgcgccgtcaagtcgcctctacagcaacttccaccgcgtactccctccctccctcgtctcgtcttcgtctccaggtttcgcgggggccaaggtttctgccggagcagtcgcggtctgcgctgcggcacggcgacgaggtggggatggagtaccgcgacaagctcgtgctggcgcccatggtccgcgtgggcaccttgccatttaggctactggctgctgaatatggtgctgatattacttatggagaagaaattattgatcacaaattcttgaagtgtgagcgtgttacaaatgaatctcttgggactactgattttgtggagaaagggactgacagtgtagttttccgtacatgcccacaagaaaggggcagggttgtattccaaatgggcacatcaaatgctgtgagggcacttaaagctgctcagatcgtgccgtgatgtttctgctatagatatcaacatgggttgtccaaagtctttttcacttagtggagggatgggtgctgcattactctccaaacctgagcttatacacgatattctgacaacactgcggaggaacttggacacaactgtgacatgtaaaatccgtcttctgaacacacctaaagacactgtggagttggcacgccggattgagaaaactggtgttcctgctcttgctgtccatggaagaaagattaaagatagaccgagagatcttgccaagtgggatgagatagctgatgttgtgtcagcgctgtcaattccagttatagctaatggagatgtctttgagtatgaggattttaagagaattaaagatgcaacaggtgccgcgtctgttatggttgctagaggtgctatgtggaatgcctccatcttttgtgccaaaggaaaaacaccttgggaggatgtcaaaagagagtatgtaagaaagagcatattgtgggacaacgatgtgaagagcacgaaacataccttgaaagaaatgataatgcactattcttgccttgaacttcctgaggggaaaggcgttataaagtgtgatacatctgaagatttagcgagactatacggggaagaggactactataattttgttgttgcaaataggaaatgaatacaatttgatgttgtgagctctcatgtgtaccaggtatctatttccgaatacattgggtctagagctagtgaaaaaggaaataatattatgtgaaactgatgaagttgatagtttcatgtagtctacatgcggtactttttccttgcaaataacaattacttgcaaaataagcatgtttgttgacatgggtttcaaaactaaaattggttccagttccttggccaggtagccactcttaataggggcttgcatgctggtagtctgtaaactagcgattagagtttgtaaatgtatgatactgatcaagaagtcaagaactggctaaactaaatggtattttacctggacccagcaaaaccggtgaaacttgcctggaacttgaagaaagatgttcacttgcatgattaaattgcaaatcagaggtacccatggccacaatgtaatttcgaaaggttttttcatcataataaaaaattgcaataattcagtgatcaa

SEQ ID NO: 98570 - DNA, 1616 bp, Zea Mays
atgccccaccaggcaccaggttgctgggtttgggcctcacggtccagcagatgccagccagttgccacgcgtttcatcagcccgacccaaccaaagccagaagacacggtgccgtcagctgtgctcccggcgctcccgcaccacaagcaagcgcgtgcgcgccgtcaagtcgcctctacagcaacttccaccgcgtactccctccctccctcgtctcgtcttcgtctccaggtttcgcgggggccaaggtttctgccggagcagtcgcggtctgcgctgcggcacggcgacgaggtggggatggagtaccgcgacaagctcgtgctggcgcccatggtccgcgtgggcaccttgccatttaggctactggctgctgaatatggtgctgatattacttatggagaagaaattattgatcacaaattcttgaagtgtgagcgtgttacaaatgaatctcttgggactactgattttgtggagaaagggactgacagtgtagttttccgtacatgcccacaagaaaggggcagggttgtattccaaatgggcacatcaaatgctgtgagggcacttaaagctgctcagatcgtgtgccgtgatgtttctgctatagatatcaacatgggttgtccaaagtctttttcacttagtggagggatgggtgctgcattactctccaaacctgagcttatacacgatattctgacaacactgcggaggaacttggacacaactgtgacatgtaaaatccgtcttctgaacacacctaaagacactgtggagttggcacgccggattgagaaaactggtgttcctgctcttgctgtccatggaagaaagattaaagatagaccgagagatcttgccaagtgggatgagatagctgatgttgtgtcagcgctgtcaattccagttatagctaatggagatgtctttgagtatgaggattttaagagaattaaagatgcaacaggtgccgcgtctgttatggttgctagaggtgctatgtggaatgcctccatcttttgtgccaaaggaaaaacaccttgggaggatgtcaaaagagagtatgtaagaaagagcatattgtgggacaacgatgtgaagagcacgaaacataccttgaaagaaatgataatgcactattcttgccttgaacttcctgaggggaaaggcgttataaagtgtgatacatctgaagatttagcgagactatacggggaagaggactactataattttgttgttgcaaataggaaatgaatacaatttgatgttgtgagctctcatgtgtaccagcttctgcttggattcctatctcaccctttattgatgggattaggaggaattcctgccaccaaggacaacgggatttgccattttggcgctgtctggacttaacactgaagctgctgatctttctcttgtactggtaatagttaggtttatacctgaaattaatcaaacaccatttttttgtaacaaatactaatttatttgctttctatactatggaaattttgtcatgtattgttggtggaaatactattgcgcttttgaaggaattgaaagactttgatatgttgactactattatggccctatggtctaagaaa

SEQ ID NO: 98571 - DNA, 1896 bp, Zea Mays
atgccccaccaggcaccaggttgctgggtttgggcctcacggtccagcagatgccagccagttgccacgcgtttcatcagcccgacccaaccaaagccagaagacacggtgccgtcagctgtgctcccggcgctcccgcaccacaagcaagcgcgtgcgcgccgtcaagtcgcctctacagcaacttccaccgcgtactccctccctccctcgtctcgtcttcgtctccaggtttcgcgggggccaaggtttctgccggagcagtcgcggtctgcgctgcggcacggcgacgaggtggggatggagtaccgcgacaagctcgtgctggcgcccatggtccgcgtgggcaccttgccatttaggctactggctgctgaatatggtgctgatattacttatggagaagaaattattgatcacaaattcttgaagtgtgagcgtgttacaaatgaatctcttgggactactgattttgtggagaaagggactgacagtgtagttttccgtacatgcccacaagaaaggggcagggttgtattccaaatgggcacatcaaatgctgtgagggcacttaaagctgctcagatcgtgccgtgatgtttctgctatagatatcaacatgggttgtccaaagtctttttcacttagtggagggatgggtgctgcattactctccaaacctgagcttatacacgatattctgacaacactgcggaggaacttggacacaactgtgacatgtaaaatccgtcttctgaacacacctaaagacactgtggagttggcacgccggattgagaaaactggtgttcctgctcttgctgtccatggaagaaagattaaagatagaccgagagatcttgccaagtgggatgagatagctgatgttgtgtcagcgctgtcaattccagttatagctaatggagatgtctttgagtatgaggattttaagagaattaaagatgcaacaggtgccgcgtctgttatggttgctagaggtgctatgtggaatgcctccatcttttgtgccaaaggaaaaacaccttgggaggatgtcaaaagagagtatgtaagaaagagcatattgtgggacaacgatgtgaagagcacgaaacataccttgaaagaaatgataatgcactattcttgccttgaacttcctgaggggaaaggcgttataaagtgtgatacatctgaagatttagcgagactatacggggaagaggactactataattttgttgttgcaaataggaaatgaatacaatttgatgttgtgagctctcatgtgtaccagaattcagagtattgttgcagtaaggcttgaatagccagacgaagagtgtggtgcctgcagagacaagctgttgagatgcagaatgaaactagaaatgcctttgttgagaagcttgttcattatccttttcagttgttcagtgtacgcatcctgagatgtacaatcctttaatgagaggagagtatcatcttctaaggagtcaagggtgttgttcaaggcatgttcctgaatagagaatgcagtgcctgttatgattgccccagatcttctgcttggattcctatctcaccctttattgatgggattaggaggaattcctgccaccaaggacaacgggatttgccattttggcgctgtctggacttaacactgaagctgctgatctttctcttgtactggtaatagttaggtttatacctgaaattaatcaaacaccatttttttgtaacaaatactaatttatttgctttctatactatggaaattttgtcatgtattgttggtggaaatactattgcgcttttgaaggaattgaaagactttgatatgttgactactattatggccctatggtctaagaaatattaaatgttttcatg

SEQ ID NO: 98572 - DNA, 2925 bp, Zea Mays
atgggttgcccccgtccgctcctcctcctcctcctccacgcggtcgcgctcgccgccgccgacgagttcacctacaacggcttcggaggcagcgacctgttgctcgacggcatggccgcggtggcgccgaacggcctgctggcgctcagcaacggcaccagccagatggccggccacgcgttccacccggcgccgttccgcctgcgtgacggcgccgccgccgccgccaggtccttctcggcggccttcgtcttcgccatcgtgtccaactacaccgtgctcagcgacaacggcatggcgctggtggtcgcgccgagcaccaggctctccgccttcaacgcggggcagtacctgggcgtcctcaacgtcaccgacaacggcagggacggcaaccgcgtcttcttcgtcgagctggacaccatgctcaacccggagttccaggacatgaacagcaaccacgtcggcgtcaacgtcaacagcatgaggtcgctgcggaaccacagcgccggctactacgacgacgccacgggggcgttcaccaacctcagcctcatcagccgccggcccatgcaggtctgggtcgactacgacggcgccgccgcgcggctggacgtggccatggcgcccgccggcgtgcccaggccgcggaagccgctcatctccacgccgctcaacctctcggcggtcggcgcggacgacggcaccgcctacgtcggcttctcggcggccacgggcgtcatctacacgcgccactacgtcctgggctggagcttcgccacgggcgccgcggccccgccgctggacatctccaggcttcccgcgctgccgcggttcgggcccaagccccggtccaaggtgctggagaccgtgctcccggtcgccaccgcggcgctcgtcctcgcgctggtcgtgggcgccttcctgttcgtgcggcggcgggtgaggtacgccgaggtgcgcgaggactgggaggcggagttcggcccccaccgcttctcgtacaaggagctctaccaggcgaccaaggggttcaagaacaagatgctgctcggcaccggcggcttcgggagggtgtacaagggcgtgctctccgggtccaagctcgaggtcgccgtgaagagggtgtcgcacgactcgaagcaggggatgaaggagttcatcgcggaggtggtgagcatcggccacctccgccaccggaacctggtgcagctgctgggctattgccggcggaagggcgagctgctgctggtgtacgactacatgtccaacggcagcctggacaagtacctctacgacgacaggaccgccaggcccgtcctggactgggggcagaggttccagatcgtcaggggcgtcgccgccggcctgctgtacctgcacgaggactgggagaaggtggtgatccaccgggacgtcaaggccagcaatgtgctcctggacggcgacatgaacggcaggctgggcgacttcggcctggcgcggctgtacgaccacggcgtggacccgcagacgacgcacgtggtgggcaccatgggctacctcgccccggagctggtgcgcacggggagggcgaccccggccacggacgtgttcgccttcggcgtgttcgtgctggaggtggcttgcggccgccgcccgctcgggcgcgtcgcgcccggtgtcgaccagaccgtgctgctggactgggtgcaggagcaccagcgcaggggggccgccctcgacacgctggacgcgcggctgtgcggcaagtacgacgccgacgaggcccggctggccgtcaagctggggctcatgtgcgcgcacccctcgcccgaggcgcggccgggcatgcgccaggtcgtgcagtacctggagggcgacgccccgatgcccgatgtggcgccctcgtacgtcagctacagcatgctggcgctgatgcagaacgacgggttcgactccttcgccaacgtgtcgttcccgtccacggtcacgtcgagcgtcagccctgtctccggcggcttctcttcttccgtgtccggcctctccggcggaaggatcgcgctggtgacgggagggaacaagggcatcgggctcgagacgtgccggcagctggcgtccaggggcgtcagggtcgtcctgacggcgaggaacgaggcgaggggtttggaagcggtcgagcgcgtcaggtgcgcccgcggcgacgccgaggtttacttccaccagctcgacgtcaccgacccctgcagcgccgcccggctcgcggatttcgtcagggatcagttcggtaggctggacatcctgatcaacaatgcaggaatttcaggcgttcaccgtgatccagttttgtctgctgcggtcaaggataaggtcgatggcatggatgtaaatcagagagtcgaatggatgaaagaaaattcgaaagaaacatacgaggaggctgtacaatgtatgaaaacaaactattatggtgccaaacttgtcacagaggcactacttcctcttcttcagttatcctcctctggaagaattgtcaacgtttcgtcaggctttggactactgagaaatttcaacagcgaagaccttaggaaggagtttgaagacatcgacaatcttactgaaagtagactggaggaactgatggataagtttctagaggattttaaggccaacttagtagaggcgcatgggtggccgacaggtggatcttcagcctacaaagtcgtcaaagcggcgctcaatgcgtacacgaggattcttgccaagaagtatcctacgctgcgtatcaattgtttgacgcctggttatgtcaagaccgacatgtctatgcacatgggggtactgacacttgaggaaggcgctcgcaaccccgtgaaggttgctctcttgcctgacgacggaccgactggtgcttattttgatctgaatggcgaggcgtcctttgtgtga

SEQ ID NO: 98573 - DNA, 1837 bp, Zea Mays
gcttgcattgcattggcactttggcaggctgcgagcagtctgacagctacacacacaggcagacgccgttccgcgggggaaaggtgcggacgcctgaatcctctccaactccggcaccgcattcgcacgcccgcgaagccccgaatcggagaggacagaggagtcatggacgcggcggcggcggcggctgcggctgcgagccccacgagcaagaggatcgcgctggtgacgggagggaacaagggcatcgggctcgagacgtgccggcagctggcgtccaggggcgtcagggtcgtcctgacggcgaggaacgaggcgaggggtttggaagcggtcgagcgcgtcaggtgcgcccgcggcgacgccgaggtttacttccaccagctcgacgtcaccgacccctgcagcgccgcccggctcgcggatttcgtcagggatcagttcggtaggctggacatcctggtatggcaaccccttctcgctcgcttatctctctctctgccggcggcttagtgaatttgggtattggaaaagtgataatgttccgctaatatttttgggtggaactgatggagctagcttatcatatgttttggacattctgagccagcaggaaaaccagatgattccttttgagttccgaacatggatgtacccgtaggccgtagggttatttttggcttactaactaaaaatgaaaaagaaaatcttatgatgatgaccactactttacaactctgttcctaatacaactatgcgtgcctgtttcgcttcacaattcgagaaaacaaagcatggaatcaaattgttgcttagtttttacacctaagaacatttcctaagtagcacacttcaatctttggttcgactgattgtttgcaattcaccaccatggcaccgtcatgttttggccattgttgtctgcagatcaacaatgcaggaatttcaggcgttcaccgtgatccagttttgtctgctgcggtcaaggataaggtcgatggcatggatgtaaatcagagagtcgaatggatgaaagaaaattcgaaagaaacatacgaggaggctgtacaatgtatgaaaacaaactattatggtgccaaacttgtcacagaggcactacttcctcttcttcagttatcctcctctggaagaattgtcaacgtttcgtcaggctttggactactgagaaatttcaacagcgaagaccttaggaaggagtttgaagacatcgacaatcttactgaaagtagactggaggaactgatggataagtttctagaggattttaaggccaacttagtagaggcgcatgggtggccgacaggtggatcttcagcctacaaagtcgtcaaagcggcgctcaatgcgtacacgaggattcttgccaagaagtatcctacgctgcgtatcaattgtttgacgcctggttatgtcaagaccgacatgtctatgcacatgggggtactgacacttgaggaaggcgctcgcaaccccgtgaaggttgctctcttgcctgacgacggaccgactggtgcttattttgatctgaatggcgaggcgtcctttgtgtgatggtatttctcccttttcagcttcagaataaaagaaagagctatgaagtagttagtgccaatcagtattgtagttcgacttgaatacttaaactagcacgttgagcaaaccgtagagctcaacaccagggatttcctcgtcttctgtataatatctctggtgatgattgtatatttgcaatgaaccatgcagatttggtcgcgccaaggtagtgtttggttggcacaatggtaatggcaacaggaatgaaaatggactgcgaggg

SEQ ID NO: 98574 - DNA, 1393 bp, Zea Mays
gcttgcattgcattggcactttggcaggctgcgagcagtctgacagctacacacacaggcagacgccgttccgcgggggaaaggtgcggacgcctgaatcctctccaactccggcaccgcattcgcacgcccgcgaagccccgaatcggagaggacagaggagtcatggacgcggcggcggcggcggctgcggctgcgagccccacgagcaagaggatcgcgctggtgacgggagggaacaagggcatcgggctcgagacgtgccggcagctggcgtccaggggcgtcagggtcgtcctgacggcgaggaacgaggcgaggggtttggaagcggtcgagcgcgtcaggtgcgcccgcggcgacgccgaggtttacttccaccagctcgacgtcaccgacccctgcagcgccgcccggctcgcggatttcgtcagggatcagttcggtaggctggacatcctgatcaacaatgcaggaatttcaggcgttcaccgtgatccagttttgtctgctgcggtcaaggataaggtcgatggcatggatgtaaatcagagagtcgaatggatgaaagaaaattcgaaagaaacatacgaggaggctgtacaatgtatgaaaacaaactattatggtgccaaacttgtcacagaggcactacttcctcttcttcagttatcctcctctggaagaattgtcaacgtttcgtcaggctttggactactgagaaatttcaacagcgaagaccttaggaaggagtttgaagacatcgacaatcttactgaaagtagactggaggaactgatggataagtttctagaggattttaaggccaacttagtagaggcgcatgggtggccgacaggtggatcttcagcctacaaagtcgtcaaagcggcgctcaatgcgtacacgaggattcttgccaagaagtatcctacgctgcgtatcaattgtttgacgcctggttatgtcaagaccgacatgtctatgcacatgggggtactgacacttgaggaaggcgctcgcaaccccgtgaaggttgctctcttgcctgacgacggaccgactggtgcttattttgatctgaatggcgaggcgtcctttgtgtgatggtatttctcccttttcagcttcagaataaaagaaagagctatgaagtagttagtgccaatcagtattgtagttcgacttgaatacttaaactagcacgttgagcaaaccgtagagctcaacaccagggatttcctcgtcttctgtataatatctctggtgatgattgtatatttgcaatgaaccatgcagatttggtcgcgccaaggtagtgtttggttggcacaatggtaatggcaacaggaatgaaaatggactgcgaggggaacgatggtggggttcgttt

SEQ ID NO: 98575 - DNA, 79 bp, Zea Mays
cgagtgctctctggcactcggcaaaccattttgccgagtgcccgagaaaaagtacttggcaaagacggctttgccgatg

SEQ ID NO: 98576 - DNA, 444 bp, Zea Mays
tgttatagagcagaaagataaaactgagtaaaaaattcaactaaagataaaaatgaggaaggtgacaaaactaagggtataaatttaaatatcccatgtgcacgccacaccatcgccaactccagctctcctttctgaatgccggtccaagtgtccaacagatgacgtcacacgaacgacgcctcctggccgtcttcaaagaaggcgccggtgaccccgcctcccggcagcagcgccaccttgaccacgttacccgcgccttcctcgggcgtcaggagccccgagcgcaaggttatgtcggtcttgatgtagccaggatgcacgcagttgacgcgcagcgtcggctgctccgccgccaggatcctcgagtacgcgttcatggccgccttgcccaccttgtacgccgcgaacgccgccggccacccgcgcgcgtcggcctcgccg

SEQ ID NO: 98577 - DNA, 544 bp, Zea Mays
cgacacgactgcacgaggacgaaaaaaaaaatatccggacatccggtcacggttgccattcttttcctgtaaccgaaccctgaagggtagcgtcatcatccagaccaccattaccagagtgctctgctctcgctggaggccgtggttcattcacgttcatggaggccgccgccattcccaccagtgccccggaaaccaggtccgtacgtgccataccctcatgctttgcttcgttcttgcagtcgtccgtgcagtctttacgagaacacaagtgtgcgtgcagtccttcaactgacctggctggaactggaacctaccaggttttccttacaggaagtcgtagtttctacctactggtactgtacgtaaaaaatgtaacacagatcgatacaactcctggtgattgaccctggccttagcttgacaggattgccgttgtcaccggcggcaacaaagggatcgggctagaggtgtgccggcagctggccggcgccggcgccaccgtcgtcgtcttaacagccagggacgagacgaggggtgcagc

SEQ ID NO: 98578 - DNA, 970 bp, Zea Mays
cgacacgactgcacgaggacgaaaaaaaaaatatccggacatccggtcacggttgccattcttttcctgtaaccgaaccctgaagggtagcgtcatcatccagaccaccattaccagagtgctctgctctcgctggaggccgtggttcattcacgttcatggaggccgccgccattcccaccagtgccccggaaaccaggattgccgttgtcaccggcggcaacaaagggatcgggctagaggtgtgccggcagctggccggcgccggcgccaccgtcgtcgtcttaacagccagggacgagacgaggggtgcagccgctgcacaagagctcagagaatctgggctctccgatgtcatcttccatcagctggacatcaccgacgctgcgagcgtcagtcggctggctgagttcctcaaggctcgttttggaaagctagatatcctggtaaataatgccgcagttggtgctgttgagtacgtccaagatcctgctgacagttcaacgagcgaggaagagctgagtggcatggatatggtccaaaggcttcagtgcatgcttaagagagtccgggagacctacgacgctgcgacagaaggcatcaagacaaactactatggcataaagcatgtgatcgaagccttgctgcctctgcttcaagcttcctccgatgggaggatcgttaacgtctcctctgacttcggactgctaagggtaacaactaaccagtatatatatataaactctatctttcagcaacaacgacagacattttaattcagttcagaaaagctatgtaattaatttggtggtgtggtgtagctgatcaacaacgaggaagctaaggcaggagctaaacgacgtggagaagctcaccgaggagaggctggacgaggtgctggccgcgtacctgagagacttcgacgccggcgaggtgggggcgcgcgggtggccggtggacttctcggcct

SEQ ID NO: 98579 - DNA, 1345 bp, Zea Mays
cgacacgactgcacgaggacgaaaaaaaaaatatccggacatccggtcacggttgccattcttttcctgtaaccgaaccctgaagggtagcgtcatcatccagaccaccattaccagagtgctctgctctcgctggaggccgtggttcattcacgttcatggaggccgccgccattcccaccagtgccccggaaaccaggattgccgttgtcaccggcggcaacaaagggatcgggctagaggtgtgccggcagctggccggcgccggcgccaccgtcgtcgtcttaacagccagggacgagacgaggggtgcagccgctgcacaagagctcagagaatctgggctctccgatgtcatcttccatcagctggacatcaccgacgctgcgagcgtcagtcggctggctgagttcctcaaggctcgttttggaaagctagatatcctggtaaataatgccgcagttggtgctgttgagtacgtccaagatcctgctgacagttcaacgagcgaggaagagctgagtggcatggatatggtccaaaggcttcagtgcatgcttaagagagtccgggagacctacgacgctgcgacagaaggcatcaagacaaactactatggcataaagcatgtgatcgaagccttgctgcctctgcttcaagcttcctccgatgggaggatcgttaacgtctcctctgacttcggactgctaaggctgatcaacaacgaggaagctaaggcaggagctaaacgacgtggagaagctcaccgaggagaggctggacgaggtgctggccgcgtacctgagagacttcgacgccggcgaggtgggggcgcgcgggtggccggtggacttctcggcctacaaggtggccaaggtggccatgaacgcgtacacgaggatcctagcgaggagccacccggggctgcgcgtcaactgcgcgcaccccggctacgtgagcaccgacatgaccgtccacaccgggcctctcacgcccgagcaaggcgcggccaacgtcgtgaaggtggcgctgctgccggagggcggcccgaccggcgcgtacttcgcgttgggagaggaggcgtcctttatgtgacgaaagcaccgtcgtcgttaagttcgtcgttgttcgccaactccctgttagtcgatttctaaatcgacgtacaatgaaatacatcatcgctgcaaactcacaaatgaaaacaagggaaccttgtagcaaaaaaaaaaagaagtggacagaataatgaataagcatgtcaaatatctcttgagtatctatttgttcaagtatgaatgactttgtacaagtatcaaagattgtgagtggaaccaaattaagc

SEQ ID NO: 98580 - DNA, 1385 bp, Zea Mays
gaaggcgaggaggaaccgcctcgctctcggtgacggcacccgcgctctgtcacggtgctagccagtgaagtccgacgccggcagaggccgatggaggagcccggtgcgtccccttgctccagcgcgcggtgtgcacaggcagctaggctcatggcggccgctacccctagtccccacagcgcaaggtacgtgtcatccgacgctctggcgtgtaatctgtacacgagttgaaactggttggccggcgtgtgtgatctctactctggtagggtcgccgttgtcaccggcgggaacaaagggatcgggctggaggtgtgcaggcagctggccagcaacggcatcaccgtcgtcctaacagccagagacgagaagcggggcgccgccgccgtagaggagctcgcggacgcgggcctctccggcgtcgttttccatcagctggaggtcaccgacgcccagagcattgctagattggccggtttcctgaaggcgtggtttgggaagctagacatcctggtaaacaatgccgctatcggtggggttcagtcacttcccgttgaaaatgttggcgaaaagatcaagggcatggacgcgtttcagatggcggagctgatgcggaagagctgccgggagacaaacgacaccgcgaaggcaggcgtccagacgaactactacggggtgaagaacgtgaccgaggcgctgctgcccctgctcctgcaggcctcctcctccggcggaggaagggtcgtcaacgtctcctccgacttcgggctgctacgctatctcaggaatgaggaggtgaagcatgagctggacgacattgagggcctgacggaggagaggctggacgagctgctgagcacgttcctccgggacttcgaggccggcgcgctgaagtcccgcggctggccgacggagttcgccgcgtacaaggtggccaaggccgccctgaactcctactcgagggtcctggcgaggcggcaccccgagctgcgcgtcaactgcgcgcacccgggctacgtcaagaccgacatgaccaggcagacgggcctgctgacgcccgcgcagggcgcggccaacgtcgtcaaggtggcgctgctcccggaaggcggccccaccggcgctttcttcgcgctaggcaaggaggcgccgttcgtgtgacgctgccgtactgggctggcggtggtggggacttcacggtccggcgctagtgcgccgcctctccgacttgcctggcgcctgctatctactacctctctgctctctgtgctgcgcagcgtagtttgctggtttgggacggcgaataaagaaaggatcgctgctgcctcttagttagttgggttctgtcagtactaagcttcggtaataaaatacccctagatatgacc

SEQ ID NO: 98581 - DNA, 1341 bp, Zea Mays
aataacctgacctgtcgtccccattcttgtgatcctgtcgtccccatccccttgctccagcgcgcggtgtgcacaggcagctaggctcatggcggccgctacccctagtccccacagcgcaaggtacgtgtcatccgacgctctggcgtgtaatctgtacacgagttgaaactggttggccggcgtgtgtgatctctactctggtagggtcgccgttgtcaccggcgggaacaaagggatcgggctggaggtgtgcaggcagctggccagcaacggcatcaccgtcgtcctaacagccagagacgagaagcggggcgccgccgccgtagaggagctcgcggacgcgggcctctccggcgtcgttttccatcagctggaggtcaccgacgcccagagcattgctagattggccggtttcctgaaggcgtggtttgggaagctagacatcctggtaaacaatgccgctatcggtggggttcagtcacttcccgttgaaaatgttggcgaaaagatcaagggcatggacgcgtttcagatggcggagctgatgcggaagagctgccgggagacaaacgacaccgcgaaggcaggcgtccagacgaactactacggggtgaagaacgtgaccgaggcgctgctgcccctgctcctgcaggcctcctcctccggcggaggaagggtcgtcaacgtctcctccgacttcgggctgctacgcgtaaaatgcagtatctcaggaatgaggaggtgaagcatgagctggacgacattgagggcctgacggaggagaggctggacgagctgctgagcacgttcctccgggacttcgaggccggcgcgctgaagtcccgcggctggccgacggagttcgccgcgtacaaggtggccaaggccgccctgaactcctactcgagggtcctggcgaggcggcaccccgagctgcgcgtcaactgcgcgcacccgggctacgtcaagaccgacatgaccaggcagacgggcctgctgacgcccgcgcagggcgcggccaacgtcgtcaaggtggcgctgctcccggaaggcggccccaccggcgctttcttcgcgctaggcaaggaggcgccgttcgtgtgacgctgccgtactgggctggcggtggtggggacttcacggtccggcgctagtgcgccgcctctccgacttgcctggcgcctgctatctactacctctctgctctctgtgctgcgcagcgtagtttgctggtttgggacggcgaataaagaaaggatcgctgctgcctcttagttagttgggttctgtcagtactaagcttcggtaataaaatacccctagatatgaccatatttt

SEQ ID NO: 98582 - DNA, 1379 bp, Zea Mays
aataacctgacctgtcgtccccattcttgtgatcctgtcgtccccatccccttgctccagcgcgcggtgtgcacaggcagctaggctcatggcggccgctacccctagtccccacagcgcaagggtcgccgttgtcaccggcgggaacaaagggatcgggctggaggtgtgcaggcagctggccagcaacggcatcaccgtcgtcctaacagccagagacgagaagcggggcgccgccgccgtagaggagctcgcggacgcgggcctctccggcgtcgttttccatcagctggaggtcaccgacgcccagagcattgctagattggccggtttcctgaaggcgtggtttgggaagctagacatcctggtaaacaatgccgctatcggtggggttcagtcacttcccgttgaaaatgttggcgaaaagatcaagggcatggacgcgtttcagatggcggagctgatgcggaagagctgccgggagacaaacgacaccgcgaaggcaggcgtccagacgaactactacggggtgaagaacgtgaccgaggcgctgctgcccctgctcctgcaggcctcctcctccggcggaggaagggtcgtcaacgtctcctccgacttcgggctgctacgctatctcaggaatgaggaggtgaagcatgagctggacgacattgagggcctgacggaggagaggctggacgagctgctgagcacgttcctccgggacttcgaggccggcgcgctgaagtcccgcggctggccgacggagttcgccgcgtacaaggtggccaaggccgccctgaactcctactcgagggtcctggcgaggcggcaccccgagctgcgcgtcaactgcgcgcacccgggctacgtcaagaccgacatgaccaggcagacgggcctgctgacgcccgcgcagggcgcggccaacgtcgtcaaggtggcgctgctcccggaaggcggccccaccggcgctttcttcgcgctaggcaaggaggcgccgttcgtgtgacgctgccgtactgggctggcggtggtggggacttcacggtccggcgctagtgcgccgcctctccgacttgcctggcgcctgctatctactacctctctgctctctgtgctgcgcagcgtagtttgctggtttgggacggcgaataaagaaaggatcgctgctgcctcttagttagttgggttctgtcagtactaagcttcggtaataaaatacccctagatatgaccatattttatctgattggttacccgcaccgttccatcctaaattaccgtgggcattaactttggattagcgtctgtttgattgactgtacgcgaggaacggtggctacataagtagatataaaataagttattttgaggct

SEQ ID NO: 98583 - DNA, 820 bp, Zea Mays
ccgcgcgcgcccgccgctacctgccagccgcacgcccgccgccagcgccccgccgcaaccccgcgcgccggctcgagtacttcgctgtccgctcccattcaactccggcccagctgcgtgctgctccggcaccggcaggcggataagcccagcaggcaagcaggcaggagactaggagaggaggagagctcagcactgcacgcgcgctcccctccccttgttggccaaatcgatcggtccccttcaggcttaaggcttcggagcttgctttacttcagttggcaggtgtattttcaggggatgttgcttgagcccaaatggatgacagcagaagtgtgatctgacgtgcgctcagcttcaccaacacactgattcttgaatgcattaagcatagtgcacaagcagttattcatgataagaaatcttttgctcaaatacatagaaggtgctctcaaagacatcgaaggtcttcctttaccgtttcgtcatctgcaatgtgcttatagtatgagagttgcctgctaattcctctaaatatagcattagttcagcttgtagcttcatattacatcaggtaatggatggcatcagaactattctctgtaatgatggtataagagctcacttgctaattcttctgaacattccctgggttcagcttgtaactttagttagatcaatggatatcatctaaactattcttttctttttttcttttgaaacagggcatatctacttagtacctgcatttttttgttgcttgttgatgatactaatactgtctgatataactagttgctttttctctctttggtaagaa

SEQ ID NO: 98584 - DNA, 1373 bp, Zea Mays
tttatgagcacggacggctctcgtccccctcacttcacttgtcgttcgttcagttcctgtcgctgccgacgccgccgaggcccgaggggaatcgaccaccatcaccatggggaggactccgtgctgcgacagcaagggcatcaagaaggggccatgggcgccggaggaggacaagctgctcgtcgactacgtccaggccaacggacccggcaactggcgcattctccccaagctcgcgggtacgtactgtactgtacgtgctcttctcctgtcgatatcgagcccggccgcttgcttgtctcgtcatttctcaataccgagctggccgcttgttggtgccgccgccgcgcgcgcttgcagggctgaaccggtgcggcaagagctgccggctgcggtggaccaactacctgcgcccggacatcaagcgcgggcccttcacccccgaggagcacaattccatccttcagctccacgccgtagtcggcaacaagtggtccatgatcgcggcacagatgccgggccggacggacaacgagatcaagaactactggaacacgcacatgaagaagcctcctgccccgccgcccgccacacggcccagtgggagaccgccaggctcgaggccgaggcgcgcctctccctgctctcgtcctcggccgccacgacggtcacctccgccaccgcctcctcctcgtcgtccaccgtcgccgccgagcatgcggcgccacccgacatcttcctgcgcctctggaactccgaggtcggggattctttccgcggcgcagccgcgcagcaggggcacggtccggaggcgagcgcggcgggcgctggcgtgccggcgctgctgcctgagctcggcggtggcggtgacgattcctcggccgcgtcgacctacgaggctgaggccgcggcggacgacggctaccaggcgttcctggacctggcgatggaggagttcgcgctgctgcacggccggctcggcgcgttctcggcgttcccgcaggccgacgtgttcgctgaggcgcactgctgccttttcgctccgtttgaggagtagctttgctcgatctcattgccagtcatcagacatcagagtagtagactagacgtacgtacgtgaccacgtgcatgtaccctgcatgcgtccgtctgcgtacgcgtacgtacatacatacgtacacatgccgcttgtcttggggacgatggcgtatgtacgtgcctgtacgcaacgagcggatgggtggcgcgtgtgacagttcgttattagtctgtgccctagagcaagaggtttttgcgactgctccaaactagccttggcattgctctggtgaacgatgtcaactttcaagtattctgcctctgcgtgtttgtgt

SEQ ID NO: 98585 - DNA, 738 bp, Zea Mays
atggccagggccttggagtcgtcggccggcgctggcggcttctcctgggcggccggcggctcggtcgcggggatgacggccttctcttcggcggcgttctccttcgccggcgccgccttggtgacctccacttccacctccacctttttggcctcctcctcggtcatgttgctgtctgctaggagaagcttagctgttgctgttgaggggtgggagctagctgtacctgtggggcgtgcgtgcgagcgtggtggcggtggcgcgtttaactgttggccgtgtctggactctgggcgaagctggacgcctgaactggagagcagcccgcaaaggaagggaagagagcggaaggggagtcggcaagggatgaaggaacccatgcgcgcgtacgtgacggcgacccgggccggcgcatcatggcattgggcccgccgtggcccgcgggcgcagcgcattggctcccagcgcaatcgccctgtgctgtgtgctcagacgagacgagctggcccgcaccgctgggcgctcggatcccgtgagcgcggagactctctggtggccgtcgcacgacgcgcgtcgcctttcacgccagcaaggcagcaacgttcgtttcgttcaacgtcgtcgtgcccgggggcccgtcccgtgggcactgttgacagaacgacagaccacggggacgtgcagtgtatatgcagtagcacgcggccgggcaggtcgtcggacggctccgcagcttag

SEQ ID NO: 98586 - DNA, 1637 bp, Zea Mays
gatgcgtgtagtcagctcgtcctcgctcgccgaacgctggccatgtgccatctgattgggagacgagacgatggaggtcgcgacggcagcgaaggcgccgtcgtcccggctcgctcggagcctggctgctgcagcgccttgttacaaaggggtgtccgtcttcttcgccgcggtagtcgccggcgctctcgtctccgcctgctggatgtctgtcagcgccagagtaattgcaggtcactccgatcactcctgccgccactccaggcatagcacgcaacgctgcaacggggccggaggcgccagcgccgggtcggccacggtccactggcgtcggcgcgagcacgaaccaaacgccgtccgcgggggcggccagttccgcgccaccgcctcgggaggtgccggactgccccgcctacttccggtggatccacgaggacctgcggccgtggcgcggcacgggggtcacgcgcggcgcggtggagggcgcgcgccggttcgcgcccaggctccgcgtcgccgtggtcgcgggccgcctgtacgtggcgcgctacggccggcggcggtgcttccagacgcgggccgcgttcacgcagtggggcatcctgcagctgctccgccgctaccccggccgcgtcccggacctcgacctcatgttcgactgtgaggacctgcccgtcgtcggcgctggcgaacgccacggggcccagccccagcctcctcctcctccgctgttccggtactgcggcagtgaggccacgctggacatcgcgtttcctgactggtcgttctggggccggagctcaacataaagccatgggaagcgctgcaaagggagataaacgaagcgaacgccgtggtgaactggacggacagggcgccgtacgcgtactggaaggggaaccccaaggtgggcgccgaacgcctgctcctcctccggtgcaacgcgtccggcgagcgtgactggaacgcgcgggtatacgcgcaggactggggagaggaggtgcggcacggattcagggggtcggacctgtccaagcagtgcacgcacaggtacaggatctacatcgaagggcgggggtggtcggtgagcgagaagtacatcctggcgtgcgagtcggtggcgctcatggtgcggccgaggttccacgacttcttctcgcgggggctgtcgccgctgcgccactactggcccgtccgcggcgaccgcggcatgtgccggtccatcaagcacgccgtggactgggggaacgctcacgcggacagggcgcaggagatggcagggaacgcgagcaggttcatccgggaggagctgacgatggaccgcgtctacgactacatgttccacctcctgacagagtacgccaggctgctgcggtacaggcccgcggtgccgcgcggcgccgcggaggtcaccgtcgagtccatgatccgggggaggcgggggctggagaggcagttcatggtggacacgcttgcggccagtgcgagtggcgatggcccctgcaggctgaagccggcttacagtcccgaggaactgcaggcgctgcggagagcgagagcggatgcggtgaggcaagtggaggcgtgggagatctgacgttgacacgcgtagagactagaggaatttggacaaagga

SEQ ID NO: 98587 - DNA, 1852 bp, Zea Mays
gatgcgtgtagtcagctcgtcctcgctcgccgaacgctggccatgtgccatctgattgggagacgagacgatggaggtcgcgacggcagcgaaggcgccgtcgtcccggctcgctcggagcctggctgctgcagcgccttgttacaaaggggtgtccgtcttcttcgccgcggtagtcgccggcgctctcgtctccgcctgctggatgtctgtcagcgccagagtcactccgatcactcctgccgccactccaggcatagcacgcaacgctgcaacggggccggaggcgccagcgccgggtcggccacggtccactggcgtcggcgcgagcacgaaccaaacgccgtccgcgggggcggccagttccgcgccaccgcctcgggaggtgccggactgccccgcctacttccggtggatccacgaggacctgcggccgtggcgcggcacgggggtcacgcgcggcgcggtggagggcgcgcgccggttcgcgcccaggctccgcgtcgccgtggtcgcgggccgcctgtacgtggcgcgctacggccggcggcggtgcttccagacgcgggccgcgttcacgcagtggggcatcctgcagctgctccgccgctaccccggccgcgtcccggacctcgacctcatgttcgactgtgaggacctgcccgtcgtcggcgctggcgaacgccacggggcccagccccagcctcctcctcctccgctgttccggtactgcggcagtgaggccacgctggacatcgcgtttcctgactggtcgttctgggagggctctctccttctttggatatggaaggccggagctcaacataaagccatgggaagcgctgcaaagggagataaacgaagcgaacgccgtggtgaactggacggacagggcgccgtacgcgtactggaaggggaaccccaaggtgggcgccgaacgcctgctcctcctccggtgcaacgcgtccggcgagcgtgactggaacgcgcgggtatacgcgcaggactggggagaggaggtgcggcacggattcagggggtcggacctgtccaagcagtgcacgcacaggtacaggatctacatcgaagggcgggggtggtcggtgagcgagaagtacatcctggcgtgcgagtcggtggcgctcatggtgcggccgaggttccacgacttcttctcgcgggggctgtcgccgctgcgccactactggcccgtccgcggcgaccgcggcatgtgccggtccatcaagcacgccgtggactgggggaacgctcacgcggacagggtacctacctacattccccgatcgacttcatcctcctgtgcactacggattccgaacacgaccgaacgctcttgtcttgtcttgtctggccatggttggcaggcgcaggagatggcagggaacgcgagcaggttcatccgggaggagctgacgatggaccgcgtctacgactacatgttccacctcctgacagagtacgccaggctgctgcggtacaggcccgcggtgccgcgcggcgccgcggaggtcaccgtcgagtccatgatccgggggaggcgggggctggagaggcagttcatggtggacacgcttgcggccagtgcgagtggcgatggcccctgcaggctgaagccggcttacagtcccgaggaactgcaggcgctgcggagagcgagagcggatgcggtgaggcaagtggaggcgtgggagatctgacgttgacacgcgtagagactagaggaatttggacaaaggaatatacggcgaatttgtatccgaattatttatttttgacacttttgtgtccttggctatggttgttaaatcaaaaggcctgaacttgactgttg

SEQ ID NO: 98588 - DNA, 1733 bp, Zea Mays
gatgcgtgtagtcagctcgtcctcgctcgccgaacgctggccatgtgccatctgattgggagacgagacgatggaggtcgcgacggcagcgaaggcgccgtcgtcccggctcgctcggagcctggctgctgcagcgccttgttacaaaggggtgtccgtcttcttcgccgcggtagtcgccggcgctctcgtctccgcctgctggatgtctgtcagcgccagattgcaggtcactccgatcactcctgccgccactccaggcatagcacgcaacgctgcaacggggccggaggcgccagcgccgggtcggccacggtccactggcgtcggcgcgagcacgaaccaaacgccgtccgcgggggcggccagttccgcgccaccgcctcgggaggtgccggactgccccgcctacttccggtggatccacgaggacctgcggccgtggcgcggcacgggggtcacgcgcggcgcggtggagggcgcgcgccggttcgcgcccaggctccgcgtcgccgtggtcgcgggccgcctgtacgtggcgcgctacggccggcggcggtgcttccagacgcgggccgcgttcacgcagtggggcatcctgcagctgctccgccgctaccccggccgcgtcccggacctcgacctcatgttcgactgtgaggacctgcccgtcgtcggcgctggcgaacgccacggggcccagccccagcctcctcctcctccgctgttccggtactgcggcagtgaggccacgctggacatcgcgtttcctgactggtcgttctggggttggccggagctcaacataaagccatgggaagcgctgcaaagggagataaacgaagcgaacgccgtggtgaactggacggacagggcgccgtacgcgtactggaaggggaaccccaaggtgggcgccgaacgcctgctcctcctccggtgcaacgcgtccggcgagcgtgactggaacgcgcgggtatacgcgcaggactggggagaggaggtgcggcacggattcagggggtcggacctgtccaagcagtgcacgcacaggtacaggatctacatcgaagggcgggggtggtcggtgagcgagaagtacatcctggcgtgcgagtcggtggcgctcatggtgcggccgaggttccacgacttcttctcgcgggggctgtcgccgctgcgccactactggcccgtccgcggcgaccgcggcatgtgccggtccatcaagcacgccgtggactgggggaacgctcacgcggacagggcgcaggagatggcagggaacgcgagcaggttcatccgggaggagctgacgatggaccgcgtctacgactacatgttccacctcctgacagagtacgccaggctgctgcggtacaggcccgcggtgccgcgcggcgccgcggaggtcaccgtcgagtccatgatccgggggaggcgggggctggagaggcagttcatggtggacacgcttgcggccagtgcgagtggcgatggcccctgcaggctgaagccggcttacagtcccgaggaactgcaggcgctgcggagagcgagagcggatgcggtgaggcaagtggaggcgtgggagatctgacgttgacacgcgtagagactagaggaatttggacaaaggaatatacggcgaatttgtatccgaattatttatttttgacacttttgtgtccttggctatggttgttaaatcaaaaggcctgaacttgactgttgac

SEQ ID NO: 98589 - DNA, 211 bp, Zea Mays
aaacgattataattatcacttgtacctaatatgctttataacaggtttacacaaactatcaaataaaatatactcatcatattaatgatactatatatattatgagcaactatgaaactaataatcgaaatgataatataataagtttacacaaactatcaaactatgaaactatgagcaactatgaaactaacaaccaaatatacaaaac

SEQ ID NO: 98590 - DNA, 1108 bp, Zea Mays
gagtgaacctttttccttttctttttgattttacaaggcacgaataggaagagaagcgtgggaggaggatttttttgccgcagcgtccccatggcggcgggaagagaaaccgacgaacagctgaccgagtacgagaagcagcggctgtcgcggatacgcgagaacgaggcccgactcgaggccctgggcctccgcagcctcgcagcgtcccctcttctccgcaactcgtcgccggggacggccaaggggaagcagaagaagaggtccgtcgacgaggacgaggagtacgtcccgtccgatagcggcggtgaggagaaggacgagagctcgtcggagagcgcgcaagacgaagaggtggatggagaggggaaatcagcttctatgtcacgcgccaagggaaagaaaaggaaattgtcaaaatctggtaaatctacaaagaacacgcctactaagggtagtgcttcttttgctgaggtggtggatgatgatacatccttacagcaggctattgctctctccctggcggaatattcagaaaagcctgtgacttcattgggtgcagaaacatcaagcacagtaacaagagcgagtgaaagtactccccagaagaacagcaaagcatccattcaggactcagctaagaacaagaagattaaaaagctgggtaagagcaggattcagctgtcagaagatgatgtggttcaattcttcttctcatttgacgaagttggtaaaggatatattacaccatgggatcttgaaagaatggctacaataaatgatttcatctggacagattctgagatatctaagatgatccgttgctttgatagtgacggtgatgggaagataaacctcgaggatttccgcagcattatatctcaatgcaacatgttgcaggagcatgagaagtgaggatgacgagtgttgctggtctgcagatgcttgtactctagttttgcatggcctaacctgtgacattgcatcaacattgttggaatagtagcggacataaagccattgcacataacctttgtagttgcagcttgtcaagtccagttgaccggggattttatgattctactaacttgtttgagagaaggggatt

SEQ ID NO: 98591 - DNA, 1933 bp, Zea Mays
cgattgtgtggcttccaatcagagcgttctcccgctacctccgagcctctcggccctcaggctctgaccttaaatgggatctgccgcactcctgctctctatctctctctctgcaacgactgggttaccgacgcagccgccctcagccaggtgcgcgcgtcttctttgggcccttcgctggtgacgagcgcccactaggttggctgtgtgctgatgctatttgtgtttaagtacttccacctggtgttaatcttttgggagtggaatctctgagacctctgaggtgtgcctttctggcatcaagtttaactgcaacgatcagagggtttctggtgcctgctcattctgaatggcagaccttacggacatcggttgctgcagttgctttagctttttaaggaagcccagtgtacctgtacgtcaacatcaggatgctgatggcatgttatctgaagatttactgaagcgtcaatcagctgaagatcctgatggaagtttctacactggggatgatcctgatgtaagcttttataacggggatgatcttgatagaagcttctacaatggagatgatcctgatagaagcttttacgatagagatgatactgattatattgagggaagcgatgatggaccaccaaggaagagttctgaagatattgtacagttaagaactcaaaatggctttgcatgtagagaaatctcagttaaagagactaaaaaagtatttcgctcagaggatgaaaatggtaataagatggtcaatcaatatgtccacttgggaaagattggttctggaagctacggaaaagtggttctgtacagaaacattaaagatgggaagttgtatgccatcaaggttctgaataagccttacatgatgaaagtacgtgttgtacgcacagaaactgccatgacagatgttcttcgggaggtgtccataatgaaaatgctgaatcaccctaacattgtcaatcttgttgaagtgattgatgacccaaacatagataaattctacatggttcttgactatgttgaaggaaaaatggtttgcgataatggtttagaagaaggtactgcaagaaattatttgcgagacataatatctggtcttatgtatcttcactctcataatgttattcatggtgatatcaaaccagacaatctcttggttaccagtgccggcaatgtgaagattggggatttcagtgttagccaggtttttgaggatgatgatgatatgctttggagatctcctggcactcctgttttcactgccccggagtgctgtcaaggttcagcctaccatggtcgggcctctgatacatgggcagttggtgtaactttatattgtatggtttctgggcattatccatttcttggggatacattgcaggaaacttatgataagattgccaatgatcctgtgcaaatacctggagacatgaacccccaacttgctgatttgctcctaaggcttctctgcaaagatccaggggatcgcatcacgctgcaggctgcggctgagcatccttgggttgctggtgatgaggggccagtccctgaattcatctgtagatgtgggtttggccgcaggaagaggaatgatgtccgcgaagaagtacaataacaaagcatcctcggatagtccacaggtctagtgtagataattgataaaggttggcaaaacgtagccctgacgatgagtttgttttttgtttgtttgtttgtttgtttgtttgttgtttcgtgttcctaatttccaacgagtgttgggcgctcgactgaacatgtttcttttagtaagagaatctcgagtgtaaccctaatgacagtaaaacccaccgtctgcccccaattttttgttgccctgtataggacatacatacggtcagaaaccaccaaggtgccgtaaacctgcactgccattcag

SEQ ID NO: 98592 - DNA, 1967 bp, Zea Mays
cgattgtgtggcttccaatcagagcgttctcccgctacctccgagcctctcggccctcaggctctgaccttaaatgggatctgccgcactcctgctctctatctctctctctgcaacgactgggttaccgacgcagccgccctcagccaggtgcgcgcgtcttctttgggcccttcgctggtgacgagcgcccactaggatcgaggcgtggtgatggtcgttgggtacttccatttggtgctaatctgtgtgggaggtggaattcatggacgttgttaccgggcccaagtttaatcctagcaatttcaggttggctgtgtgctgatgctatttgtgtttaagtacttccacctggtgttaatcttttgggagtggaatctctgagacctctgaggtgtgcctttctggcatcaagtttaactgcaacgatcagagggtttctggtgcctgctcattctgaatggcagaccttacggacatcggttgctgcagttgctttagctttttaaggaagcccagtgtacctgtacgtcaacatcaggatgctgatggcatgttatctgaagatttactgaagcgtcaatcagctgaagatcctgatggaagtttctacactggggatgatcctgatagatgatactgattatattgagggaagcgatgatggaccaccaaggaagagttctgaagatattgtacagttaagaactcaaaatggctttgcatgtagagaaatctcagttaaagagactaaaaaagtatttcgctcagaggatgaaaatggtaataagatggtcaatcaatatgtccacttgggaaagattggttctggaagctacggaaaagtggttctgtacagaaacattaaagatgggaagttgtatgccatcaaggttctgaataagccttacatgatgaaagtacgtgttgtacgcacagaaactgccatgacagatgttcttcgggaggtgtccataatgaaaatgctgaatcaccctaacattgtcaatcttgttgaagtgattgatgacccaaacatagataaattctacatggttcttgactatgttgaaggaaaaatggtttgcgataatggtttagaagaaggtactgcaagaaattatttgcgagacataatatctggtcttatgtatcttcactctcataatgttattcatggtgatatcaaaccagacaatctcttggttaccagtgccggcaatgtgaagattggggatttcagtgttagccaggtttttgaggatgatgatgatatgctttggagatctcctggcactcctgttttcactgccccggagtgctgtcaaggttcagcctaccatggtcgggcctctgatacatgggcagttggtgtaactttatattgtatggtttctgggcattatccatttcttggggatacattgcaggaaacttatgataagattgccaatgatcctgtgcaaatacctggagacatgaacccccaacttgctgatttgctcctaaggcttctctgcaaagatccaggggatcgcatcacgctgcaggctgcggctgagcatccttgggttgctggtgatgaggggccagtccctgaattcatctgtagatgtgggtttggccgcaggaagaggaatgatgtccgcgaagaagtacaataacaaagcatcctcggatagtccacaggtctagtgtagataattgataaaggttggcaaaacgtagccctgacgatgagtttgttttttgtttgtttgtttgtttgtttgtttgttgtttcgtgttcctaatttccaacgagtgttgggcgctcgactgaacatgtttcttttagtaagagaatctcgagtgtaaccctaatgacagtaaaacccaccgtctgcccccaattttttgttgccctgtataggacatacatacggtcagaaaccaccaaggtgccgtaaacctgcactgccattcag

SEQ ID NO: 98593 - DNA, 2044 bp, Zea Mays
cgattgtgtggcttccaatcagagcgttctcccgctacctccgagcctctcggccctcaggctctgaccttaaatgggatctgccgcactcctgctctctatctctctctctgcaacgactgggttaccgacgcagccgccctcagccaggtgcgcgcgtcttctttgggcccttcgctggtgacgagcgcccactaggatcgaggcgtggtgatggtcgttgggtacttccatttggtgctaatctgtgtgggaggtggaattcatggacgttgttaccgggcccaagtttaatcctagcaatttcaggttggctgtgtgctgatgctatttgtgtttaagtacttccacctggtgttaatcttttgggagtggaatctctgagacctctgaggtgtgcctttctggcatcaagtttaactgcaacgatcagagggtttctggtgcctgctcattctgaatggcagaccttacggacatcggttgctgcagttgctttagctttttaaggaagcccagtgtacctgtacgtcaacatcaggatgctgatggcatgttatctgaagatttactgaagcgtcaatcagctgaagatcctgatggaagtttctacactggggatgatcctgatgtaagcttttataacggggatgatcttgatagaagcttctacaatggagatgatcctgatagaagcttttacgatagagatgatactgattatattgagggaagcgatgatggaccaccaaggaagagttctgaagatattgtacagttaagaactcaaaatggctttgcatgtagagaaatctcagttaaagagactaaaaaagtatttcgctcagaggatgaaaatggtaataagatggtcaatcaatatgtccacttgggaaagattggttctggaagctacggaaaagtggttctgtacagaaacattaaagatgggaagttgtatgccatcaaggttctgaataagccttacatgatgaaagtacgtgttgtacgcacagaaactgccatgacagatgttcttcgggaggtgtccataatgaaaatgctgaatcaccctaacattgtcaatcttgttgaagtgattgatgacccaaacatagataaattctacatggttcttgactatgttgaaggaaaaatggtttgcgataatggtttagaagaaggtactgcaagaaattatttgcgagacataatatctggtcttatgtatcttcactctcataatgttattcatggtgatatcaaaccagacaatctcttggttaccagtgccggcaatgtgaagattggggatttcagtgttagccaggtttttgaggatgatgatgatatgctttggagatctcctggcactcctgttttcactgccccggagtgctgtcaaggttcagcctaccatggtcgggcctctgatacatgggcagttggtgtaactttatattgtatggtttctgggcattatccatttcttggggatacattgcaggaaacttatgataagattgccaatgatcctgtgcaaatacctggagacatgaacccccaacttgctgatttgctcctaaggcttctctgcaaagatccaggggatcgcatcacgctgcaggctgcggctgagcatccttgggttgctggtgatgaggggccagtccctgaattcatctgtagatgtgggtttggccgcaggaagaggaatgatgtccgcgaagaagtacaataacaaagcatcctcggatagtccacaggtctagtgtagataattgataaaggttggcaaaacgtagccctgacgatgagtttgttttttgtttgtttgtttgtttgtttgtttgttgtttcgtgttcctaatttccaacgagtgttgggcgctcgactgaacatgtttcttttagtaagagaatctcgagtgtaaccctaatgacagtaaaacccaccgtctgcccccaattttttgttgccctgtataggacatacatacggtcagaaaccaccaaggtgccgtaaacctgcactgccattcag

SEQ ID NO: 98594 - DNA, 1722 bp, Zea Mays
aggatcgaggcgtggtgatggtcgttgggtacttccatttggtgctaatctgtgtgggaggtggaattcatggacgttgttaccgggcccaagtttaatcctagcaatttcagggtttctggtgcctgctcattctgaatggcagaccttacggacatcggttgctgcagttgctttagctttttaaggaagcccagtgtacctgtacgtcaacatcaggatgctgatggcatgttatctgaagatttactgaagcgtcaatcagctgaagatcctgatggaagtttctacactggggatgatcctgatgtaagcttttataacggggatgatcttgatagaagcttctacaatggagatgatcctgatagaagcttttacgatagagatgatactgattatattgagggaagcgatgatggaccaccaaggaagagttctgaagatattgtacagttaagaactcaaaatggctttgcatgtagagaaatctcagttaaagagactaaaaaagtatttcgctcagaggatgaaaatggtaataagatggtcaatcaatatgtccacttgggaaagattggttctggaagctacggaaaagtggttctgtacagaaacattaaagatgggaagttgtatgccatcaaggttctgaataagccttacatgatgaaagtacgtgttgtacgcacagaaactgccatgacagatgttcttcgggaggtgtccataatgaaaatgctgaatcaccctaacattgtcaatcttgttgaagtgattgatgacccaaacatagataaattctacatggttcttgactatgttgaaggaaaaatggtttgcgataatggtttagaagaaggtactgcaagaaattatttgcgagacataatatctggtcttatgtatcttcactctcataatgttattcatggtgatatcaaaccagacaatctcttggttaccagtgccggcaatgtgaagattggggatttcagtgttagccaggtttttgaggatgatgatgatatgctttggagatctcctggcactcctgttttcactgccccggagtgctgtcaaggttcagcctaccatggtcgggcctctgatacatgggcagttggtgtaactttatattgtatggtttctgggcattatccatttcttggggatacattgcaggaaacttatgataagattgccaatgatcctgtgcaaatacctggagacatgaacccccaacttgctgatttgctcctaaggcttctctgcaaagatccaggggatcgcatcacgctgcaggctgcggctgagcatccttgggttgctggtgatgaggggccagtccctgaattcatctgtagatgtgggtttggccgcaggaagaggaatgatgtccgcgaagaagtacaataacaaagcatcctcggatagtccacaggtctagtgtagataattgataaaggttggcaaaacgtagccctgacgatgagtttgttttttgtttgtttgtttgtttgtttgtttgttgtttcgtgttcctaatttccaacgagtgttgggcgctcgactgaacatgtttcttttagtaagagaatctcgagtgtaaccctaatgacagtaaaacccaccgtctgcccccaattttttgttgccctgtataggacatacatacggtcagaaaccaccaaggtgccgtaaacctgcactgccattcag

SEQ ID NO: 98595 - DNA, 1164 bp, Zea Mays
gtgtataaaacagcccgggtcccccctacggttaactccttcctctcagtctctcaggccccacgacgtctcctctcctctcctgcgtgcttccgttgcaaatccgcactccccaccacactaccgagtactgacctgacgctcgccctgctgcgtctgcccagggaccaaggactcaacgaaaggagagacctttccgcggtctcttgcgatcctcctcctcgccatcgccatgctaaggaggtcccgccacggcggggtccgtctcggccggaagctgctcggcctgtggcgtcgggcgctgtgcggcgggcgccggcgccggcgccggggaggctaccgccgcctgaagcagcagcagcagcagccctgcgccggcacgcccgagcgcgccgcgaggaagctcgcgccggcgctgctgcggtggggccggtcgctggcgcggcgtctgcgcctcgggtggagggccggcggcgggcgccggatgctggccggcgccgaggctgaggtggccacgacgcccaaggggcaggttgccgtgtacgtcggcggcggcggcggggaggcggcgcagtctctgcggtacgtggtgccggtggtgtacctgaaccacccgacgttcggcgagctgctcagggaggccgaggaggagttcggcttccagcaccccggcgtcatcaccatcccctgccccgccgcgcggttcgagcaggccgccgccctggcagccgcggggaagaagggcttcgccaggtggtagtggtataggcaggcactagtcgtcgttatagccttataggagggagagggatggagggaggcccaggccctccctgggcgccgccgccggcggaggcgggtggtgtacatatatatgtgtttccatcgtaacgcggatgcctagccttttagctgattttgttccttcgattcttggtcctgtttaactgatgcatccaccatgatccttcctcccgaccggttatttggtcgctgatgtctgttcttacgcgagttcgtcttcaaaccactggaatctcaccggcatgcattgcatgcgatgcgcttcctcgccggatcgtccaactgtcgctgactggtgagctctggaatacaggagtatgtagtgtattacgagggcaaatgctctgtgtttctgtgtgc

SEQ ID NO: 98596 - DNA, 489 bp, Zea Mays
atgccccgtgacggggttcaagttcaagacgctacaaagctacatacacggatacaacttgacgcgcttcctatcaacctgctctgcggacgctgtactgtatggatatatctacggggaaacgaaaaactaagcagcagcttcctctgcttttgctgtggagagctggttctggatgtgctgcgggacgacgtcaaacttggccagctgcatcgtgtaggacgctcgccccttggtcatcccccggagggtgctgacgtactggaacatctcagcgagtggcacaaaagcatcgaccaccttgagcccaccaggcttatccccgaagctgttaacctgtcctcttctagagttcagatcaccgataacatcgcccaggtgctcttcaggagttatcacttcaactctcattataggctcgagaagccttggaccggctttcctcatcccctcacggaaggctcctctggctgcgatttggaacgctaa

SEQ ID NO: 98597 - DNA, 881 bp, Zea Mays
tttgttttattgtcttaaacccgattcgatttctcgttgacgatttccaaattgtaaacatcaataaatcttgaaaatgctaccaaattttctcgcagactggtcacaaaatgttcaggaatttctattttccgagaggacagcaaaaaaatcaggcactacacaaaacgaaaacaacggaataactgttgttgtttttttgtcagctgcgtctttcgagctcagtcagtctagagaagaacggccataccgccaactactgtgcgacctccgggtggactgctgcggcgcgaagctcagaccaaacatctccctcagcgccttcccaggctccaggagcccgatcagtctggccacgagggacgcgctctccctcacatgctccaggtccctggtctccgtccaaaggcgccgagcgacctgcagccgcctcctcttggaggacagcgagactccccacttggtgtacaggctctcccgttcctggatcgtcagccgcttctgcatctgcctgcagagcatctccctctcgcgttgcagtttctttgcactgcacagcagagaagtgctcaagctgcctgccaccatatcataccccatgcttccgttggagtatgtgttcttgagaaatgataacctcctaagctccacttccatgtaaatggcgtcggctgggtcccctttgaacagcaggaaaaagtaagtcctgtggaccaaggaaacgttgcatccatgccacaggtcaatgatctcctgctgtttcttctcgaattccaaaggccagcgagaaggtgattgcaagatatccataatgggatccagccccacgctccttatggtcccttcagccaattctccattatgaccctgacaatgacaac

SEQ ID NO: 98598 - DNA, 763 bp, Zea Mays
agcagaaaaaggccacggccaccgcaccatggcgactacggcgtttctatccccgcccaagctgtcgctgcccgggcgacggttcgcgagcgccagaacggcgggacgcgtgagggtccctccggcgcgagcccaagagcagcagcagcaggtggtggtggtggtggaggaggaggaggccgaggtggcgagcgtgccgccgccgccgcagagcgcggaggagcaggcgcaggcgaggaagggggacgcggcagccgctggcggagagcaagaacatgagccgcgagtacggcgggcagtggctgagcagcacgacgcggcacgtgcgcatctacgcggcgtacatcgacccggagacgaacgcgttcgaccagacgcagatggacaagctgacgctcatgctggacccgcagcgcaggacgagttcccgtgaaccgacgaggcctgccagctcgtcttcaacgacttccaggacctcgtcgaccactacgagggggccgagctgtcggagtacacgcttcggttgatcgggtcggaccttgagcactacatccgcaagctgctgtacgacagggtgatcaagtacaacatgaggtccagagtcctcattttcagcatgggcaagccacggatcaagttcaacagcagccaggtcccagatgcgacgaaatagaacgcgctacttgccttaagcgaatggtttctctccattcagttactgagcaagacgatgtacactcttcaagttgcagagcgttccaga

SEQ ID NO: 98599 - DNA, 1422 bp, Zea Mays
cggcgcgcgacgaagggtgtgaatatcggagaaggcggagggggcgagggtgaaacggcacggcgcgtcacttgtttcaggcagcagcccacggagtccggcagccatccaatgctccaccaaacaacgctcatccctccctccgtctccgccgcctcctcctcgcctttcctccacgccgccaccacagccccggctccgggtggaggttcctgcaccccagccttcctgcgaggcgcctctgccatgccgtcgtacgcgcaccaccgtagcagccctctggacgatggcaggatggacgcgctgaagtgtaacaacagcgtcctgccggaggagaccaccgcggacgccgccggggcgttcgtggagaaagacgggttctcggtcgaggacctgcttgacctggaggagttcgccgagcctgacaaggacgtcgccgaacgcgaggatgacgacgcgccaccggcagccgccgcggccgcggagaggtcgaaagcggactcgcagccgtcgtcggtcgtgaagtacgacctccctccgctgctgccgccgccgccggagatggttgacctgccgtcgcacgacgtcgaggagctggagtgggtctcccgtatcatggacgactcgctctccgagctgcagccccaggcgcagccgaagccggccgctgctgtggtcgcgtcgtcggcagcgcggccccctctggcgcagcagcggcgtccgttcgcgcacgacggtacataccgggcggtggcggcggcgccgccgcaggccggcccgcagcggacgccgaccatatgcgcgctgtcaacggaggcgatgataccggtgaaggcgaagcccagcgaccggcgctgcagccactgtggcgtgcagaagaccccgcagtggcgtgcgggccccgagggcgccaagacgctgtgcaacgcgtgcggcgtccgctacaagtcgggccggctcctccccgagtaccgcccggcgtgcagccccacgttcgtgagcagcatccactccaactcccaccgcaaggtcctcgagatgcgccgcaagaaggagggcggcatggttgccaccgccgcgccggccgtggcgtcgttctaagcttgtgcccaccctgtcagcgaaggagccgcaaggagggcggcatggaggctggccacgcagcggtggctgtacattttttttccccggacgtaatagccttgtaccgtacctgaactaccctccctttctcttgctagtatcgtcgtcgtaatcccccggctgggttattaattagagtttaggagtctcgattaggtcaggtcaggtcaggtttagctttggttccggttagggttctactgcggcggcagaagcggcccagcaactagcgcagaactttaattcctagcaagcatttataaagtcagtttttatttc

SEQ ID NO: 98600 - DNA, 1780 bp, Zea Mays
cggcgcgcgacgaagggtgtgaatatcggagaaggcggagggggcgagggtgaaacggcacggcgcgtcacttgtttcaggcagcagcccacggagtccggcagccatccaatgctccaccaaacaacgctcatccctccctccgtctccgccgcctcctcctcgcctttcctccacgccgccaccacagccccggctccgggtggaggttcctgcaccccagccttcctgcgaggcgcctctgccatgccgtcgtacgcgcaccaccgtagcagccctctggacgatggcaggatggacgcgctgaagtgtaacaacagcgtcctgccggaggagaccaccgcggacgccgccggggcgttcgtggagaaagacgggttctcggtcgaggacctgcttgacctggaggagttcgccgagcctgacaaggacgtcgccgaacgcgaggatgacgacgcgccaccggcagccgccgcggccgcggagaggtcgaaagcggactcgcagccgtcgtcggtcgtgaagtacgacctccctccgctgctgccgccgccgccggagatggttgacctgccgtcgcacgacgtcgaggagctggagtgggtctcccgtatcatggacgactcgctctccgagctgcagccccaggcgcagccgaagccggccgctgctgtggtcgcgtcgtcggcagcgcggccccctctggcgcagcagcggcgtccgttcgcgcacgacggtacataccgggcggtggcggcggcgccgccgcaggccggcccgcagcggacgccgaccatatgcgcgctgtcaacggaggcgatgataccggtgaaggcgaagcgcagcaagcggtcgcggggcccggggtggtcgaggccgggcgcctcgttcctgcccgactcggcctcgtcctcgtcgaccacaaccacttcctcgtgctcctcgtcaggttccatctcgccgttcctccgtctagactcgtccccgttcggcggcgggctggagctcggcgagggccttttcagctacggccacctcctgccgcggccgccgtcgaagaagtccaagcacggtggcaagggcagcaagcacaggcccaagaagcgcgggcggaagccgaagcacctcccccctccccacccgtccgcggccgcgtcgcagcccgggcccagcgaccggcgctgcagccactgtggcgtgcagaagaccccgcagtggcgtgcgggccccgagggcgccaagacgctgtgcaacgcgtgcggcgtccgctacaagtcgggccggctcctccccgagtaccgcccggcgtgcagccccacgttcgtgagcagcatccactccaactcccaccgcaaggtcctcgagatgcgccgcaagaaggagggcggcatggttgccaccgccgcgccggccgtggcgtcgttctaagcttgtgcccaccctgtcagcgaaggagccgcaaggagggcggcatggaggctggccacgcagcggtggctgtacattttttttccccggacgtaatagccttgtaccgtacctgaactaccctccctttctcttgctagtatcgtcgtcgtaatcccccggctgggttattaattagagtttaggagtctcgattaggtcaggtcaggtcaggtttagctttggttccggttagggttctactgcggcggcagaagcggcccagcaactagcgcagaactttaattcctagcaagcatttataaagtcagtttttatttcatcttcctttctccgagctaggtgtaggagt

SEQ ID NO: 98601 - DNA, 1052 bp, Zea Mays
agttccttcggttgctaacatctctagccgagacatttgacttggacaatctgctcatctaccactccggcactcccacgccgggccgcgcggatcgcatcgagtttgagtggagtaggcggcgggcagcgaatcagcgatgaaggtgcagtgcgacgtgtgcgcggccgaggcggcctccgtcttctgctgtgccgacgaggccgcgctgtgcgacgcgtgcgacgaccgcgtccaccgcgccaacaagctcgcggggaagcaccgccgcttctccctcctccacccctgttcgtcctctgcgcagaagccgccgctctgcgacatctgccaggagcggagaggcttcttgttctgcaaggaggacagggcgatcctgtgccgggagtgcgacgcgccggtgcacagcgcgaacgacatgacgaggcggcacagccggttcctgctcaccggcgtgcgcctctcgtcggcgccggtggactctgctgacccatcagaaggggaggaggaggaggagcaggagaacagcagcaggcccggcaacggtgagtcctgcagcggcggcgccggcgcgaccacggcgaccgctagcgacgggagcagcatctccgagtacctgaccaagaccctgcccgggtggcacgtcgaggatttcctcgttgacgacgcgtacgccagcgacgtcggcgcctgctcatcagacgggctttatcagggacaacaagatggacagatcagcggggtgctgcaagaagcttacatgccgtggacggggcgggagctggtgcccgctgacgtcgcagacgagcgggccaactgggagcggtgggtgccgcagatgcacgcggagttcgccggcgacagcaagcggcccagagcgtcgccttcgcctccctgttcgtactggtgaaaagctcgccgttacccgttattagtagagttgatttactgggtaccgtaggaacgaagagaaatatgagccaaaaaaaatcatggaacggaccggtgtttctctgttggattattattgggtccatttcgatcgagctgct

SEQ ID NO: 98602 - DNA, 956 bp, Zea Mays
agcgccatcaaggagatatttacaatctgcgccgttcatctatcttaggacaacatcttgcggcccaatctcgatccatcggcggaggtcttctcctggagcacgcgcaccacgtcggcgatggacggtcggagcccggggctatcactcacgcactgcatggcgagctccgccacggctgccgcctcagagacgtcgcagtctcctcgcagcctcgggtccaggacgtccggcaattgaccgtcgctgagcttgggcctcaccgcggccgtgagccggtgccctgtctcgcggcagacggcctccttgcccgtcaagagctcgagcagcagcacgccgaagctgtacacgtcgctcttcttggtgggcactccggagcggaggaggtgagggtcgacgtagcccggggatcccatgacggcgcgatccgagggccggccgcccatcgtggccgcgacgccgacgtgggcgaagccgaagtcgcagagcctggcgtccatgctggcgtcgaggaggacgttggaggccttgacgtccccgtggatgacggccgggtcgcggccctcgtggaggtactccagcgccgtggccacctggaacgcgaccgccacgcgacgcgcccaggggaggacctggacgccggccgcgcccccgtggagcctctcgtggaggtcgccgttgggcgcgtactcgaacaccagcgcgccctcgtcccgctcgtcgcagtatccgaggaggcggacgatgtgcgggtggcggagggagaggagcacgtcgagctcccggcggaacgcgcggtgcaggcgctcgctgctgcagtgcaccttgacggcgccgagcccgcgaggaggaggaggagagcgaggcgaggtacaccgtgctgaacccgccgcggccgaccaccttggacgagaagccacccgtggcggcctccacctccgcccacgccagctgcc

SEQ ID NO: 98603 - DNA, 224 bp, Zea Mays
atgattcgcatggtcgttactgctcggatcgtgatgccaagggcaatggtgagcctttcagcagaccgaatactgttctccatgccatgcaagcactctgcttccttggtggggccaactcaatctttgttgatgagaaacttctcacaaccgtgaacaacgaatttgacgtgaaccaggcgatgtttacattccgttcacctatatatgcctatgctattcat

SEQ ID NO: 98604 - DNA, 201 bp, Zea Mays
cgcctataagaatggagagggagggctcttccagtcacgcgaattgcaaacaacacattcccgtcctatcttctgcgttttgcctggaggtccgttgttcttctcccttcttctgaccgcctataagaatggagagggagggctcttccagtcacgcgaattgcaaacaacacattcccgtcctatcttctgcgagcacag

SEQ ID NO: 98605 - DNA, 273 bp, Zea Mays
ctgcagtagagtagggttatttgaaatgattttgaatatcagctttgtgcacctgctaaaaagattcagagacgagaggttgccaggatttcgttccggttctaggatgcatactgtacaactgtggatctccttctctcacacgcacacaccatgtggcagcaacagtttgtgtgcaatcactggcccactacttcccagtattatatatactatatgaacttgattatatatactatatgaacttggacaatcagcactgttataatcagt

SEQ ID NO: 98606 - DNA, 1331 bp, Zea Mays
aagaaatttggtccacttcgatattttgtggctggaatactgaaatttttatgtttgcctagctacttctatgaactggaatatcttccttcgccaaaggagatggccgtgaatggaaaaggtacagatcaagacaaggcccacctgtccaatgtctataccgatgtgatgcacagcagatcaaagaaagaaggaattccaagagcctccagtttgtccagtattgattctattatgactccaagtcggatgtcgcttggggatgttgatacatcaggtagtacagtggcaagcactgaaccatcagactatgtacgtggtctcgatccgaaagcaaaacgcttgtctctgggaagaagtaacattgtttcagaacctgaagaagtgctacaccctcaaccacatcatggatcattctggccaagaaccaggtccaaagcaagggctgatagaaattcagttggtataacgtctactaatgacacacggtcgtcttgggcagccccatcaatgcatgataaggaagacatttcctcaacaatatcagacccaggacctatttgggactgtgaaccaaagtgggacacagggccaaaatgggatagtgagctaacttgggagcctgaccaccccattgaacttcctggaccacaagaggacatgggaattggagcaccgatggaacttgtgccaaatttggatgagaaatgggtagttaggaaagggcactttcttggtgtcctagtatgcaaccattcatgcatgacagtgcaaagtctgagttcacaggttgttgcaccgaaggccatccatgatgacaacagcttggacttacttttagttggtggaaaaggaagatggaaattgctgagatttttcatacttctgcaattcggtcgccatctctctttgccttacgtcgaatatgtaaaggtgaagtcagttaagcttaaacctggtgcaaacactcacaatggctgtggcatagatggcgagctttgccgtgtcaagggacaggtactctgctccctgcttccggagcaatgcagactgattggccggcgatgtagacaatctatttaagcgctgtgttgaatttcatggatcctggggttctttccacttctaacaaatgtttatataactatactttctgatgggattaagcttgggttggtgttgcaaatgttgagagtttgaaccagaagcaatgttgtgaggtttctgtatatttgagcggttataggatgatatgctgattctgtttaattatgttgattttgcttatatatattcaatagagtaatttagtcccacttcggcgtggcggg

SEQ ID NO: 98607 - DNA, 173 bp, Zea Mays
acttacctggacggggtcgacgggctatcaagaaggcccgtggcctaggtcaatggcccacattgcacttggtgggtgcgttggtttaccatctccccaagtgggagagtggacgtcataatttgtggtagagggggtacgcgttcgcgcggcccctgccaatgatacaaaat

SEQ ID NO: 98608 - DNA, 495 bp, Zea Mays
atggacaggccaggccaccaccagcaccattttttcatgccgccgccgccgcagcagcagcagcagcagctttgcgtgccgatgatggacgacccgtcgtcgttcttggcggagctgatgggcgtcggcggcggaggcggaggtgggccgtcgtcgtccgcgaggggggagaggaagcggcggttcacggaggagcagatacggtcgctggagtccacgttccgcgcgcgccacggccacgccaagctggagccccgggagaaggcggaactggcgcgggagctgggcctgcagccgcggcaggtggccatctggttccagaacaagcgcgcccgctggcgctccaagcagctcgagcacgactacgccgtgctccgcgccaagttcgacgacctccacgcccgcgtcgagtccctcaggcgcgacaagctcgccctctccacgcaggtagcttccgatccgcgatacagtgttcgctctgatgatgttctctga

SEQ ID NO: 98609 - DNA, 1535 bp, Zea Mays
atggccaatccatccgaggctcccgtgacgctgacgccgtcgtcgtctgcatcacccgtacccctgccacgccgacgccgacgtcgcaaacacagagcagattgccgcagtccgtcggcagtcgtcaaactcgagaagatgcacgttcccacgtcacctcctccatggctccatttgatctacgagtacagcactccgactcgtaactctgggaccactcgtcagacaccggtgcgggagaccgcaccgaggacaaaaaggtcaaaaggcaacgaggcgcccccaccccccgcaaccactgtaccggggtatagcccaagccggagcactatgcttccggggggcggcggcgaggaatggaagcgacgcggcgcccccgccggcgaggacgccgccgacgccgacgccgacgctgccacctcggcgtcggcggcgtcgctgaacgacctctgcgccaccgccgcggcgggggcgcccgcgccgttcccgacggcggctgcgtgggcggtcgccgcgctgctcgcggtgggcctcggggtcggcgccctcgtcctcgccgtcgtgcgcagcccggcgctgctcgtggtggcggtcctcctcgcggcgtccgtggcggcgttcctcctgtggaatgccgcggccgcggcgtcgggccacgcgctgcgccggttcgtggacgggctccaggcctccagcctccgcgttgcggccgatggccagctcgtcaagatcaccggatttgtttcatgcggcgacatttcactgatatcttcatacgagaaggttgagaattgtgtatacacatctactattttgagaaaatgtgctagatggggttccatgacactaaatccttggaatcgatgttccaagtggaaattagcacatgccgagaggttcgctgctgatttctacgtagcggatgcaaaatcaggtaggagggccttggtgaaagctgggcaccactcaaaggtcgtgccgctgatcgacgagaacctcctggtgacaacaagcaggggcaccgagttatcttccactctagagcactggctcgaagaaaggaacctttcttccgaagaagcccagattatccgtctagaggaagggtatatcagagaagggatgcggttgagcgtggttggagtgctgagcaagaagaacggggatgccgtgatacttcctccgctggagcctcaatcgacgggctttgtgttgctgtcgtgtctcctcccgtcatatttcgacgggatagtgctgagactggccgccgtgccgaactcgggcgtctcatgaagagccgctatgggtaggggagctcggtgagatgtaacagctaacaacaactcttgtgcggtgcccttgcccccttgggatctttttcctgtacgggtccacctttttcttttttgtttgcttctgggactcgatcgtgtatgtggttttcttttcaggtaatcctaatgtacattctcactatatcatagttgtagtgcgaggcatttcagcgctcttgcctggctcccttctatctgaaa

SEQ ID NO: 98610 - DNA, 1239 bp, Zea Mays
gcagaggccgaaacccgcgacgcgcacgcccagtgcgaccaccacacacaagggtggtgccaaggagccgcactgccgatcatgtccacgccccgccaccgcctggtcaccgcctccccgtccctccgcttcctcggcctgctcaagcaacccgaccatgccagcgcccaggacctggagctcgacgagcgcgacgtcgtctggtcctcctcctcctcctcctcctccagcgcggcctcctcgccctcgccttcctcctcgccgtccccggccgccagcctccggaggccggtctccgcgtcgtcctcccgccacttccccgcgggcagcatggggctgtccgcgctgctcgccgacgaccaccaccaccagcgcgcgcccaccgcgcccgtccccgtcgtcgcgcgcccggagagacagcagcagcagcgcgccccgcagccgtaccaccgctcggctcccgtcgccgtgccggcctggcccaaggcgatgcagccggtgacggacaggcgccgccgggaagcggagctgctgcaggccgcgcccgacgacggttacgatgacggcgagcccgtggtgccgccgcacgagatggccgcgcgccgcgccgcggcggcggcgtcggtgatggaaggcgtcggccgcacgctcaagggccgcgacctccgccgcgtgcgcaacgccgtctggcgcaccaccggcttcctcgacctgtgaaaaaggacgtccctttcctttggaggttccgtttcctttccttctctggccacgtcgctccactccacttgagctgcctgcctcggacggacctcggcttctttcttcttgcgtagcgtagtgctgtgccagctgccaggcactgaaaaaaggcggccgtttccccactatataggttcgaagttctactagcttcgttatatcaggtcaggtgtatttgttgcggaaatggctgcaggtgcttcggtgtttttcctggaagagaactactgtgatgtgatcactctgcaactaatgtttcaagacctgtgcaacccttttgtcaaagaatttcctcggaaggtgatccagaatagctaaagcctgcgtgcgtgtgtgtgtgtagcagagctcatgtcactgttaaaccctgtggtctagtgcgcacaagtgcaaaacagatgtggtgtgttcatggctttttgtataccattgtggctaatggagtgacttttttctttctataaaagcagttttttcctc

SEQ ID NO: 98611 - DNA, 393 bp, Zea Mays
ggcatcctgcacgccgtctctctcgttggctcgccccgctccgcgtgctccaccgcctcgccttctccccctctccctcgggagccgctgtgagcgacccttcctcgacgacgtctactccgacgatgccaccctcatgcatcgctcggatctctccgatcaggtcccttctcacaccatagaccctcaggccgcttctctcgtcaatacctcgacaacactcctcgccctcctcgcccttgcggtggccagtggactggcggccgacggcttggaccaccggtacaagatgtacaagcagacaagctcatcccgctgaacggcaacaatggcccctttcacaatcccaggagatgcagggaatggcgcaaccatcaccgagatgggcaaccc

SEQ ID NO: 98612 - DNA, 2791 bp, Zea Mays
gcaaaaggcatcaaggcatggcgcaaaaccaaggttggagacacgaaactacaacttgcaattactaaagagttaatcctcaggttggaaactgcccaagaagatagattgctcacgttggaagaatcgaacttcctgaaggtgctcaaggcccgctcccttggactggcggtgattgagaaatcgaggattcgccaacgggcccgacttacccgcattcgattaggtgatgcaaacactaaattctttcatctcactgctagctccagagcgaggaagaactatatccaatacctgcagcccaccattgggaatctggcagtggcccataatgacaaagaaaaaactatttatgaccatttcaagtcacatctggggacaaccccacccagagagctcaccctcaactggttggcactggccttaccgcgacacgatctctcggccttggaagcgccgttctcactggatgaggtgaaggaaaccatcttctccatgccaggcgataaggccccgggaccagacggttttacaggaatttttttcaaggagtgctgggacatcatcaatgtggatgtgttggaggcctttcaccaactccatgccatggatggagctgaattcaagtacctgaactctgcgaatatcgtgctcattccaaagaagccagatgctaagtcagtgggagactaccgccctattagcttgatccatagcatagcaaaaatcttctccaaattacttgctaatcggctggcccccttcctgaacaacttagtctccaaatcccagtctgcattcattaggaaaaggtgcattcaagacaacttcttgtatgttcaaaacgtggtcaggaggctacataagcaaaaaaagtcggcgctcttcctgaagctcgacatccagaaggccttcgactctgtgaactggggatatctccttgaagtcctacaggccatgggatttgggccacgctggcgtgagtggatctccatcctgttcggtacggcctcttctagggccctgctcaatggcacccaagggccaggtattctgcacaggagaggggtgaggcagggagaccccctctcccctatgttgttcattctcgccattgacccggtgcatcgcatctttgagctggcaacccgacaaggaatcctctccccccttccgctgaacatagccaatcttaggacgtctctttatgctgatgatgctgctatcttcatcaacccctctagggatgaaattatggcggtcaaagacatcctacacgcctttggatgcgcctcgggcttggttactagccttgaaaagagctccatccacccgattcggtgtgaagacatcgaccttgatcatgtgctccagcctttccacgggactcgggggaatttcccctgtcgttacctaggtctccaactccatacccgaccacttcggaaaatccacatccaaccactcattgaaaaaattggcaaccgtctggcaggatggaaaggaaatcttctaagccgagctggccgtctcacgctcgtgtcttctgttctgtcctccatgcccacctaccacttatcggtttttcccctcgcggcttgggcacgcaaacgcattgacaggatccggcgctcctttctttggaaagggaaggccgagtcaaatggtggtcactgcctcgtcgcatggccactagtttgcaagcccaaagccctcggcggcttgggggttctcaaccttgacaagttcggacgcgcccttcgccttcgctggctttggaaggaatggacgagagacgatcacccttggaaaggtttcgatgtgccttgtaaccgggttgacagattgctctttagcgcctccactactgtcacaattggggatggtaagacggccaagttctggcacgatagttggctcgatggcatggctccaaggaatatagccccgcacctcttcgacctaatcccgagaaagaacaattcggttgcccacgaactcagcggacaacattggatcaaaacactaagaagtaggatcacttccagtgttcagattgaggagtttgtctctctttggactagactctgggatttccagctgcaacctgactcaccggataccattgcctggaatcggtctcctgatggcatcttctcagttaaatcggcctacagagcacaattcattggctcgtacagtcaccttaatgctaaccttgtctggaaggcacgcgcagaaccaaaatgcaaaatttttgcttggattctcctgcaggaaaaactactcacggccaacaatctcgccatccgtgggtggcctcatcaatcgtcttgtgccttttgcaacggaacccttgagactggtattcacctgtgcctacattgtcctttcgcccgtgcggtgtggagacaaatcctgacttgggaaggagtaatcctccctgcccagtctgaccttgcttccgccaccaacattcaggagtggtgggaagctgcgactcccccactaccaaaaaatcagaaacgtgctttcaatggaatcgtgatttacacaatgtggaacatctggaaggagaggaatcgcaggattttcgaaagtgtcgcccttcccccggtccaagtcgccttaagaattaaagaagatgtttcacaatttaggcgggctttgcttcccatgtaattttcatattgctgcttcctgctagcctggaggatttagggtgtggggcttagcctccctttgagtgtgctcgggtgtggtttgtccggtctcagaccgttgtttgtac

SEQ ID NO: 98613 - DNA, 231 bp, Zea Mays
atgggatgtccagaaggactgaaggaggggttctaccagaggacaggattatcctcatcccctggcgaccagctcatggcggtcgacaacgatgaatcaggagctcaatgtcacgaggatggatcccgtggcgatcagctcatggcggtcgacaatgatgaatcgggagtacaggatcacgaggacgaccatgacgacggctttgccgagttagaactgctgctagagtga

SEQ ID NO: 98614 - DNA, 1523 bp, Zea Mays
aaaaaaagacacggcggctacaactttctccagagatttccatcgcacaactctccagcgactttctccatagatttccatcgcacacctctctagtctccatccgtcgggacgccgcatctcgctttctctcccagttgcttcgtctcgctttcatcctctccatgtcacttgggtttcgtcggcgtcaaggactccactttcgcccgacgacttcgccttctcttggcttactcaccggctgtgtctctttggttagatgcgtttttctcctttgtctttcgtcgtccctttcgactgggtcgatacctggttccagatccgtttgtcgatcatatcgagcctcctctacttgagatcctcttgctttttgggatcctgttgcttcagtgcgtggagattgagatctaaacgacaagtattttcttttggttaactggttcgcaagaagtgtagatggacatcgggttccggatttgtgcttcgatcatatccagctgccagcttggtcgtcgacacgtttatttccacagttgtgctcccattcttgcttcgtcgattgtttcgttttggtgcacagctgatttcgtttgtgtcaaatggtatgtatgaagttcaaatttcgccttcttcgatttatgacatgtaaatttgctgcatttcgtttgtctagcataaggctgtctcaggtcggagatttccggttgtgctcattgcaaccaagacgaagaagacgacgacgatccgtccacaacggctgtctcctctgcgggcgtattgacgccacaacccactatgggtatcttgagttggccttcaagcagatggcagagaccgcagacgccagcaacgcactcgaccacaggcttcactaccttcggttgaccggcaatgcatgtgcggcgagggcgctggtatggtgggtatgggagaactctaatgctcatgctggtatggcctcttccgtcgaactttccttgttcttgcctccttcggtgaacttcctcgattcttgcctcctccggcaaacttcctggactcgcggctgatgttaccgccacacactgtctcctgtgcttctcctccagcgaacatccactgctcgaaccaccatggcgctcggctatagagcgtcatgacagcagctccccaagcgatgcaagccgcctgtttgacgaaatgtgtgagaagcaaaatagagacatcaatggtgttttcatgtgtctaatacattttaaaaaaaacatagctagatagcattttcgacaggaacaaaggattcgtaatgcgctcggctactgggcgtcatgacagcagctccccaagcgatgcaagccgcctgttcgacgaaatgtgtgagaagcaaaatagagacatcaacggtgttttcatgtgtctaatacaaatttattttttaaaacatagccagataacattttcgacaggaacaaaggattcgtaatgtaatttatataatgtaattattttgattaatctatgattcaatttccatagcataagaa

SEQ ID NO: 98615 - DNA, 1421 bp, Zea Mays
aaaaaagacacggcggctacaactttctccagagatttccatcgcacaactctccagcgactttctccatagatttccatcgcacacctctctagtctccatccgtcgggacgccgcatctcgctttctctcccagttgcttcgtctcgctttcatcctctccatgtcacttgggtttcgtcggcgtcaaggactccactttcgcccgacgacttcgccttctcttggcttactcaccggctgtgtctctttggttagatgcgtttttctcctttgtctttcgtcgtccctttcgactgggtcgatacctggttccagatccgtttgtcgatcatatcgagcctcctctacttgagatcctcttgctttttgggatcctgttgcttcagtgcgtggagattgagatctaaacgacaagtattttcttttggttaactggttcgcaagaagtgtagatggacatcgggttccggatttgtgcttcgatcatatccagctgccagcttggtcgtcgacacgtttatttccacagttgtgctcccattcttgcttcgtcgattgtttcgttttggtgcacagctgatttcgtttgtgtcaaatggtatgtatgaagttcaaatttcgccttcttcgatttatgacatgtaaatttgctgcatttcgtttgtctagcataaggctgtctcaggtcggagatttccggttgtgctcattgcaaccaagacgaagaagacgacgacgatccgtccacaacggctgtctcctctgcgggcgtattgacgccacaacccactatgggtatcttgagttggccttcaagcagatggcagagaccgcagacgccagcaacgcactcgaccacaggcttcactaccttcggttgaccggcaatgcatgtgcggcgagggcgctggtatggtgggtatgggagaactctaatgctcatgctgcgaacatccactgctcgaaccaccatggcgctcggctatagagcgtcatgacagcagctccccaagcgatgcaagccgcctgtttgacgaaatgtgtgagaagcaaaatagagacatcaatggtgttttcatgtgtctaatacattttaaaaaaaacatagctagatagcattttcgacaggaacaaaggattcgtaatgcgctcggctactgggcgtcatgacagcagctccccaagcgatgcaagccgcctgttcgacgaaatgtgtgagaagcaaaatagagacatcaacggtgttttcatgtgtctaatacaaatttattttttaaaacatagccagataacattttcgacaggaacaaaggattcgtaatgtaatttatataatgtaattattttgattaatctatgattcaatttccatagcataagaatgtttttttgtttgcatgtattataagaaaaaaaaa

SEQ ID NO: 98616 - DNA, 1474 bp, Zea Mays
cggctacaactttctccagagatttccatcgcacaactctccagcgactttctccatagatttccatcgcacacctctctagtctccatccgtcgggacgccgcatctcgctttctctcccagttgcttcgtctcgctttcatcctctccatgtcacttgggtttcgtcggcgtcaaggactccactttcgcccgacgacttcgccttctcttggcttactcaccggctgtgtctctttggttagatgcgtttttctcctttgtctttcgtcgtccctttcgactgggtcgatacctggttccagatccgtttgtcgatcatatcgagcctcctctacttgagatcctcttgctttttgggatcctgttgcttcagtgcgtggagattgagatctaaacgacaagtattttcttttggttaactggttcgcaagaagtgtagatggacatcgggttccggatttgtgcttcgatcatatccagctgccagcttggtcgtcgacacgtttatttccacagttgtgctcccattcttgcttcgtcgattgtttcgttttggtgcacagctgatttcgtttgtgtcaaatgcataaggctgtctcaggtcggagatttccggttgtgctcattgcaaccaagacgaagaagacgacgacgatccgtccacaacggctgtctcctctgcgggcgtattgacgccacaacccactatgggtatcttgagttggccttcaagcagatggcagagaccgcagacgccagcaacgcactcgaccacaggcttcactaccttcggttgaccggcaatgcatgtgcggcgagggcgctggtatggtgggtatgggagaactctaatgctcatgctggtatggcctcttccgtcgaactttccttgttcttgcctccttcggtgaacttcctcgattcttgcctcctccggcaaacttcctggactcgcggctgatgttaccgccacacactgtctcctgtgcttctcctccagcgaacatccactgctcgaaccaccatggcgctcggctatagagcgtcatgacagcagctccccaagcgatgcaagccgcctgtttgacgaaatgtgtgagaagcaaaatagagacatcaatggtgttttcatgtgtctaatacattttaaaaaaaacatagctagatagcattttcgacaggaacaaaggattcgtaatgcgctcggctactgggcgtcatgacagcagctccccaagcgatgcaagccgcctgttcgacgaaatgtgtgagaagcaaaatagagacatcaacggtgttttcatgtgtctaatacaaatttattttttaaaacatagccagataacattttcgacaggaacaaaggattcgtaatgtaatttatataatgtaattattttgattaatctatgattcaatttccatagcataagaatgtttttttgtttgcatgtattataagaaaaaaaaa

SEQ ID NO: 98617 - DNA, 5187 bp, Zea Mays
atgggatccttgttcaactatttttctgttggcttttcggaaactacttcctgcacatcctcagcccctcctgatctgaatgggagcaaacatgaaaaggcctgccatggattacattattgcaagcccaatacagcttcctcacctcctatacaagagctgcaaaagcaggaagcaagagatgatttagttattggtggagaagcagacttaattggtaaatatgaggtgtgcacagattcacgcaaggtgttgctcagaactatgtcttccccaactcaacaaaagtgtgaaaatcaagaagaaacaaaaaacactatcagtgttaaccagactgacaccgcatacaaatatcctacaaccaagcccaagatcagtgttcaaattccagcttcctatactcccaacatggcaccaccccaatttatgcttccagtaccagggagatcaatgcctgtggcatttcaacagaaacaacctcaagtgcccattgaattcaggggcccaggttttcaaatgcactctattggctctgtatctagttccttgcccgtgaagatggctgtccctctgggtaatgcacctcacatacaaccgatgtttgttcatggtgctcagcctcatgcattccatcagcaatcctttattcaccatggacaaggctttggatgtgctcctccatctaattgttaccttcctcagtttggcaacatgagaaatgtgcaagaattatctcagcagtatcctagaagcggtgatgaacataagagaactatcaagataacacatccagagacacacgaagaactgatgctagatagacatgggcattcctttataaatgttcctgcttctgggcagatgcctttaaacaatataaaccagctacctcactctgttcaaacattttctccacttcagaaagtgtattatcctagaccaggaacgtacaattcagcacatgtctatcttcccaactccactgatgtccctcttgcaagtaggcaattttcctccaaaattcaaccttcgatgcatggttttgattccactaatagcaaccagccatttacttccatcagacctcctatgccgatatctcggcttgatgctacttccgggccattaacaaatttgcatactgcttccgaaatctcaaatttcaaagggatgtttccatcaagcctacctgctccagttcatgttgagctaaagccgcctattacactccctgctgaaatgaatagtgaatctaccatatcaaatcaacaaaattattgcaaaattgggctagaaatgtcccttgaacctgtaaatttagtttatgaaggaaataacaaagattctgttgcaacttgtgacataagttgtaatttaatacctcaaccagtttcaaccccgcagacacagactcggccaacttcagttgatcatgccacaccagttgtagaccctcaaactatcttaaccagtagcctgcctctggaatctactacatgttgtaaatcttcagttaaagcaaaacctattgaggtggaacaatcattagtggttccaacaactttatcatcccatacaaaactcgagtcatcgcatgcaactactagtgtcattttgactgcaacttcattagtttccaagattgatgggacgccaccgactaacaggaactatagatattatggcaatagcattttggggaaacctccgttaatttatgcacaagaaatattgccatcaaagtttgtggggtctaatacatcaccagaaggtcttggaaaggcaaaggtgaatccagttctcttccaagaaaagtttccttctgaacttaatggttcagttccattgcgaaagcatgacttcatgatagaagaacatgttccaaacgaaaaagggatgtgctcagagtcaaagaccgaacaagtagatgtgaccatgccaagtactgcctttggattggaggatgacactagtgttgctaaatctggaagatttcatgcatatcaccagccagttgatttgcatccttccatatacattggtgatatccagacatcagatgacagtcagcaaccttcaccagatttagaaatcataacatctcaatcagagaacaagcagaataacagtagagtagactctgcaagggatgtcaagaatgcagcccctatttctacttcagctatctcccaggggaaaacagaacaagagaggattggtttagaaatatctaatccttgctctataactgctgctttagtggcacaaccaaaaaaagttgttttggagtcaacaaaggccaaaagtaccaatggacgaagaaagaaacgaaaagagacacttcctaagggtagtggacacaagtattatgatcttgatagtgcacacagttctctcaatgagaatgtcgagagttttgttacttcagaggatgttcagtgttccttggcaactgatttaaagctgaattttacatgcgaggctgcaaaggacaattcaactggtgggaatgattgccagaacagaagtgacttgttcagctgggaaaatacaacggaaaactctgcggacaagttgaaactttttgggggtacccattctaaaagtggagcagaagtaaacaaggataaatctgagtttgaccataaaaggtattcccgggattttcttttaacgtttgcacaaagttgcatcgaacttcctgcaggtttcatgattggattcgatatttctgaagcagtaatgagtgtacatgttggtgctccatttatagacaatactcaacttaattcaaaccatgcaaggataaaagatcgaggttcccgaggtagtcgtcatatgactggtaaatttgatgatgataagtggagaaaacagtttttttctactgtttctggacgtaacctgctttctgacaatttttatcaacctgccttttctaatcgggatgcagtacaacatgttgggaacggatctgtaagaagtttatcacaaagtcagccattaagtcaatatagtggcgaggtgctctccggagctatgaaagtagtatctcggcgcagcatgtcacgtggatctgttgatgagagatggcaacatagaactaatgttcagggtatttcatcgccttctcaggtatctatgccaattatgcacaaagctgagaaaaaatatgaaataggtaaggggattgatgaggaagggtcaaaacaaaggcagttgaaagctattctgaataagttaaccccccaaaatttcgaaaaactttttgcgcagttcaaggagttgaatattgataacgtggtcacacttactggtgtcatatctcagatatttgacaaagctttgatggaacccactttttgtgagatgtatgctagtttctgtttccgattagctggtgacctaccaaactttgtcaaagatgatgagaaaatcactttcaaacgactgcttttaaataaatgccaagaagaatttgaaagaggagaaagagagcaggctgaagcaaataaagcagaagaagagggtggagctaaacaatctgaaggcgagagagaggaaaaacggattcgagcacggagacgcatgctaggaaatattcggttaattggtgaattgtacaaaaagaaaatgctgaccgagagaataatgcatgaatgcataaataaactgctaggtgagtatcaaaacccagatgaggaagacctagaggctttgtgcaaattaatgagcacgatcggggagatgatagatcatcccaggacaaaggtccatatggatttttattttggccttatacataagctatcagaaaatgtgaagttatcatcgcgtataagatttatgctagaagatgtgattgaccttagaaaaaacaagtggaggcagagaaggaaagtagaagggccaaaaaagatagaggaggtccgcagggatgcagtaaaacataagtttggccaatcaacaaggtttggctcttctcctaattataattcatctgttacttgcattagctctggattgagaccagggcctccagatgctagatatcagtcttcaaatagagtcttgcatgttccactccatcaaaggcgtgctcataaatccattcgccttggtcctcaaggtgacttaggaagaggaatctcgatttgtgggaagcaacacgtttcaaatgatattttgccagaagttactttgaatagtcatcatggtcaaacatcagaaaactcaagagacagttcatttacaggagtgacaagtaatccaacaggcttcaaagccggtaatacatcttggggaatggtggatctttcttcaccagtaccgtcaactataggtcaaacacatacatcctccacagtcagaaaggagatgtgtgctgaagcgcatacattccctgaagaggttcttcaagagaaatcgatactaaccataaaagaattttacagtgctaaggatgagaaggaggtcgctctgtgcatgaaagaactgaatgctcccggcttctatccttctcttgtgtcactttggatcactgactcgtttgaaagaaaagacctggaaagggaactcttggccaagcttttggtgtacttgtgcacagctcaagagcacttgctgagccagaggcagctactccaggggttccaacatgttctatctaccttggaggatgccgtgaccgatgcgccgaaagcgaccaagttcctgggccaaatatttgccagagtcgtactggaagacgggatctcgctgacggaggtaggagggctgctgcaggagtgggatggcagggaagagccagcaggacagcatgccctggaggacagcctcgcatccgaggttctagggagcatgctagagtccatcagagtagagaggggcgacaacgccgtggacgaaatccgcgcaaaatccaacctgcagaggcgtggggtgtgtgcctgacgcctgatgcaggaagcagggtgcttagattgcaattttgttaggttgtcgggatcctaaccttagaaataaaggttagataagattttgctggtcttttgttttccttgtgttaccactacttttgcagaagaacttgttgagttttctgtgctggttcgtggctggcttttaaacataactcatgatggtttcgaatctcatgatgatttgtaccatctttgttcctatgaa

SEQ ID NO: 98618 - DNA, 787 bp, Zea Mays
agcgatgcacatacttttggtctcatcaaagtccatgaaccctatccttttggggtggacccaagctggcgtggaagtcggtctgagctaccctttctaaattcattaaagatgaagatgtctatactaatgggtgttgcccagatgaacctggggattgtattgagttattttgatgcacgatatcatggaaatgctcttgacataaggtatcaattcataccacagatgattttcctcaatagcctttttggttacttagcactcctgattcttatcaagtggtgcacgggctctcaagctgatctttatcatgtgatgatatatatgttccttgatcctgctggagatcttggagaaaatcaactgttctggggccaaaaggaacttcaggttcaattaagtggatccttctgaaaaaagaaaagtaatactctgtatttccagcatccttggtgtgctaatttatttgtttttttttctttcagatattgttgttacttctggctttgatcgctgttccatggatgctcttcccaaaaccttttatcttgaagaaacttcataaggaggtaatgatttggaaaatgttcttgaaaaatatatcaggctctggtatgactgaagagtcatataagcaaagaaaagtacaagaggtcttcgagaaatatataccaggctcataataaaggtaaacagagcagttcaatgggctgcttcattgggccaaacataaatataatgcatttgtgagaccttattatctgccaaactacatgaaaattcc

SEQ ID NO: 98619 - DNA, 690 bp, Zea Mays
atggcgcccggacttctgctcgccccagctccctgttgtcgcgagcttcagcccggatttctctttgtcacgcagctcggcgcctgctgctcgtccctgctgcgcgtgtcgcattcttctattgcgcgcacgaaaattctctgctcacaacgacgtgtcaagtttccgcgtcgaactcctctcgtgcgtgccggtcgtcgtctccaagccgattcttggctgtcgtagtatttttaagttatcccggacatgtctgtggttgtcaggcgtgtctgttgccgtgaactcgcccctggtatccactctgtctctggtccgcgcttccttcacttcggccaggcggggcatcgttccgtgtgctcgcccaagtcaccactgtcaaatcgtcggagtcgctcaactcaccaatcgtatcttggtcagtcatcgatttcatatttatcatggtcctcacgtcagtcgtccctatccgaacttgctagctcgccgactgaccgtcgtgttccttgaaatccctcgtcggccgaccttacgacttagttcgtcgcgtcgggtatgcagctctgtatatgccaccctcctatatcgtcgtcgaagctgtcatcccttgctcgaccccacctcaccagctcgctccaaacacgatctcgtcgtcgtttcgtgtgtcgtcaagaaatcccaagcgtcgga

SEQ ID NO: 98620 - DNA, 1752 bp, Zea Mays
cacaaagtgaggagcgatggagaaacttggacttgctcgaaacatgccagctgccaagagaaaggattttgggtttgttacatttgatacgcatgataatgctgttgcatgtgctgaagggataagtaactctgaaattggtgaaggtgatcacaaggcaaaagtaagggctagactgtcgcgaccactacagagaccacctagaatgaagcatggattgagaggaaattttagagtcgggcatggtgccccacggggtggccgtttacagtacgctcgtgctcctccacctcgcaggcctccaccacgccttgttcggcctgctggtagtcgcttaccaccaatcaggagccatccattgaaacgacccatatacatcagagatagacgtcctgctatgccaatgctagatagagctaggcgtttacctccttcagggagatcttatgacaggaggcccccagctccagtttacctgaagaaaagtccaaggagagaatacgggaggcgtgatgaacttcctcctccaaggagcagagctatgattgattacagtcctagagttccagttgatagacgtccctctttgagggatgattatttaccccggggatcaggttattcagacctaggtcctcatagtgctccccatctttctgataggcgagcttatgctgatgatagttatggggggaagttcgaccggcctttaccggtctatagggagggtcgtggccatgattatgacaccgtttctggatcaaagcgtccatatgcagatatggatgatgcgcctcggtatcaagaaattggtgttcgtcagtccaaggcacgcttggactatgacattggtggcagcagtgctcgctatggagatacatacaacgagaggcctggacgaccacatgcgggatatagcagtagtcggtctatccctggtcatgattcagcatatggtagcagccgtaatggcatgagttatggaggttctgctagcagtgctgatgctggtggtatgtacccaccgagttacagtggtagctatgggtctcgtggatctgatgttggtgggagttcatattcttcgctttactcaggccgcaatttgggtagcagcagtggtggctactatggaggtagcggttccggttcatattactaaggtgcaaaatcaaatctcttctgtctttcaccaagcttgtttcactgtgcttaaattatttgcaccgtccctcacctctatcacacatgcacacatcatggtgctattgttggggatgagaaatgtttcccctttgtgtaagatgcgggaagtccagaaccataaaactctaattacacagatttggcatcacctcgtctttgtggaacagatttggcattataggacgttggtgtaggccctgcattttgtggagctccttgatttaagccctacagatctggaaaagaaatcccaagcacccaagtgaggcaatgatttcaaataagacatttcaacgaagccagatcattaagttggttgaagcagtagtcccgaggatgttctggcttgcttatgtaatgtaaggatttgctttatctgatcaagagttatgaacataagagccagatatggtgttttaagtgtttctactggtgttttaagtgtttcgacatgtttacttccagtgtttctataacgttattgagacagaatggagtgtactttgaggtagtttctgcaattcaaggtatttgagattacatctt

SEQ ID NO: 98621 - DNA, 1542 bp, Zea Mays
cacaaagtgaggagcgatggagaaacttggacttgctcgaaacatgccagctgccaagagaaaggattttgggtttgttacatttgatacgcatgataatgctgttgcatgtgctgaagggataagtaactctgaaattggtgaaggtgatcacaaggcaaaagtaagggctagactgtcgcgaccactacagagaccacctagaatgaagcatggattgagaggaaattttagagtcgggcatggtgccccacggggtggccgtttacagtacgctcgtgctcctccacctcgcaggcctccaccacgccttgttcggcctgctggtagtcgcttaccaccaatcaggagccatccattgaaacgacccatatacatcagagatagacgtcctgctatgccaatgctagatagagctaggcgtttacctccttcagggagatcttatgacaggaggcccccagctccagtttacctgaagaaaagtccaaggagagaatacgggaggcgtgatgaacttcctcctccaaggagcagagctatgattgattacagtcctagagttccagttgatagacgtccctctttgagggatgattatttaccccggggatcaggttattcagacctaggtcctcatagtgctccccatctttctgataggcgagcttatgctgatgatagttatggggggaagttcgaccggcctttaccggtctatagggagggtcgtggccatgattatgacaccgtttctggatcaaagcgtccatatgcagatatggatgatgcgcctcggtatcaagaaattggtgttcgtcagtccaaggcacgcttggactatgacattggtggcagcagtgctcgctatggagatacatacaacgagaggcctggacgaccacatgcgggatatagcagtagtcggtctatccctggtcatgattcagcatatggtagcagccgtaatggcatgagttatggaggttctgctagcagtgctgatgctggtggtatgtacccaccgagttacagtggtagctatgggtctcgtggatctgatgttggtgggagttcatattcttcgctttactcaggccgcaatttgggtagcagcagtggtggctactatggaggtagcggttccggttcatattactaagatttggcattataggacgttggtgtaggccctgcattttgtggagctccttgatttaagccctacagatctggaaaagaaatcccaagcacccaagtgaggcaatgatttcaaataagacatttcaacgaagccagatcattaagttggttgaagcagtagtcccgaggatgttctggcttgcttatgtaatgtaaggatttgctttatctgatcaagagttatgaacataagagccagatatggtgttttaagtgtttctactggtgttttaagtgtttcgacatgtttacttccagtgtttctataacgttattgagacagaatggagtgtactttgaggtagtttctgcaattcaaggtatttgagattacatctt

SEQ ID NO: 98622 - DNA, 920 bp, Zea Mays
ctcatttgaaaaacaaggggaaggagattatttttccttgatggggcaaggacggtagatctgaaagcagcatggcgtggaaatatttttcttgaaaacagtaggcacaggattaagtacaagaatactccattagaattttgagttgaagggtcttgaattttttacccaattgctggagcaaactcagggatctaacacggtttagtctaactacttagttaagagtattcaacataaagattctttggaatcacaataagctgacaaatgcatcatttctttatcaatttcaccatctcatctgcatagttccctttgtttttattctgttattcacatggtttttctagtgatgttattatcaaagcagttgacgatgcttacctgtttttccatgctaacgtggcttcgatattatcatgtttttttgagccctttgagaattgtagcccaccagcatgcctctttccaaagtcgtgcgtggagattcaaaccggtagtctagtggttgccgtcaaaagcagccagatttgtgaaatcgtcatgtgtgttgctctctagtttaccgatctgtgggcttgtaaagaacactgtaggcatgaaagcaaccgtatgtacagaaaatataattaactgctcgtatgaaataccatacggagatgtaccgacgtttgtcacgcgcgtctgaaaatctgttcccaattagttcttgtaaagaaacattgcaggcatggaagataccagaagtgcaaaaatataatcaagtgcttgtatgaacattgtagtcttgaagttccatcttccattggccacgccgtgtccggtgcccgtgcagctctgtgcgtgttgccttggttctacactgcctcatggtcattgaaatcccgagatggccatagccgaccacgctgttgccc

SEQ ID NO: 98623 - DNA, 1363 bp, Zea Mays
gatccgacggccgtcgcccccgctcccgacgcatcgtagccgcccagcagccgagaaggaggacggaaggccaccgcgcaattttacgagtcgtcgcacgccccgcgccccgcgcgcggggtgtcgggcaaggtgcccccacgcgcggcggttggcgccgccgtcgtccaccgccgcccgcgtgcgcccaccgccacctgttaccgcctaaggggaacgcctccgttataacccacggcaccatccatgccgtcctccaccaccgcttcaccatccccgccaggcccaccaccaccatggcctctccttcccccgcccgcgcctccggccggcgcgtgccgcccccgtgctggacgaccgacgagaccctcgcgctcgcgcgggcctacaccgcgcgccgcctcgccgtcggccgtgagcacctgacctccgctgactgggccgccgtcgccgcggccgctccgtccaagacggccaggcagtgccgccacaaggtcgagaagctccgccgacgcctccggtccaaccgccgccgcccgtgcccgctcctcgacgccatcgacctcctcgacgtcccttccccgcccttcttctccaagtcccagtcccgatccacgtcccggtcctcgtcgccgccgccgccggcggcggcgatctcttcgccgtctcccccttcccctcccgcatccccgcccagaaagaggcggcgggacgatgccggggacgaggacggtgtgagcgatgtggtgggggctctgagggccatcggagagggtttcctgcgagcggaggagaggaggatggaggccgcccgggagacgcagaggatgcggatggagatggcgcttcggcaccttgatgcacagaggaggctcatggacgcgcttgtcggccgcatcgtcgacgccttggactgaagtggtgtcacaaagatgtctcatcgaggtttcttgcttgtcctcgttgcatgctagcttgcgagtttaggagtttcttagcgctgtttatgtgtagtagctgtgatggatctgtgatgtagttgaagcggacaagccttagtgatttcccacccttgtatttgcttaaaaggggagtttcttatgaagaagaggttgcacgtctgttgcctatgcctacttgcttctttgctctcatgtatcatgctatttaatttgtttgattttgtgttctgatgaaagtgacatatatatactactgataaccatgctagaagattagcatcgggttttggtaacaattatgttttggggctttggacttctaatttcttgaaaagaaagaaaacaattgtcactgctgcattacagacttgcatcataaaaaaaactttgctacctttgcc

SEQ ID NO: 98624 - DNA, 617 bp, Zea Mays
tgtagaatccaacttattcaaatttctcccaatagttttacatacaagaggtgagtgtaaacttttgtctcacttttgaagggaaatctgtgtaacctcatcttgaggatatttgctttggtaccactaattgttatcaaaatgtatatttgatgcagcagtcgtggacataaggaatgttaatgtgtagatgttgagtaccaatattgtctccccttttttcatccagtcatcaagatttccaacttcaggctggggaattcttcatagagatacagtgcacagaatattgagttccctccacagtacaattaaatttgtagattgcagatttttcagctccatacagcaaaaaatttgacaaggactaaacacttgtactctgccggggatgtaattgaaaatgaaatcttcgcatgattgcttcacaacatataggttggtgtgaccagcaaagtagaacccagtgctgaaatttcattcaggatctaaaataaaaaatatataaaggataccattggcctcacagagtcacagacctcagttggcgggctaaggcactagcaaaggactgaaaaaatacagtccctgacaaaacaaaaatcttttgtgtgtgt

SEQ ID NO: 98625 - DNA, 2541 bp, Zea Mays
gggcgactcggcgcgtaggaggaagaactctccctcggcgcggtggcggcctctcccacaacttttcctaattgaattcgatctcccttccctatccggcatcagcgcgcaccaccactagcgaatcccgtttggtcatcaagaagacgtacggctgtctccaatcgaagttccagtcccactccaacatcggagagagagcacatgtcagtctgacttgcgaactccttccctctcctccttcccccaggtcaggagtcccagatcgtgaagccagctattttactctactcccccctcaccacgagtcggaattcagccccgcgccgcgcgtcgatcttatcctccagtctgattccagctccgcccccgcctccacctcccctctctctcgatccctcgctattaatacatcccggcggttcactcccgatctccatccctcccggccgggcctgcctcctcgatcctcggacgaaacgcgccgccttctttcttcgtcccagcctcgcctcctgccctttttaggtcgcccggatctcgctctcgtcgtcgtcgtcgcgcgcgcgcgcgcgcttcttgtttctgtcggcgccgccgcggtgctgggaaggcggctccttttcgcggccacaacccacaacacgtcctcgtgatcctagtaccttcttcttggaaaaagttgccgccgcgatgaacgcgctcgccgccaccacccgcaacttccggcgggcatcgaagctgctcggcctcgactccaagctcgagcagagcctgctcatcccgttccgggagatcaaggtggaatgcaccatccccaaagacgacggcagcttggcgacgttcgtggggttccgcgtgcagcatgataacgcccgcgggccgatgaaaggcggcatccgctatcacaatgaggttgatccagatgaagtaaatgcccttgctcaactcatgacatggaagacagctgttgctgcagtcccatatggtggagcaaagggagggatcgggtgctctcctggtgaactaagtagaagtgagttggagcggttgacacgagtatttacccagaaaattcatgatcttatcggaacgcatacagatgtccctgctcctgacatggggaccaatgcacaaaccatggcatggatgctggatgagtactcgaaatttcatggtcactccccagcagtcgtcactgggaagccaatagatcttggcggatcactgggcagggatgcagcaacagggcgaggcgtaatgtatgctaccgaggccctactcgctgaatatggaaaatgcatttctggatcaacttttgtgatccaaggttttggcaatgttggttcatgggctgctcgacttattcacgagaaaggtggtaagattattgcaattggggatgtgacaggttcaattagaaacacggctggtatagacatacctgctttggtgaagcataggaatgaaggtcatgcgatgaaagacttcgatggtgcggaagttttggattcaaccgagttgttagtgcatgactgtgatgttcttgtcccctgcgccttaggtggagttcttaacaaggataatgcaccagacgtgaaggccaaatttgtaatcgaagctgctaaccatccaactgatccagaggcagacgagattctcgccaagaagggggtagtagtattacctgatatatatgctaattcaggtggcgtggtcgttagctactttgaatgggtgcagaacattcaaggtttcatgtgggatgaggagaaagttaacgatgaactagaaaagtacatgagcagtgcttttcaacacatgaaagccatgtgcaaatctctggattgcgaccttaggatgggggccttcaccttaggagttaacagggttgctcgtgccacccttttgagaggctgggaggcatgagaccattgaccgcgcattacagattcgacaggcgcattcaataattcgtgtccaacaacgttggaggatcagtgtatacggtaaaattcatccggcttggaatgagcccgttgaagggtgttgtgcttgttgatcctgagttaccaatggttggttcaccagtttttggtgatgattagtgaaaattttattcaaaaccattttattgtattttagaaagctaatttggcctcgacagagttactgtaccttttcatttttaatgaaattctggtctgaggtttgaagttcccagatgtaaatgatttgcaaaaaaattgcagaagggattcaaataaaccagttatcattcacacagtttaaagaagtgctatgactgagttaaacataagccgcaaagcaacctaataattcagtaaaagtgaacacactaaagttatcatcctgcgcattacgtttaacaatcgtgatagaaatgcttcaggtcaggtagccaagttttggagctacgggtatgacgccgctagtgtctggagaaggcaacgcgagcaaagcaatctctggatcatctgaaatctcgtcagcgctaactgggtacagtttgcgaggccg

SEQ ID NO: 98626 - DNA, 427 bp, Zea Mays
acaactctccattatcctcttttttcattttcctacaatatggtgatattttttttccatacagagataagttaatgctttctccatgcgccatatgttacagaaaaccagcagaaagccgatccaaaagcatgctacaaatattagctgaaccgacaattcgccaagttggcatacgaagcacattgttatgtaaataaggacacttaaggcccattggtgatcggcacagagaggcgacacgatccaggaggttaaagtaaactgcaactactggctgttcctaagctgcttgctgatgtgacctaagactatggttgcttcaggtacccttctccttcagcaaccccacccatagaggtggagctgctggttatagagctcatcagctgagatggttgacagagaagttctgcctctgggtgtc

SEQ ID NO: 98627 - DNA, 225 bp, Zea Mays
atggcggcccggcgcgcgtgcggcggcttcctggcggtcggaggcgctggcgcgacacctgggtcggagtggccggactgctcggtcggtctggcggctgggtggtccctgcacccgcgaatggagccgccgggaggcgcgcccggtctggcggccggggaaggcgcgggctcgcgctaccgggaggggagaggcggcggcgcgggctcgaacattcatagctag

SEQ ID NO: 98628 - DNA, 200 bp, Zea Mays
gaaatattttttccttacataaagagttttttcacagcctcacaggaaaaccacaaagtctagtgtgtggaaaagacagactctcagatctctatcactataagttacaaatacataacatgtgcatagaaaatagtggattcgttcgagagaccaaatcgttaatctcaactgcctttcaacaccatctatcccaaaaa

SEQ ID NO: 98629 - DNA, 1757 bp, Zea Mays
ggcacttttcaaaagcattttcatgagatgaaaacatatatgaccagacatagattcagcctcgatctatatatgccctctaccaaaaggaaacgcttattacaagtgatgtagcctgaacgaaaaattcaaagagcctacgggccaacaaccatggacaggccggcctgcctttcctacggcacatcgagtgtgtcgtctgaagaaatcgtgctgtgaatatgtgtgcaaccatttggcatttgtctcagctagctagcgcatgcatatatatgcactcgttcctgttcatgcgtgtgtctcgttgctacaaccttctggtcaactcagcgcggcgctaggaagaaaagcaagaagaagtcgcaagcgaaacgcgacgccgccgacgcggaccttgtcgccgtcgccgagtacaagaaccctcggaaaccccccggaggtgccaacctcttcgacaagatgctcaagaagccgtgcccctatcatcaggggcccgtcaagcacacccttgaggagtgcgtcatgcttcggcgccacttccacaggactgggccacccgcggagagtggcagggctcgcgacgacgacaagaaggaagaacaccagacaggagagttccccgaggtccgcgactgcttcatgatatacggtgggcaagcgacgaacgcctcggctcggcaccgcaagcaagagcgtcgagaggtctgttcggtaaaggtggcggcgccagtctacctaaactggtccgacaagcccatcaccttcgaccaagccgaccaccccgaccacgtgccgagcccagggaaatacccgctcattgtcgaccccatcatcggcgacgtcagactcaccaaggtcctcatggacggaggcagcagcctcaacatcatctacgccgagaccctcgggctcctgcgtgttgatctatcctcagtccgggcaggcgctgcgcttttccacgggatcatcctcgggaagcgcgtccagcccctcggacaactcgaccttcccgtctgcttcggaacaccctccaacttccgaagggagaccctcacgttcgaggtggtcgggttccgaggaacctaccacgcagtatttgggaggccatgctacgcgaagttcatggccgtccccaactacacctacctcaagctcatgatgccgggccccaacggggtcatcaccgtcggccccacgtaccgacacgcgttcgaatgtgacgtggagtgcgtggagtacgccgaggccctcgccgaatccgaggccctcatcgccgacctggagagcctctctaaggaggtgccagacgtgaagcgccacgccggcaacttcgagccagcggagacggttaagtctgtccccctcgaccccagcagcgacgcctccaagcagatccggattggctccgagctcgatcccaaataggaagcagtgctcgtcgactttctccgcgcaaacgccgacgttttcgcgtggagtctcttggacatgcccggcataccgagggatgtcgccgagcactcgctggatatccgagctggagcccgacccgtgaagcagcctctgcgccgattcgacgaagaaaagcgcagagccataggcgaggagatccacaagctaatggcggcagggttcatcaaagaggtatttcatcccgaatggcttgccaaccctgtgcttgtgagaaagaaaggagggaaatggcggatgtgtgtagattacactggtctaaacaaagcatgtctgaaggttcccta

SEQ ID NO: 98630 - DNA, 1627 bp, Zea Mays
ctttgcataggacgcatccgccagaccgccactttcttccgcatttcctcaaacaattcgcgcgccgccgccgccgctctccggcgtctgctactcggctccgtgcccccaccaggcagcaggccaccaccccaatccctctcttccttcagagatgcagaaggtgcggctcaaatgggtgaagaaccggggcctggatcacctgatcgagcgcaccacctcaatccgcgcgtcctgcctgctgctcgaccacctctcgcgcctccctggtacctcccccgtgccggcgcgctccctcgcacgcctccaaaagccgcttggcctgacggtgcctgtgcttcgcttccttcgccgccatcccacgctcttctccgagcaaccgcaccctcggttccccacgctgctctccttttccctcacggctgcgtcacacaccctcctgtcccgccttgccgatgcctatgcgcacgacgcgcacctccgcctcgcgcgcctcctcctcctcacccgctccaggtcgctcccgctcgcctccgtgctcccgctccgcttcgacctcggactgccgttcaacttcgccgccgcgttcccggcctcccaccccggtgtcttcgccgtcgccaacaaccgcatctccctacggtccacctccggcctccccgaggacatcgccgtctcctctctccaacgccgccacgccgcggccatcgactccgcgacctaccgcgcgctgtcccggccgccgtcctcgtcgagcgccccgctcgcgttcccgatgcgattcccgcgggggtacggcgggatgaagaaggtcaaggcctggatggatgagttccaccgccttccctacatctcgccgtacgacgacgcgtcagggatcgaccctgagagcgacatttacgagaagaggaacatcggcttgctacatgagctacttgggctaacggtgcacaagatggtgcggaggaacgccatccggcttcttcgggaagagctgggcctgccacacaagttcactaggctgttcacgcggtaccctggagtgttctacctgtcgttgaagtgcaagacaacgactgtggtgcttcgtgaggggtacgagagaggtaagctcgtggagcagcatcccctggctgctgtgagggacaaggtgcattatgtgatgcgcactggagtgctgtaccgtggaaaaggtttgtccaagcttgttctggatgaggatgtcactgaggaagagggtgcactgaatggggaggaatttgaaggggagggaatggatggggatgctgatgtcgagtgcttcagaatggagattgtggatgacgatgggtctgctgatgatgtggatgatgaaggttatagtgatggttgacatggactgatgactcttgccttcttgatttatgttttgcatttgtggcttcagtcgtgaattacagtgactgttttttattcaacttattagtggcttcaattgagaagttcagcaagttattgtagattactgtgagtatcatgctctgctaatactttgatatatgctgcattcatatgcttaagaagcagcaaactaaactttatatgtgattattggttggagagctagagcatatgtttatggttccgt

SEQ ID NO: 98631 - DNA, 105 bp, Zea Mays
gctagttttctcaaagatccttctctttgaagtttttgttgtttgtgctactagtctcctaagaatggctaagatgacaggttatgcggtttgcatacagtatta

SEQ ID NO: 98632 - DNA, 2643 bp, Zea Mays
tttgtcctccactccacttcccctcttcacgagaggagagagagagagagagagagtgcgtgcgaatgcggagttactcggggactggtacgagcggagcaggggtgggcggtgggggaagcgagtggaagattgggagccaagagcacggagagtgccccgggatcttcacctcccatcattcgagggtggagtgctgtctgcgcagaaatctgctcaccgggtgccaggaaacaggtggctgtagagaattgcttggggattcgtcaagaaacgacccagtaggtggttgtgcacttgttatgctgagactgaatggaggctgtagacaagattgctgagcccaaagacccttttgtgctcactgcccagaaggttcagagctcggagccaccgatacctataaaggcgtcatgtgaagggaatgactcccaacagcaagaagagacggatttgccagatgatggcgaagagagcttccggagcatggattcctctgatgaaggtgtccggagctccttctctggggctagtcaccctccagagcctattgacatggatatcatgaagacagtctatgttgcaatcgacgagaagtccgagccaccggttagtttagtgcgaggagtctcggtgaaggggcctttcatagatgacctctcgatccgtgttacaggcgcaaaggcaaatctggtggtaggtgcaggcggtgctgaaggtatggctgaagagaggaaggtatctgcttctgcagtggcatcagtcaccacagcaaggtcgtctcaggctacctctttgcctcaggactcggaggagaaggagtgcgtctgggacgcttcactccctccgagtggcaatgttagccctcacagtagtattgacagcatgggtgtggtcactgctatgagcaccctcaacagctgcacgagcacatataaaagcgagaccatagctggtgaagcaatgctcaatgtggagaggaactgtgagagtgtaaagggtgttcgaggtgacttactagaaagtgcaaaaaccagcatgagtcgagcaagtgatagcagtgttgttagtgatgacagcagctggagccacatcactggaggtgccagcaagcctcacaaggggaatgatcctagatggaaggcaattcatgctgtacgaactcgtgatagcgtgcttggaatgagccattttagactactaaagcgtcttggttgtggtgacattggcagtgtttacctctcagaattaagtggaactcggtgctactttgcaatgaaggtaatggacaaggcatccttggcaagtaggaaaaagttaaatagggctcaaactgaaagggagattctacagcttcttgaccacccattcctcccaacgttgtatacacattttgaaaccgacaggttctcttgtttggtgatggaattctgtccaggtggtgatctgcatactttgcgacagagacaaccaggaaagcatttctctgagtatgctgcaaggttttatgccgcagaagtacttctagctctggagtatctacacatgttgggagtggtctatagagatctgaagcctgaaaatgttcttgtgcgcgatgatgggcacataatgctttcagactttgacctctcgctgagatgtgcagtctcacctacactcatcagaacatcagctttcgattctgatcccagaagagcaggtggttctttctgtgtacagcctgcttgcatagaacctacttcagcttgtatccagcctgcgtgcttcctccccaaattcttcggacagaagagcaagaagaagactcgaaaggcaaggtctgagttgggacataacgccggcaccctgcccgagcttgttgccgagccaacatcagctcggtcgatgtcatttgtcgggacccatgaatacttggcccctgaaatcatcaaaggcgaagggcacggaagcgctgtcgactggtggaccttcggcatcttcctgcatgagctgctgtacggcaagaccccgttcaaggggtcagggaaccgcgccaccctgttcaacgtggtaggccagcaactgaaatttccggagtcgccgtccacaagctactcgagcagagacctcatccgtgggctcttggtcaaggagccgcagagccgcctgggcgtgaagcggggagcgacagagataaagcagcatgccttcttcgagggtgtgaactgggctctcatccggtgcagcactcctcccgaggtcccgaggcctgttgaggccgagctgcctgtgaagtatggggtggcggaggcgatcgggagcaacagcaagcgggtagtcggagcagacgtgaagtcggccggaaaatacctggactttgagttcttttaagagcagtgcgtgcccagtggcagctattgtttgcgtactgtccgtgtatggtcggttttgatgtttgtgtgattcgatatggtgatttgtgcctcgccgtcgatgcacaattgtcaggtttgaatcgaccaaaattaggtaggtgtgtgttgccatttgcctgctttggcacatttcgagtttatgtatggaactatgtatagagtatgcattgcaatttgcagcaaacctgaaaagcagctaagaaggccctttcctccttgtttatgc

SEQ ID NO: 98633 - DNA, 2578 bp, Zea Mays
gtaatgtctaatccgatggattgaagcattgaacggcacttttcgtgtttgcacagtgtggagtttgtcctacttccgggagttgcttggcttggtggcgcccagaattagtctggaagcagggtggagtgctgtctgcgcagaaatctgctcaccgggtgccaggaaacaggtggctgtagagaattgcttggggattcgtcaagaaacgacccagtaggtggttgtgcacttgttatgctgagactgaatggaggctgtagacaagattgctgagcccaaagacccttttgtgctcactgcccagaaggttcagagctcggagccaccgatacctataaaggcgtcatgtgaagggaatgactcccaacagcaagaagagacggatttgccagatgatggcgaagagagcttccggagcatggattcctctgatgaaggtgtccggagctccttctctggggctagtcaccctccagagcctattgacatggatatcatgaagacagtctatgttgcaatcgacgagaagtccgagccaccggttagtttagtgcgaggagtctcggtgaaggggcctttcatagatgacctctcgatccgtgttacaggcgcaaaggcaaatctggtggtaggtgcaggcggtgctgaaggtatggctgaagagaggaaggtatctgcttctgcagtggcatcagtcaccacagcaaggtcgtctcaggctacctctttgcctcaggactcggaggagaaggagtgcgtctgggacgcttcactccctccgagtggcaatgttagccctcacagtagtattgacagcatgggtgtggtcactgctatgagcaccctcaacagctgcacgagcacatataaaagcgagaccatagctggtgaagcaatgctcaatgtggagaggaactgtgagagtgtaaagggtgttcgaggtgacttactagaaagtgcaaaaaccagcatgagtcgagcaagtgatagcagtgttgttagtgatgacagcagctggagccacatcactggaggtgccagcaagcctcacaaggggaatgatcctagatggaaggcaattcatgctgtacgaactcgtgatagcgtgcttggaatgagccattttagactactaaagcgtcttggttgtggtgacattggcagtgtttacctctcagaattaagtggaactcggtgctactttgcaatgaaggtaatggacaaggcatccttggcaagtaggaaaaagttaaatagggctcaaactgaaagggagattctacagcttcttgaccacccattcctcccaacgttgtatacacattttgaaaccgacaggttctcttgtttggtgatggaattctgtccaggtggtgatctgcatactttgcgacagagacaaccaggaaagcatttctctgagtatgctgcaaggttttatgccgcagaagtacttctagctctggagtatctacacatgttgggagtggtctatagagatctgaagcctgaaaatgttcttgtgcgcgatgatgggcacataatgctttcagactttgacctctcgctgagatgtgcagtctcacctacactcatcagaacatcagctttcgattctgatcccagaagagcaggtggttctttctgtgtacagcctgcttgcatagaacctacttcagcttgtatccagcctgcgtgcttcctccccaaattcttcggacagaagagcaagaagaagactcgaaaggcaaggtctgagttgggacataacgccggcaccctgcccgagcttgttgccgagccaacatcagctcggtcgatgtcatttgtcgggacccatgaatacttggcccctgaaatcatcaaaggcgaagggcacggaagcgctgtcgactggtggaccttcggcatcttcctgcatgagctgctgtacggcaagaccccgttcaaggggtcagggaaccgcgccaccctgttcaacgtggtaggccagcaactgaaatttccggagtcgccgtccacaagctactcgagcagagacctcatccgtgggctcttggtcaaggagccgcagagccgcctgggcgtgaagcggggagcgacagagataaagcagcatgccttcttcgagggtgtgaactgggctctcatccggtgcagcactcctcccgaggtcccgaggcctgttgaggccgagctgcctgtgaagtatggggtggcggaggcgatcgggagcaacagcaagcgggtagtcggagcagacgtgaagtcggccggaaaatacctggactttgagttcttttaagagcagtgcgtgcccagtggcagctattgtttgcgtactgtccgtgtatggtcggttttgatgtttgtgtgattcgatatggtgatttgtgcctcgccgtcgatgcacaattgtcaggtttgaatcgaccaaaattaggtaggtgtgtgttgccatttgcctgctttggcacatttcgagtttatgtatggaactatgtatagagtatgcattgcaatttgcagcaaacctgaaaagcagctaagaaggccctttcctccttgtttatgc

SEQ ID NO: 98634 - DNA, 948 bp, Zea Mays
ggcgaaattcgcaatattcattcatcatcagtaaccaaaatttcgactttttttttaaaaaaaatacactataaccgagagcgtctgaaaaatgggaacaaactagcaactgaagcgtactaacaaaaagcgcccgattcgcctcgcaaaatcgccgccgccatcacctacctactcacagaagttccgccttcctttcctccggcgcgcgccgcgcctgtcgccatggtgaagcgatggcttcccctcgaggccaaccccgacgtcatgaaccagttcatgtggggactgggggtccccgaggacgtggggttctgcgacgtgtacggcctcgatgacgagttgctcgccatggtgccccagccggtgctcgcggtcctacttctctacccccaggaccggagcaaggagtcccaagcttcagctacctcgtcggtggagaccaaggagcccagcaagaacgtatatttcacaaagcaaactgttgggaatgcctgtggcacagttggtattattcatgcactggggaatgctacttccagaatcaagttaggtgaggggtcatattttgatagattttataaacgaactgctgacatggatcctatccagcgtgctgcatttcttgaggaggacgaggaaatggagaatgctcattccattgccgctactgctggtgacacagaggtttataacatgtgcacagtacttagttctttgttcaagatttgtgggtgttattctttttgatgaaatgtatgcagttaattcttataatttttgttgtcagtgcttctcagaatcaaagtggtttccggttaccagtatctgagaactgactgctatcacttgtttactcatctggaaaagaacagtttgctgaccagctagagttacaggttcctagccagattgaaatctatatgctagtagtatatgcccctttac

SEQ ID NO: 98635 - DNA, 1313 bp, Zea Mays
ggcgaaattcgcaatattcattcatcatcagtaaccaaaatttcgactttttttttaaaaaaaatacactataaccgagagcgtctgaaaaatgggaacaaactagcaactgaagcgtactaacaaaaagcgcccgattcgcctcgcaaaatcgccgccgccatcacctacctactcacagaagttccgccttcctttcctccggcgcgcgccgcgcctgtcgccatggtgaagcgatggcttcccctcgaggccaaccccgacgtcatgaaccaggtacacccacccatcccctcatctgttctgagttttgatacctcacggctcgttcccactcggccccttggccttcctcgctcacggcgccctttcgttccctgcacgatcggtgtagttcatgtggggactgggggtccccgaggacgtggggttctgcgacgtgtacggcctcgatgacgagttgctcgccatggtgccccagccggtgctcgcggtcctacttctctacccccaggaccggagcaaggagtcccaagcttcagctacctcgtcggtggagaccaaggagcccagcaagaacgtatatttcacaaagcaaactgttgggaatgcctgtggcacagttggtattattcatgcactggggaatgctacttccagaatcaagtgaggggtcatattttgatagattttataaacgaactgctgacatggatcctatccagcgtgctgcatttcttgaggaggacgaggaaatggagaatgctcattccattgccgctactgctggtgacacagaggccaaggacggtgtaattgaacattacatttgtttctcttgtgtcgatggagagctttatgagcttgatggggggacatcacagccaataccccatgggccttccactcctgataccttgttgcaggatgctgcagaagttataaaagcaagaatcgccatgtattcacagtcaaacaacttcaatgtcatggctctttcaggcaaagcgatatagcattatagcactttcagtcataggcactcgatatcccacatttgctttgcagcagccttagtccaacactgcagtatgttctattgttttcttgccttcgttttattatttaaacacgttaaaacaagataaataaaagcgtggctacagaaaagttcccgttggtagtatcacttctcttaagagctaatgtgccgtttcgttcacacaaaatgtaatgtaacgtaaatggattcacgctggaataccggtggtaaagtttaaataagccggtatctatttctagtgttatattaa

SEQ ID NO: 98636 - DNA, 1200 bp, Zea Mays
ggcgaaattcgcaatattcattcatcatcagtaaccaaaatttcgactttttttttaaaaaaaatacactataaccgagagcgtctgaaaaatgggaacaaactagcaactgaagcgtactaacaaaaagcgcccgattcgcctcgcaaaatcgccgccgccatcacctacctactcacagaagttccgccttcctttcctccggcgcgcgccgcgcctgtcgccatggtgaagcgatggcttcccctcgaggccaaccccgacgtcatgaaccagttcatgtggggactgggggtccccgaggacgtggggttctgcgacgtgtacggcctcgatgacgagttgctcgccatggtgccccagccggtgctcgcggtcctacttctctacccccaggaccggagcaaggagtcccaagcttcagctacctcgtcggtggagaccaaggagcccagcaagaacgtatatttcacaaagcaaactgttgggaatgcctgtggcacagttggtattattcatgcactggggaatgctacttccagaatcaagttaggtgaggggtcatattttgatagattttataaacgaactgctgacatggatcctatccagcgtgctgcatttcttgaggaggacgaggaaatggagaatgctcattccattgccgctactgctggtgacacagaggccaaggacggtgtaattgaacattacatttgtttctcttgtgtcgatggagagctttatgagcttgatggggggacatcacagccaataccccatgggccttccactcctgataccttgttgcaggatgctgcagaagttataaaagcaagaatcgccatgtattcacagtcaaacaacttcaatgtcatggctctttcaggcaaagcgatatagcattatagcactttcagtcataggcactcgatatcccacatttgctttgcagcagccttagtccaacactgcagtatgttctattgttttcttgccttcgttttattatttaaacacgttaaaacaagataaataaaagcgtggctacagaaaagttcccgttggtagtatcacttctcttaagagctaatgtgccgtttcgttcacacaaaatgtaatgtaacgtaaatggattcacgctggaataccggtggtaaagtttaaataagccggtatctatttctagtgttatattaa

SEQ ID NO: 98637 - DNA, 1585 bp, Zea Mays
ggcgaaattcgcaatattcattcatcatcagtaaccaaaatttcgactttttttttaaaaaaaatacactataaccgagagcgtctgaaaaatgggaacaaactagcaactgaagcgtactaacaaaaagcgcccgattcgcctcgcaaaatcgccgccgccatcacctacctactcacagaagttccgccttcctttcctccggcgcgcgccgcgcctgtcgccatggtgaagcgatggcttcccctcgaggccaaccccgacgtcatgaaccagttcatgtggggactgggggtccccgaggacgtggggttctgcgacgtgtacggcctcgatgacgagttgctcgccatggtgccccagccggtgctcgcggtcctacttctctacccccaggaccggagcaaggagtcccaagcttcagctacctcgtcggtggagaccaaggagcccagcaagaacgtatatttcacaaagcaaactgttgggaatgcctgtggcacagttggtattattcatgcactggggaatgctacttccagaatcaagttaggtgaggggtcatattttgatagattttataaacgaactgctgacatggatcctatccagcgtgctgcatttcttgaggaggacgaggaaatggagaatgctcattccattgccgctactgctggtgacacagagtgcttctcagaatcaaagtggtttccggttaccagtatctgagaactgactgctatcacttgtttactcatctggaaaagaacagtttgctgaccagctagagttacaggttcctagccagattgaaatctatatgctagtagtatatgcccctttactccttccgttgcatttgtgtgcctgaatatctgagattcatgttgaattttgttggtcatgtgtcattgtaagtgaggattggacgtgtcaattcacagtatcagctgtaacagtcgatattaaagaactgtatcagctgtaacaagtcaattagttgaaactatggtctgagcttatcttatctttgattaccatcagtgctcatggatcctatattattatgcaggccaaggacggtgtaattgaacattacatttgtttctcttgtgtcgatggagagctttatgagcttgatggggggacatcacagccaataccccatgggccttccactcctgataccttgttgcaggatgctgcagaagttataaaagcaagaatcgccatgtattcacagtcaaacaacttcaatgtcatggctctttcaggcaaagcgatatagcattatagcactttcagtcataggcactcgatatcccacatttgctttgcagcagccttagtccaacactgcagtatgttctattgttttcttgccttcgttttattatttaaacacgttaaaacaagataaataaaagcgtggctacagaaaagttcccgttggtagtatcacttctcttaagagctaatgtgccgtttcgttcacacaaaatgtaatgtaacgtaaatggattcacgctggaataccggtggtaaagtttaaataagccggtatctatttctagtgttatattaa

SEQ ID NO: 98638 - DNA, 871 bp, Zea Mays
ttaagctcatttttcttatcgttcaaaccagaacattcacattctacataggcaacaaaagttacagcttagctatgaagtacatcgaccctgtcaaacgggaaggtttggtgtattagatactgatcctaggccgctatttagaaacaaagattaatttaagcagaaaatcaaaaataaactttgggttattatggaactgattgataccacctgcgctttacttcagttttcgaccgaacctccctgagcctcccatcggttccatagtctctctccatcaccaggttgataccttcttcggagtaccacccaactccgatacagagtatgccgtcttcgctgatgtcaacataggcagtgacgccaccaggtaaccaaagcacggtgacatcctgcacgtcgagcatctcctcctccccaaagaaaactgaactctctggcaggtttctcttcttcaccgtctccatgcacaagtagaccaatggagaaccgccctctagttcttgcactttatcactgaaaattggcgttgcactgacttcgtatactttccaggagcctgtcagttctgacggtttggtccggcttctttgagagaatggtttaaggtcaacaagtgcttactcttcaacatggatatttgctgggctggcccatttttcttcatacacagcaacccttacaatttgtatgttagctcctccttcgttaaactcaattgtatgcacaatccgcaatcttttgtggcaacctttaacaaggcactgtatagaaatgggtgtaagctatcaattggtaaaccagagtgccaggcacacaggcagcatcaagaaacaagaatcacagtcatctagacacaaaacaggag

SEQ ID NO: 98639 - DNA, 1089 bp, Zea Mays
cactagagctctctcactgcactccactgctcaggtcgggaacgcagaggcgggggcaacaagaaggccgggcgagaagacaagaggaagccaaaaggagaacgagttcggaagggagcggatggcaatggctctgctccagctattgctgtcgctcctcatcgtctcctgcgccgcgcagtcgccgtacgcgtcgaaggctcctccgctcagcgcctcggcgccggggggctctgtcgcgccaccgacaacggcggtctcggcgccgcaggcgtctgcacagccgccgacaacagtcgccgcgtctgggcctcaggcctcggccgcagcaccaacaaaagcagccttggcgccacaggcctctgctgcgccgccaactacagctgcctcgccgcagctggctgccacgttggccccggtttcctcaccgccactagctgccgctgcgccacctgcatccgctacccctccaaccacgccaccatcggcaacgcagacgcagcctccagtcgcctccccgcccacggcaatgccaccagcggcggcgctccccccggccacgctccctccagcgatggctccgacgccacttctcgccgcccccgtcatgcctcccgccgccccaccggccacggcgcccgcgccggcccccgtgtctccggctccaactccaagcgtcgccccgaccccgtcgccgacagaagcccccgccccgtcgcccacaacagaggccccggtcccgaccccgtctcccgcgctggcgccgctcagctcggtgtcggtgagcccgtctctgtcgcctggacccgctctcgcccaggatgagtcggcggcgccgggctcgcgcaccgccgtcgccgctctggtgtccttggtggcggccgggctcgtcgtcttgttttaagtagagctgcgttaaccgttacacgcccataccgttcctcatacgcagggacgtgttctcctgtttgtgttttatggatgcacggatcattcttgttgtacaacacgttggtaatttgtttccattcattcatgtatggctgacggcctgcgcctgcgcctgcctgctgctttcttttgcaaaca

SEQ ID NO: 98640 - DNA, 2279 bp, Zea Mays
atagacactggatgtctggatggcatagcgctaaatttgagaccggcaaaatagcaatttttccccctgtgagcccgcgacgcagcgcgaggtgcggccccgtcccctcgccaccggaggagcaggacgacgaggtggcgccggcgcgaggtagtcgcgcgcctggaagagcggcggcatcagagtcgcaggcggaggcgaggaagtgaggggagagccctatagccaccgccgcggggcgtcctgctcgctgcacgcactcccaccattttgtcccaactcgaagctcagactcgtgctgtcgtgcacttcccctcccctagcatcccaagctcctcactgagaaaacaggagatgggaagagacggggaacagactaggcgccggagccgcaagagatcccgcgacgcctccccctcctcgtcggattccgattccttcgactccccatcctctccgagcagtagccctgagcgacggagccgcagcagtaagcggaatagatcatcctcatcgcaccgccacagccgcaagaaaagcgaccggtcgcggagatcccgcgacgaggaccgccggcggcggagaagacggggccaggagagaaagcggcacggtggggatggtggcaggtcctccgactcccaatcgtcggaggaggatagggcggaggaggcgcgggagatcgtccgagatatactcatcgaattgccggccatagccgaagagcttcgccagcttctccaaattatagacagtggtgaaagcattgatatttctggaatttctgacaaactattggtgaagcgcttgaagaaacttttccgatctctgagattgaaagaaagtgcaagtggggcttacttgttgccttcaaaaaatgttcctacgcttgatattgttggatcattactattagcaagttccaaacttgcagacaacaaaagtggaaagccagtgtcaccaaatagagaagcactacaacaggctaactttgatgtgcaaaataaagataaagattatattgtttccgaagagccaaaaattgttgatgtggaagaggaacctcctaaaagaaggataattggtcctgcaatgccatctcgtgaattattggctgcagcagctgaaatgacagaggctcttaggtgccggccctccaccgcctgccgtagttgctgaagctgcatctgcaaatgaagctgagcgatttgaagaggttactagaatattggcagctgacacaaattcaccttatgaggttttgggggtaaattggaagatgtcaactgataacatgaagaaaaggtattggaagttgtctcttttagtgcacccggacaaatgtccacatccttccgcacaagaggcattcgtgaaattaaataatgccttcaaagacttacaagaccctgataagagaggtgcaatagacgagaagataaaaaagaaagaggagatggaacaatttgaggttgagcttaaagcaatgcgtgaggctgcggaatggagacgaatacaaggtgtatcactcgcaggtgatgatgaacttttagcaggtccaaaagagtcacagagacctacgagagatgaatggatgaccacattgccacctgagagaaaagcaggagtgccaatgcattcaactacatcatttagtatgaatggtaaagaaggacgtggagacacaagtgtctggactgatacccctcttgatagagcacaaaaagcacaacaaagctatctagaagcctacaataagacaaaggcaattgcagaaggcgacgacgtgaagagcaagaacccggatgcttcaatcgtagataaatacaacacctccaaacgatcagtgtcccttgtgcagaagcaccgagagagtaaaaaggagaaaaagaagcaaaagcagcaggagaaagaggaatgggagggaagccacccatggaagccatgggaccgggagaaggatctgtctgctgggcgccagaatgtggccttagacgcagagaacatgtcgcaaggattatcttcccgtttcgcatctggtgctgttcagcggaacttcctgtgagctgtgtggaaagatactcctggagcttggtctaatcgatgattaatgtccagttattacatcctggtcggcagatggcaaagataatgctgacatataaaaacgagttatgttaccaaggaccatcgtcctgtaatatcgatcgtgcttgttgtgcttattttctcagtgtattatcgggtgagctaaaatggtgccatagtttgttcgtacg

SEQ ID NO: 98641 - DNA, 2339 bp, Zea Mays
atagacactggatgtctggatggcatagcgctaaatttgagaccggcaaaatagcaatttttccccctgtgagcccgcgacgcagcgcgaggtgcggccccgtcccctcgccaccggaggagcaggacgacgaggtggcgccggcgcgaggtagtcgcgcgcctggaagagcggcggcatcagagtcgcaggcggaggcgaggaagtgaggggagagccctatagccaccgccgcggggcgtcctgctcgctgcacgcactcccaccattttgtcccaactcgaagctcagactcgtgctgtcgtgcacttcccctcccctagcatcccaagctcctcactgagaaaacaggagatgggaagagacggggaacagactaggcgccggagccgcaagagatcccgcgacgcctccccctcctcgtcggattccgattccttcgactccccatcctctccgagcagtagccctgagcgacggagccgcagcagtaagcggaatagatcatcctcatcgcaccgccacagccgcaagaaaagcgaccggtcgcggagatcccgcgacgaggaccgccggcggcggagaagacggggccaggagagaaagcggcacggtggggatggtggcaggtcctccgactcccaatcgtcggaggaggatagggcggaggaggcgcgggagatcgtccgagatatactcatcgaattgccggccatagccgaagagcttcgccagcttctccaaattatagacagtggtgaaagcattgatatttctggaatttctgacaaactattggtgaagcgcttgaagaaacttttccgatctctgagattgaaagaaagtgcaagtggggcttacttgttgccttcaaaaaatgttcctacgcttgatattgttggatcattactattagcaagttccaaacttgcagacaacaaaagtggaaagccagtgtcaccaaatagagaagcactacaacaggctaactttgatgtgcaaaataaagataaagattatattgtttccgaagagccaaaaattgttgatgtggaagaggaacctcctaaaagaaggataattggtcctgcaatgccatctcgtgaattattggctgcagcagctgaaatgacagaggctcttaggtgccgggatgctgaactggaagccaatgatgatttgctcataggccctccaccgcctgccgtagttgctgaagctgcatctgcaaatgaagctgagcgatttgaagaggttactagaatattggcagctgacacaaattcaccttatgaggttttgggggtaaattggaagatgtcaactgataacatgaagaaaaggtattggaagttgtctcttttagtgcacccggacaaatgtccacatccttccgcacaagaggcattcgtgaaattaaataatgccttcaaagacttacaagaccctgataagagaggtgcaatagacgagaagataaaaaagaaagaggagatggaacaatttgaggttgagcttaaagcaatgcgtgaggctgcggaatggagacgaatacaaggtgtatcactcgcaggtgatgatgaacttttagcaggtccaaaagagtcacagagacctacgagagatgaatggatgaccacattgccacctgagagaaaagcaggagtgccaatgcattcaactacatcatttagtatgaatggtaaagaaggacgtggagacacaagtgtctggactgatacccctcttgatagagcacaaaaagcacaacaaagctatctagaagcctacaataagacaaaggcaattgcagaaggcgacgacgtgaagagcaagaacccggatgcttcaatcgtagataaatacaacacctccaaacgatcagtgtcccttgtgcagaagcaccgagagagtaaaaaggagaaaaagaagcaaaagcagcaggagaaagaggaatgggagggaagccacccatggaagccatgggaccgggagaaggatctgtctgctgggcgccagaatgtggccttagacgcagagaacatgtcgcaaggattatcttcccgtttcgcatctggtgctgttcagcggaacttcctgtgagctgtgtggaaagatactcctggagcttggtctaatcgatgattaatgtccagttattacatcctggtcggcagatggcaaagataatgctgacatataaaaacgagttatgttaccaaggaccatcgtcctgtaatatcgatcgtgcttgttgtgcttattttctcagtgtattatcgggtgagctaaaatggtgccatagtttgttcgtacgatacaattactttttttttcaa

SEQ ID NO: 98642 - DNA, 2034 bp, Zea Mays
ctacactggagctctctctcaatcagcatgccgcgcgtccacgaccgcccaccgccacccatgactcctctgccgctccacctccaccacctccttctcgcgctacttgcagcatcagccgcgcaggccaccgaccccagcggctgcggcgggggcgaggaccgctgcggcgacctcgtcctcccgtaccctttccatctcaactcttcgtgtgccagcgccggaggcgccaactcctccctcttccgcctctcctgcaacgccagcggcagcgccaccctcaccctcgcgctcggctccgccacattccgggtcctcgccttcctgccctcagggtcgctcctcctcgactacgccccagctgcgtcgaagtccccgtgcgacgcggcctacgccgccttctcgcgcccttcctcgccggcgaccgcgctcgacgccgcgcccttcctggccgtgacgccggccaacgtgctccgcctctacgcctgcgaggactcctccctctgccgcgccggctgcgacgacgtcgcgacctgcggcggcaggtctgggtgctgctacccgctctcggacggcagcgtctggaagcccgggaacggactgggcgttttcgctgactacgggtgccggggcttctcgagctgggtcaggaaccggtcgtcggcggcggcgggggcggcacgcggggtcgtgagaggggtcgaggtcgagtgggccgtgccgaggggcagcgccatggcgaaatgcgcggatggcgcggcgctcgtgaatgccacggcgctgcacgacggcgtgcggtgcgcgtgcgcggcgggcctcgtcggggacggcttcgcgcagggcactggctgcaccaaaggcacctcctgcagcaatggtggtggtgagcatgcaagtgacggcagggattgttgccagggacggttctgctccaggaaggcagtcgtccttgctggatttttcgtttcgctcttcttcctggcggcggcggtctcgttctggctcttcctgaggcagccttcaaaggaaagccgccggtgggacctcgacccggcgtgcatccccaagatcctgcggagcgtgtgcgacgcgaggcagttcacgtacgagcagctggaggaagcgacgaggagggtcgacggcgagaaggccgtggacaccgccgacgacggcgcggtccacgccggcgtgctcgacgacgggtccctggtggcggtgcagaggatcggctacgagacgcaggggaggctgaggctggtcctggaccggatggagctcctgtcggagatctcgcacccgagcatcgcgcgcgtcgtgggcttctgcctcgactccagcagcaacgcgctgctgctggtgcacgagcacttcgcggggggcacgctggaggagcacctgcgccaggtgaggcgccgcgtcgtcctcagctggtaccaccgggtcaacatcgccatcgagctcgccagcgcgctcacgtacctgcaggcgcacgaggcggccccgaccttcctgcacgacctcaggtccagcgacatcttcctggacgccggcttcaccgccaagatcgccggctacaagctcacgggcccgggcccggcgacggcgtgctgctccgccgccgcgtcgtcgtgtgagcaggacgtcgtgtgcaacttcggccacctcttggtcgagctgctgacggggctgaggcagcaggtcccgctggactcggtggcgcccaaggtgagggaagggcgggtccacgaggtcatcgacccgacgcttctgtcgtcgggtggtgggaatgggaagcagctcccggcctcgcacgacgaggtgaggaaggtgttcgagctcgccgtccgctgcctgtcctgcgccgagaccggcctgtgcatgctcgccgtcgccaaggagctgatgcacattctgagggacaacaacgggagcagcagcaagatcgagatctccctcgaggagacgttctctagctccagcctgctgcagatgatctccatgtcgccggagacactgcaccaccatcttccttaa

SEQ ID NO: 98643 - DNA, 3078 bp, Zea Mays
atggagcgaggacggggtggtagtggcggtcgcggtggcggccgcacgtttcagaggaacaatgcgggggaggagtggcccaacctcgtcggcgtggtgctgtcgtggagcctagcggatgtcatgaacaaggacctcttcaaggacaaggtcaagcagataccgtccacgttccccaacctcaagagctacctggagtgctacacctctccattgctggaggagctgagagctgagatgtcgtccagcctggaatccctgtcaaccgtgccttctgtcaggatctcacggatagaagaaaagagagacaaacacgaaatttatctggcttctgattgccaggttgctaagccacacaatcgccctgaatgctacactccaagtgtcggtgatgtaattctcttgtccgatgtgaagccgggccacatttctgatactactcgcaacggaaggccgtaccgagttgcctttgtcacagatgcggatggaggggatgaatacgacgactcaccaccggctaagtatggcatcgtagcgtcaggcaaaatcgatgccgccgatgacgaacgccaagatggtaaaagtacctcactttttgctgcttgtctgctcaacattgtgacatacatccggatatggcgttgccttgattatgaagcactcagaacaaaccgaggccttatagagaagatggtaaactatcagccgatttcatctacttcagagaacagcacggaggatgctggtccaactgacagcgtggagatatggaccaagttgtctgcaatggaacttaacacttctcagaacgatgctgtcttgaactgcatttccaaaatgcactccaagagcagcacatttacccttatctggggtcctcctggcacagggaagacaaaaacaatcagtgtgctgctttggttaatgagagaaatgaagcatggtacgctcgtatgcgcaccaacaaaccttgccatcaaacaggttgcttcacgtttcttgaagctggtccaagagcactctggcgacacaaggtgcttgggagatgtcctattgattggcaacaaagagcgcatgtgtgttgatggtgacctcaaacaaatatatttatatgaccgtgtaaggaggctttttggctgctttgcaccattgaccggatggaaacatcacctatcttccctgtctgattttcttgagaatggctactcacagtacctccaacatctacaagacagtcaggaaggtgatacgccttcctttttctcttacgccagaaaaagatttgccgttatttatatggagctcagaagatgtttcaatgatttgttgttacatgtcccaaaatccagtattctggaagtgaattacaacagtatccttttacttcttgaaatgcttgaagagttcaaccacatgattcagtgcaggtattttggggatgaaattaggaaagttttcttgtacagtaatgatgaacctgatcagacaaactcgagtgtagtcactcttggcaaaatgaggataaaatgccttgaggaactgagcactctgttaagttgcttgaagcttcctctaacatcctcaaagcctaccattcgtgatttctgcattaaaagcgcttccatagttttctgtactgtatctagctccacaaaaataaccgctaacaaaaaggtagagtttcttgtggttgatgaggctgcccagctgaaagaatgtgaaacactgatccctttgcgtctgtggaccttaaagcatgctgttctaattggtgatgagtgccaattaccagcaacagtcaaaagcaaggtttgcactgatgcattatttggaagaagcctctttgaaaggttgagttcacttggacacgaaaagcatctacttaatatgcaatacagaatgcatccttccattagtattttcccgaacactagcttttatgaagggaggatctcagatgccactaatgtcatggaaaaagaacaccgaaggatgtatcttccaggttctatgtttggtccttactcatttataaatattgaagatggaagggaggaacgtgatgaacttggccatagcaaaagaaactttgtagaagctgctgtcattgaagaaatattataccgtctccgaagagcttgctttaaaaccaaaaggaaagtcacggttggtgtcatatgcccatacaatgctcaagttgtagcaatccaagggaaaatagagaaaatgaggttcgacccattgcaagtaaaaactaattctgtcgatggctttcaaggtggtgaagaagacatcatcattttatcaactgtgaggtcaaactcggttgggaaggtaggttttctttcaaacgcacagcgggcaaatgtgtgtttgacacgggcaagacattgcctttggatcctaggaaatgcaacaactctagcaagcagtggatctatttggtctgatctagttcgtgatgcaaaggataggcggtgtttcttcaatgccagtagcgactatgttatctctcacgtgattgctaagcaaaggagagatctcgacagagttaatgttgaaaagagcatccatatctcaagttccaaaaactgcagggtttgggttgaaacgcgatccccaaatgacctgaatgaacagggcacttcttcgacgagtgtttcacattacgctggaatcccgtcaagtgacattgttgttgtttctgaattccagcgtccaagcaataaaaatgaggatgtcgaggatataactgtcattccaaataaagagaatgataaggatatcaatgctatgcccgttattccagataaagggaatgtcgttgatggcaaccatatcctcgccattccttgcgccatgttgagtaatctagctagatggtgtatccgttcgttccgatcttaattgttcctttatgtctcctatccctttttactcctaagtttacagcattatatataagtgtctctccataacatggtcggatgtttgatttttgtaatgtgggtttgaataatgaaaatgtatgtttgggcctttttagcctcccttgactgttgagagaaaaaaaagcta

SEQ ID NO: 98644 - DNA, 593 bp, Zea Mays
tattttagctgtgtaggcatgacaaattcacgtctacaaacttgtaatcgtttcggcagaaaaaaaatgaaaataattgttgatcgtttcaataactcataaacttgattttcattcaggttgaaacgcgatccccaaatgacctgaatgaacagggcacttcttcgacgagtgtttcacattacgctggaatcccgtcaagtgacattgttgttgtttctgaattccagcgtccaagcaataaaaatgaggatgtcgaggatataactgtcattccaaataaagagaatgataaggatatcaatgctatgcccgttattccagataaagggaatgtcgttgatggcaaccatatcctcgccattccttgcgccatgttgagtaatctagctagatggtgtatccgttcgttccgatcttaattgttcctttatgtctcctatccctttttactcctaagtttacagcattatatataagtgtctctccataacatggtcggatgtttgatttttgtaatgtgggtttgaataatgaaaatgtatgtttgggcctttttagcctcccttgactgttgagagaaaaaaaagcta

SEQ ID NO: 98645 - DNA, 549 bp, Zea Mays
gcaatccgtgtgttcattgcttgctatgtctggatgactggatttgggaatttctcatattactatatcaagaaagattttagtattgcaagatttgctcagatgatgtggaggttaaatttctttgtggcattctgttgcattgtccttgacaatgatctcatgctctattatatatgcccaatgcacacactatttactcttatggtatatggatcacttggtctgtttaacaaatacaatgaggtaccatcaatcatggctattaagattgcttgctgcttcttgtctgtaattttgatatgggaaatccctggggtatttgaattattgtgggccccttttacgtttctgctaggctataaagatccatcaccatccaaggcacacttacccgtgctacatgagtggcatttctgatctggcctcgatcgatacatatggattattggaatgatttatgcttacttccatcctaatgtaagtatttcagatatggacctatattaccctgatcaccctctgagattgtatctgcgagatgttatt

SEQ ID NO: 98646 - DNA, 1207 bp, Zea Mays
gctgaaaggacaacacttgcagagttccgcctctcggaacctcactccttcctctcccagtccccagcttcaccgaggcatacggcataccataccggcaccggcagcgagcagtcgggagccatggctccgccgctcctgctcttcttcctcctcctccccctcctcacggccctcgctgacggacaccagcacctgtcctcctacggctcctccgcgctctccgattggcgccccgccaaggcatcctactacgccgccgaccccgaagacgccatcggtggggcgtgcgggttcggggatctggggaaacacggctacgggatggcgacggtggggctgagcacggcgctgtttgagcgcggtgcggcgtgcggcggctgctacgaggtcaagtgcgtcgaggacctcaagtactgcctccccggcacctccatcgtcgtcacggcaaccaacttctgcgccccaaactacggccttcccgccgacgccggcggccactgcaacccgcccaaccaccatttcctcctacccatccagtcgtttgagaagatcgcgctctggaaggccggcatcatgcccatccagtaccgccgtgttaagtgcctccgcgaaggtggtgtcaggttctccgtcaacggtcggcacttcttcttcacagtcctaatcagcaacgttggtggcgcgggtgatgttaggtctgtgaagatcaaaggaacggagctaggatggctccctatgggccgcaactggggccaggtgtggcacatcaactgtgacatgaggggacagcctctatcgtttgagctcagctcaagcgatagcaagacgctgaccagtttcaacgtcgtgcccaaggattgggagttcggcaagacatacacggggaagcagtttcttctgtagagaatggagtgccgcaagatcagcttacagttcctcatttttcttctgatcctacgagttgggctgtggtgtatgtatattcctctgcagaagaagcaatatcgttattaggagaaaatcacttagtgcagggctcagatagttactatggctcataacgccttttcatgtacccttcatagttgtctaaagaggcttgatgtatcattcaaaataggaggccggattcgggtatgtccggtgtattacaatatattttttttcctggcaagcaatgataaaatgtctctccatttctgta

SEQ ID NO: 98647 - DNA, 952 bp, Zea Mays
aaaaaaactatacaactgaaaacagttcaaaaccctcggccgaatagtaaggcaaagccgcaaaggcttatccttccgagtttccaccctttacaatggcgagcgctcccgccggctttgcccccaccgtcgctgcttccacaagcttcggcttcagccgcttcactatcgtggcatgccccttcccctcgcgcactcatcttccagcggcctcctccgttggggttcgcaatcagcagcgcgcgtccactgccaccgcctgcctgccgccgccgaatacctcccatggcgccgccaccaggctgtacgtcagcggtaggcgctccgatctcagacttcgctcctagatttggtaatcctatgctaggcgccccgactcagcgcactctcttggctcctagatttggtaatcctaccgtgcattttagggcttcgagccaacgatttcctgacgaaattcggaaaaaatcttcaggacaaatcttaaagcactcgttctgacggttcccttcctcttcctcgaacaggtctttcgttccgcacaaccgaacggagcctccgggacgcgttcgagaagtttggtgaccttacggaaggtgacagagcccgagatgagcgaatgtctgtgttttaaattcagaattattgaaaatttgctccgtgcttgctactccagtttgtctcgtgatggatagagtagcgaagcgaccgagaggtttcgctttcctttcttacaccggggaggaggaagccaggggcgccatggaagggatgcacgggaaggtgaaagatgtccagatcgtcggatgctcgtgtgatagatagtctgtgcttgtagcttacgttctatcttctgcagttcctggatggcagagtgatctttgtcgaggttgcgaaacgaagagctgaagcctgaaggatcgcgcccaaatattgctaaaaaaaaacttga

SEQ ID NO: 98648 - DNA, 1660 bp, Zea Mays
aaaaaaactatacaactgaaaacagttcaaaaccctcggccgaatagtaaggcaaagccgcaaaggcttatccttccgagtttccaccctttacaatggcgagcgctcccgccggctttgcccccaccgtcgctgcttccacaagcttcggcttcagccgcttcactatcgtggcatgccccttcccctcgcgcactcatcttccagcggcctcctccgttggggttcgcaatcagcagcgcgcgtccactgccaccgcctgcctgccgccgccgaatacctcccatggcgccgccaccaggctgtacgtcagcggtctttcgttccgcacaaccgaacggagcctccgggacgcgttcgagaagtttggtgaccttacggaaggtgacagagcccgagatgagcgaatgtctgtgttttaaattcagaattattgaaaatttgctccgtgcttgctactccagtttgtctcgtgatggatagagtagcgaagcgaccgagaggtttcgctttcctttcttacaccggggaggaggaagccaggggcgccatggaagggatgcacgggaaggtgaaagatgtccagatcgtcggatgctcgtgtgatagatagtctgtgcttgtagcttacgttctatcttctgcagttcctggatggcagagtgatctttgtcgaggttgcgaaacgaagagctgaagcctgaaggatcgcgcccaaatattgctaaaaaaaaacttgattgttggttccagcaaagtccctgatgagacacacattgatgcaggcaaggtttaggtgaagtttagatgtgaacagaggaaccgaagaaaccttagggcttgtttgggtaaccttggattagaatggattgagggggtataaggtgtattgaagtgtaatatgaactaatttctctttcaatccctaaaatacacttcaatccacttcaatccctctttatccaaacaaggccttagcaacattcggtcgtgtagctgttgtcatttcattgttttacaaaacaacattcgtaatttacatatataggtcatacaatatggtctcctactacaactattacactgcttgctgcattgtcttgaactatacaaatgacagacaggaaccacagccagtcagtcacctccatcccttttgtggaaggctgcttcaccagtgtcaatctgcctctcataagtaacagcagaacgcctgaatggccgtcctgcaaaacatcagcactgctgtactgtacagtcatacgtcttcaatatcagcaaaaaaatatatatatccagagcagcggtggctggcgagggcgcaaaaattttacaggcacagccttgtcatctctctatctgcctccccaggtgcctctgactgcagcagcatcttgctctgaggcgtgcgcttgcacggtgcaaaacctcgaaggcagtctggaactacgctcgcgcatttccttgaacctggaacaggtgccactttgtctccgtcgttgtttactttcgtggattctacagaatctgaattctgagctgtttcaaccacgctgctggaggaggttgtgacggacggctccgtccacgatccttgtgccctcgtgacctcgcagtctgctgcggcttgagacggttggttgtcctgctgcttgtttga

SEQ ID NO: 98649 - DNA, 2870 bp, Zea Mays
gccgaaaccaaggcggtaggaggaggacgaaggccgctgcggaccttcgtctcaccctcgctgcaccttccttccccccctaccggcccaccccacgccgcgattaattaagcgcgcaccggacctgagtacctgacctcacgcatccatcgaccaaaacggcagctccttttctcccgcggcgttgccgtcgcactcgcacgcacgcactcaccgccggcctgagcctaatcctaatcctaatcctaatccacataccgggacaatccagacgaacgagcgaaccaacgcacggacggccaccagccgctgcgtgcgttcgctttcccccgaaacgtgacccgagccgagctgcagagagagaaaggagaagccgccatgaagcagcagcagctgcagctgcctcctagtcgtcaacgttaaatccctgctcgccaagccactactacgactacgagcaccagccccagtttttctcctctcgcccccgttccccgtcccgactcccgacccaacccatatcagaggttccgtccgttggtggcgctggcgttcccgtgagtcggcccgcgcgcgaaggcggccgtgaccgaccgtccggagcttcatgcgccaggggcggcggctccaccccgtcgtttgatgggcaacgcatgcggcggcgcccttagatccaagtaccagcacagcttcaagcacgccgcgtcgtcgcagcgccgcgcctcctccgagtacagcgccagcgccgtggccgacgactcgcccaggaagcccacgcagccgcccgccaccacggacgcccacgcgccgccaccgccgcccgccaccgccgcagccgccatgaggcgcggcggggccggcgcgccgccggacctggggtccgtgctcggccaccccacccccaacctccgcgacctctacgcgctcggcaggaagctcgggcaggggcagttcggcaccaccttcctctgcaccgagctcgccacgggggtcgactacgcctgcaagtccatctccaagcgcaagctcatcaccagggaggacgtcgacgacgtgcgccgcgagatccagatcatgcaccacctctccggccacaccaacgtcgtcgccatcaagggcgcctacgaggaccagctctacgtccacatcgtcatggagctctgcgccgggggcgagctcttcgaccggatcatacagcgcggccactacagcgagcgcaaggccgccgagctcaccaggatcatcgtcggcgtcgtcgaggcctgccactcgctcggggtcatgcaccgcgacctcaagcccgagaacttcctgctcgtcaacaaggacgacgacctctcgctcaaggccatcgatttcggactctctgtcttcttcaagcctggtcaagttttcaccgatgttgttggtagcccatattatgtagctccagaagttttgttgaaaaattatggaccagcagctgatgtatggacagctggcgtcattctttacattctactaagtggcgtgcctccgttttgggcagaaacacaacaaggaatatttgatgctgtattgaaaggtgtcattgattttgattctgatccgtggcctgtcatatctgatagtgcaaaagatcttataagacggatgctgaatcctcgctctgccaagcgcttaacagcacatgaagttctatgccatccatggattcgtgatcatggagtagctcctgaccgtccactggatccagctgtcttatctcgcattaagcaattctctgcaatgaataagttgaagaaaatggctttgcgagtaatagctgagagcctatcagaagaggaaattgcggggttgaaggaaatgttccagaccatggacactgacaacagtggcgcaattacctacgatgaactaaaagaaggattgagaaaatatggttccacactgaaggacactgagattcgtgatcttatggatgcagctgatatcgacaacaatggaacaattgactacattgaattcatcgctgcaactttgcatctcaataagctggagcgcgaagaacatctcgtggcggccttttcatatttcgacaaagatggtagtggctatatcacagtggatgaactacagcaagcttgcaaagagcataacatgccggatgcttttcttgatgatgtcatcaacgaagctgatcaggataacgatggccgcattgactatggagagtttgttgccatgatgaccaagggcaatatgggagtcggtcgacggacaatgagaaacagcttgaatatcagcatgagggacgcacctggtgcattctgaaacttaacacgatgtacagcttgtggcctagtcacttcggccctgtttgtttcggcttctggcagcttctggccaccaaaagctgctgcggactgccaaacgctcagcttttcagccagcttctataaaattcgttgcggcaaaaaccatccaaaatcaacataaacacataatcggttgagtcgttgtaatagtaggaatccgtcactttctagatcctgagccctataaacaactttatcttcctccacacgtaatcgtaatgatactcagattcttcccacagccagattttcagaaaagctggtcagaaaaaagccgaaacaaacagggccaactgtcttgtcttgctgccctaccaaaccttctgcaaaattttttttcaagatgtttgtcaggtgtatgtgtggatgtgttttttctgattcaactcttgtgattgattccatgaaatgcataacaagatgtccatgccatgcgtgaaagtgaagccgattgtaaatgacggcgctgcccctgcttgactctcagaaacacaaacacccatgttctgaact

SEQ ID NO: 98650 - DNA, 1119 bp, Zea Mays
taaagagtctattggagatgctcttgttgtaagaatatattggagacaagtggaagggaacccacacacaggaaaacgtatgtgccatagatcttgagttcttgacgacgcccacttgcaaacttggcttgtggagttgtggtagagcagagatcgttttgaaacctcacatgggaaacaaattcccagatcatgcaccggctttacaaagaacaaacaggtgtacaatcaacgctaaaacacactcttcataccctgcacgggccaaggatcaaagcgagtggtcccttcgcccccggccgggtgccgttgcgccgatagacggtagcatcgtcccatcggcggtgctcaggcaggacaacagcgacggagaaatcgacgtcctgtgtcccgccggctccatcgacgtttcttcatgtgcagaaatcttgttgacacacaactgcacaagaggatgtcttgtactagtcatcaggactccgttcaggtcgccacggataccttcatggactcctggtgcctggactccgttctggaggagtgctgctgctgcctccgtgcggcggacctggcggcctgctgcctggcgcggatggcgtcgagctgcatctgctcgtcgcggcactcctcgctgcagaagggcgtgtcccctctgtacatgaagatgtcgcagtcgcgtcccagcggcttggcgcagagcgcgcaggcgtccagcgtgggcagcaggctgggctcgcagtccggctcggcgtcgaagaagaaggcggaggccatggcgcgcgtgtatatataggcctgggtgtggctgttgtgtcctctggcttactggctaggctaggaaggacggcctgatgccttgagcagttgaggagctaagcaaagctttgcctgttgggctgttgctgctgcggcctgcgggtggtcggagagtcggaggaggacgaggtgaggtgaggtgagcaggcggtcgccgcggggcgcttatatggcggacgaggacgggcggggcaacgcgggcgcctggaaaagaaacagggtcggacacgggcgggacggcccacggcccacgggtagggcaataccgcccgccggacgggcggagccaccgaacctggacag

SEQ ID NO: 98651 - DNA, 1464 bp, Zea Mays
atggatatcatgcagactagtgactcttcacatcatggaattgtagaaaatagcccgtacagaattccatatgacagacatgcagaaggtggtcaacttggtgcttcatggtattttagtagaaaagaaatagaggagaattccctttcgaggagagacggcattgatctgaagaaagagtcttatcttcgcaagtcatattgcacatttctgcaggatttggggatgagacttaaagtacctcaagtgacaattgctactgctatagtgttctgtcatcggttctttcttcgtcaatcgcatgccaaaaatgacagacggacaattgcaacagtatgcatgttcttggcgggaaaagttgaagaaacacccagacctctgaaggatgtcatacttctttcatatgagatcatccacaaaaaggatcctgctgcagttcaacgaataaaacagaaggaagtatatgaacaacaaaaggaacttattttactcggggaacgtgttgtgcttgtgacacttggttttgatttgaatgtgaaccatccttacaagcccttggttgaagcaataaaaatattcaaggttgctcaaaatgcacttgctcaagttgcctggaattttgtcaatgatgggctccgcacttcactttgcctgcaatttaaaccgcaccatattgcggctggtgcaatcttcctcgctgcgaagtttctcaaagtcaagcttccatcagatggcgagaaggtctggtggcaagagtttgatgtaactccgtggcagctggaagaggttagcaaccagatgttggaactgtatgagcaaaaccgtgttcaaccaccaccatcacaaggcaatgatactgaaggcagttctgcaagtgttgcgaatcaacgtgttcctggtaaagttccaggagtagctgatgaacctcctgcccatgaccataaccaagcacccagaccatcgagccagcagaacatgttagaccaccgtggttatgaccaccctcacccagataagcaaaactataggatacctccaaatgatgcaagggatggcactgctaatagcaacgaaggtcccaatgtgtcgtcttcaatgatggatgcgatgaagaaggtaaacaaggataaggtgaaagcggcactggagaagcgtaggaaatcgaaaggtgatttttcaagaaaggtcgatgtgatggatgacgatgacctcattgagagggagctggaacatggcgtggagttggctgccgaggatgagaaggtcaagcaggagagaaagcagagctggcctcatcttgcacaccaccagagcaccaaccgtgagaataccgaagagggtgagctgtccatggacagtcaagaataccgttctccggagcatgacaatcggaagagaaaggatgtgcgtgagtaccggaactacgatcgtgacgaaagggaccttaaaaggctaagatcatga

SEQ ID NO: 98652 - DNA, 279 bp, Zea Mays
atggctgcgcggagcagttctatggttgccgaggatgactacgagacggatcagaagaagcaagctgctgcagatgttctttttcactattcacaatttgttatggtttgcattggtgaggatgttcgccctactgatctcaggttacatcttatgaaggaagtttcaggaatgtccacttctctgaaggagcctcaacaggctgctgcctcaccggcttccagtggggaaccgtcttcctctggaacgatgaaaggtgacaagaatgaaatctcctaa

SEQ ID NO: 98653 - DNA, 1119 bp, Zea Mays
atgtcctcctcctcctcctcctccttcccgtctatacagcagccgccccccgccggtgcaatccgtggcacctccccctactccgcgtccacgtccttcctcccctcgttcacgatcatcgcatcgctgctcgccttcgtgttcctcgcctccgtctccatccacctcctgctccgcttcctctccgaccgctcctcctcctccacgtcgacgtctcgacctccgcccccgcagacccaccgcgacgcgccggggagcagggcggcggacgcgtccgtggcgaggcctgccgctgccgtggcgccagtcgacgcgcgggggaaggaggaggcggcggcgggcgacgagaagcagcggctgatcgactcgctgccgctgttcacgatggcgtcggcgctcgcgtcgctccccggcagctcgcccgactgcgccgtctgcctgtcgccgttcgcgcccgacgccgagctgcggctgctgcccgcgtgccgccacgcgttccacgccgcctgcgtcgacgcctggctgcgcaccgcgccgtcctgcccgctctgccgctccgccgtcgcgctcccgccgcacccctcgcgctccgacatgcacgccgccggcgccgcgcagcagccgccgacgccgacgccgagggccaggggccggtccggaccgagcttcctcgtcgagatgggcaccgtcagcaaccgcggtggcgggcagaggaacagccgcacctactcgctcggctccttcgactaccagatcgacgaggaggtggaagccgtggtatcccgcgtcgcgcgcatcatcgccagcaccgtcaaagaggataagccgccttcggtcgaggaggggccgccgctgtcgttgtcgccaccgcctccgcgagagacggtagggtcctcgcgcgggtggctgcgggagtacgtggaccggctggcatcgtccgcctacacgttctcggagcggtggagctcgcgctggagccaggggctgcagagccagcaacggcaggaagagccgtggctatgggacgccgaggccgcggcgatgtcggcggcgccggggtccggcgatgaggaggagacggcgttcatggtgatgtaccgctggatcgccggggtgtaa

SEQ ID NO: 98654 - DNA, 1136 bp, Zea Mays
atggactggtccactcacatatacattgatcttgcttgcttcatttttttgaagttcaaggtttttggcctcctggttccaatgctctctgtttttttctttatccttttacacaatatgattgttcctgtggtgaattgcattgcatgcgccgctgggttcgagatcgactacaaccactgggtggacgagcagaagaggcacacggcggagctgacatcggcgctccaggggcagcagacgtcggagctggagctccgcctgctggtggagacgaggctcagcaactacgagcgcctgttcaggatcaaggcggcggtggccaacgcggacgtgttctatgtcatgtcgggcttgtggaagaccccccgccgagaggttcttcctctggatcggcgggtttcggccgtcggatgtcctcaaggtaggtcctcgccatcgatgtcgcccaagcgtgtcgtcctcgcccccgacctcggcgtgcgggattcggtaccgaaagaagagacaggaggagaatacaagccctcagcctcggtgttccccattcaccactcaggcgcagtccatcgctccttcgacgagggctccagcgactacggctccatcgctcctcatggtgatgccgccgagggttgtcctacgaagccgtccgcgatgccgagggttgtcctacgaagcagacacgccctgcggctgcccacacaaaggctgctaatggcggaggctgagcgccgccatggatctgacacggtgtggaatgggaggagccgaagcggagattggatcaaagtgcactgggcaggagccaagcaaatctggtggacgcctaaggatcagggcgtggtgcctcccgcactggtccgcggctgctggagcagctgccacggctggcatcgcagtggtcttgttaacctcaagagccaaatgtgtcagctgagtttcggtctcatattggtggagctgctgtatctgcagcaaagttggttactacaatgctggaacagtggagtttattgtggacactctttctggagagttctacttcatggagatgaatactcgactccctcctcccctcctagatcccgtgatctgctacgaagctgccatcaacgccctcctccccctctccg

SEQ ID NO: 98655 - DNA, 1146 bp, Zea Mays
atggccgacaacaacactggcaacaacgacagcggaggcaccaacgggaacaccgccgccgaggttcagatacaaatcccaggaccagcgaaaaccgaagctccagcaactcaacaagaagggccatcgggaagctctaaagctaaaaactggaaatggtttgtggtggcagtggatgctttgttcctcattgttggtcagacatcggcaacattgttagggcaatactactacagtcaaggtggcaacagcaagtggctttcgacattcgtgcagactgctggcttccctatactgttcttcggcctgttctttttcccttcaaagtcgccttccagcgaaactccggtcggaaagattgccactgtatacattgtcttggggcttatcataacagcggacaacacgatgtactcccatgggctgatgtttcttccagtctcaacctttacactcatctgcgctagtcagttggccttcaacgtcttcttctcatacgtcctcaactctcagaagctcaccggtttgatcatgaactccgtggtgctgcttaccttggctgctctactccttggagtcaaccatgaatctcatggacctaccggtgtctcaggagggaagtatgtgctgggtttcctgttgacactgggggcatcaggcacctactcactcatcctttccctcatgcaacttgcgttcgagaatgtgataaaggaacataccttctcaggagttctgaacatgcagatatataccgcacttgtggcaacttttgcttctctcgttgggctatttgcgagtggagaatggaaggatttaaaggaggagatggatggtttccagtcaggacagttctcctacatgatgacactggtgtgggcatccgtgtcttggcagctcgcttctgtcggagttgtgggcttggtttttgaggtatcggcgttgttctcgaatgtggtcagcacgtttgctctaccaattgtccctctttttggtgtgatggcctttcatgacaagatgaatggagtcaaggtcatagctatgctgatatcgatatggggttttggctcgtatctctgtcaaaactatctcgatgctaagaaagctggaagtgcatagggggattcctagtgtctacaattttct

SEQ ID NO: 98656 - DNA, 1726 bp, Zea Mays
tctggatattcgcatgcgatcgacgtcattctcccttctccttcggaatcttttgcagacatcgttgaattttactttcttttgtgagctagaggacactgaaccatgtgaaatgaaatacggagtatctgtcatctagtctcgcagctcatgaatgagtgatggaaatgtcgacagcaaattttgactcttgcgccacgtgctgtctattctaaatatcgagttcttgccgatccatttatcgaggaattcacacgggagaagaaccagtaggcacgtaagatcagttcgtttataggcaggacggcgacggttgcctgtccttttgtagtttcagtatttgcagcatacacatcttggttgcaattgcaatccaagatgggtgacgctggtgagattcagctgcaaatcgcagggatccgatgccaagaagccggagacgatcatggacagagagcagagagcggtggagcatgccctggccctgcaacggaggcgccgcggccgccgctgtcgaaacggctcgcgtggtgggcggtggtccttatcaacgtcgtgttcatcctcggcggacagagcgtggccacgctcctcggcaggatctactacgaccagggtggcaacagcctgtggatgcagacggtggtgcagtcctgcggcacaccgctcgccatcccgctgctcctctacttccggttccgggtcaggccgacgtcctcctccgccgtggcggctagccggccgccactcgtcaagctcgccgccatctacgccggcctgggcgtcctcctcgccgccgacaacctcatgtactcgtacggcctcctgtacctgcccatgtcaacatattccatcatctgcgcgagccaggtctcgttcaacgccgtcttcgcctacttcctgaacaaggagaagttccgggcgctcgtcctcaactccgtcgtgctgctgacgttctcagccgcgctcgtcggcgtgaaccacggctcggacgagaccggaagcagcatcccgaaggggaagttcccggcggggttcgcgctcacgctgtcggcgtcggcgctcttctccctgatcctgtccctgacgcagctgaccttcgacgaggtgctgaagagcgacgcgctccacaccgtgctggagatgcagttctggagcaacaccgcggcggcgtgcgtgtctgtggccgggctcttcgcctccggggagtggcgcaccatcgccggggagatggaggcgtacaagaagggggaggtggcgtacgcgatgacgctggcgtcgacggccgtctcgtggcagctgtgcacgatgggcctcatggggctggtcgcggcggtgtcatcattgttcaccaacgtgatcagcacggtgggcacgccgctgtcgccggtcctcgccgtgatcttcctcggcgaccggatggacggggtgaagctcatggccatgctcatagcagtgtgggggctcctgtcctacgtgtatcagcactacctcgacgaccgtgccaaggctaagaggataaccgagaaatctgacgaacaataccaagctgcaaaaatctccgtagaatagtgcttgtttttttttctgccactgtcacatcgcaaaactactttaattgctctacggaagtccctgccgatgccagtggaaaatactaagtttagttcagttctttgttgacagaagtatagtactagttctccgctacttgcgtgtcaaggtc

SEQ ID NO: 98657 - DNA, 94 bp, Zea Mays
cacttttccccacaacacacaagctgcggctaaagaagcatcatcatccacacctgctggctttctccttgatttcccacaacgagcaaactga

SEQ ID NO: 98658 - DNA, 310 bp, Zea Mays
gttcaatgaaaagcttttggtcaagcaggaagggaagaatcttcaaattcttgatatcaacaaagatgaaaaatgtctctgttcgttgaccaactacaagtcgatcctgtagtttactccagccaatctaatgtggaagtggtaagtacgtggaagaaactttgtatacaaatttgtatatgttatttgagtcttgtatagtgctatagaggtaaacctttcaatctaaagcttaatggtatcttattgatgatatcaatgtagtggtttatatggatatatataataatgttttcgtactttggtgtcc

SEQ ID NO: 98659 - DNA, 1784 bp, Zea Mays
ctccagccgtccagcgtccctctcatacatgctgcattgttttctgtataaacctgaagccaagaatcctgcttgagttttgattggttgccagtttgcagctgcttgggttgtgccgcagatagagatcgattctaggtgatggccatggaggagccgcctcagctgttcttgtgccccatctccatggagctgatggaggaccccgtcacggtgtccaccggcgttacctacgaccgccgcagcatcgagcggtggttcttcaagtacggcaagacgacgtgcccggccaccatgcagcggctgaattccttcggcctcacgcccaaccacactctcaagcgcgtcatctccacctggcttgaccgcgcctcctcctcgtcgtcgagcacgccgctgcgtaacaatctggcgcgggaaaagctaccgtcgttgctcgcgagcattgaggccacgccgttcaaggtcaccgcgctcaaaaacctcaggtgctgcatggacggagacgtggcagcgcaggaggacttcgtcgcctacggcggcatccagatgctcggacgcgtcatgacacaggcgttggcggagagctgcgccggtggagacttctcggcgttccggacgtgtgaggaggccggcgccgtcctcgccacgctccctctctccgacgacgcgtcggtggagctcgtgctcaaacccgagtgcatgaagcccgtggtcgcggtagtgcagcgcggcagcgccgagtctaggctgcacgccatggccatcctcgccaagatctccagtgccagcggcgccgaccgtgactggacgcctggtgtagacgtcgaggaccttgtcaagtcccttctcgagctcctgtcggacggtgcctcagcgaagctgagctcccgcgcgctcgacgtgctcctcgacgtcatggcgcgctcccgcggcgctcggcgtgccaaggccgtcgaggtaggcgcggtctgcgtgctcgtggaactcctccccgacgccagccgccgcgtcgctgagcgcgcgctgctcctactcaagcgtatgtgtaagtgccccgagggccggctcgccttcgcggaccacgcgctggcggtgtcggccgtggcgcggacgatgctgcgcgtgtcaggcctcgccagcaggcttgccgtcagcgtgctgtggctggtggcgtgcgcggtgacgcccgcggagagggtgctggatgacatgctgatgagcggcggcgtggcgaagctgctggcgctgctgcaggtggagaactccgcgtcgaccaaggagaaggcggcgaaactcctcaggatgcacggcgcgttctggaggcagtacccgtgcttccccaccggagcaactccaagaggttgctaaaaattatttccaaaatctatgtattgaagacttcactaaaaaatattttccccaaaatattgtcttgccacagtagtttcttaatatttaacactcaaaaatttaaaccaatgacacatcaatagaacaaaatgatggtgagctggtctaagttgcgaaagcacatcagcgacgagcttggtaggccagtaggcaagacggagaccagctccgagaagccgcgtcaaggcaagcctatgaggcggtcgcggaagggaggcataaccgggcaaccgacccatgacgcggaggcgctcgacgaggccgatgccaagcaggaggccaagcaggagagcggcggcggaacacacacgcatggccactcggggcaaccatatacttcggctggacatggacagcatatgcacagctag

SEQ ID NO: 98660 - DNA, 2096 bp, Zea Mays
ccgggcatttcgaatttgaattttgatgagaacgccgagccccgccagtgtcgtcagtcatcaccaattcaccaagactcaccagcccgctcgtcggctctcagatctactatacccgtctagactctgctccgccatggatgacagcgccggcgaagccgatggccgaagtcaggtttacgtgtgcagttcgtaccccctttcgttcccttcccagccgccggacatcaagaattggttctcgagctatgtttatgactctcctgaggttacggagcatgttgctgatcacgacggcggcgacggcagcgagacccaagacccattcgaggatggtggagttgctttgacagaaagtggttttggaggccaatctgagcctgagaattttcctagaaaatatttggtcccggtcgatgggaatgcgacgaagcccgcccccaaaaggaagcaaagcctgcgggcgttgtttggagcgagttttcttagtgaggttgaggaagttaatgcaactgaaagtcatggtctgttccctgtgcagctaaatgcactgaagcacgtgccagattgtagaagccttcctcttaatgaaatatgtgagacgcattcagaaaaaatagattgcacaacaagcttgcctgatgctactagacatagccaagaagccacaattgagcacaaggcgctggtcaattttgatcgtattagttcagctgacactcgagaaagcacccctgcagatgaggaggttgagagtaaaacgtctgctaactgtgatgatgcacttttggctgatactggagaaggctttgcagaagacatcaacggccatattgaattgcctggcagttttaacaatatcactcgagctgggactggggaaaagatccaagatggtgttgaccacagcacacatattgttagtcgcaacagacccagtttagctgagactgaagataattgtgcattacgcgaaactgacagtgaagagaattctcccctaggggaagctgaccgctgcaagctttcatcagacagtaaaaggcgacaagaaatagttgcatcagatggttttatcgctgtaaagaggaaaaggaagcaaccagaggaacacataacaaataaaaatctgaggcacctaactgggggagagaagcaaaagaggaacttaaaagagaatgtcagcattccagaccagaaggttttggtccaagagcaaaccagacgtcccttggcggataggactaatttttcagaagtaaacgcatctccagcaccagagccgagcagcaaatggaagtgtcctcgcaaaggcaagccctatgttggtcgtccaatgaagcagctccggttggggcagtgggtgcgccgtatgaattgacacctcaacgtctgcatcctgttcagaagagtatgcatcatcaagttgacagtttggaccagtttcagctcttccagtctgtaggagcgcatgtcgctcaagtaggactagatcattataatatctttatggttgtagctatcttcttgtgctactgctatcccagtacaattttttcatagcaccagggtacgtatcagcagaagaccgaactgagacaaattaaatgatgggtaccaaattctgtaaatcttgttttcagatgagattctatgtttttttgttgatgttttgcgaatctctgttgatattagaatacatgggtgaacttagaacttgtagaagttagctatatcatgcaatctatcaattgtttatctatatatattatatggagtggtgtatgtttgtatctatgtttatgtctagaataatgttgtttttgaaatggagcaagaaatctggaatgaatagatcaaatagggaatatgtcatacctcaataataaagacgactgtgatttaccatccgtctttaaaaaaccgatttgtagagatagctctgaattcagaaccatctttgaaaatacagttactaaagatggataggcaactacctctgtaaatcgctgatgcatagaggtgcctatagaggcatcccagtctcccagtggcggacccagctgctatgtttagggtgtgccaagaaaaaaata

SEQ ID NO: 98661 - DNA, 796 bp, Zea Mays
atacttccggcagccatgcaccctcatgtccagcatatcgacgcagagtcgcagtcgcagcacacactgaattctctttagctagctaagagagggtagccacaccaagacaggatgcagacagcgaaggtgaaggcgaaggacatggtgagctcggcgaaggagaaggtgaaggaggggtcggcaaagatgcagggcaagacgggcgaggcgacggcggccacgcacggcgagaaggagatggccaaggaggcggcccgcgccaagaaggaccaggccaacgccgacaagcaccaggagaaggccgaccaccgagcggacgccgccactggccaccacggcacgcgcgtgcccctcaccggcccgcacggccaccacggcgctggcgcggccgtcgaccccgcgtacccgtcctccggcaacacgtacccggcgtcgggcaagtacatctaggtgactgcgtcggatgagcgaggccagggtcgtggtcgcacttgcgtttttgtgtacgtagcgaccgagaagatcgatcctggctgtacgcctgcagtaccggtaccgactggttagttgtagagggtatgcggtgcgcacgtgcacgtgcgcgcaagtcgtctggaataaaaatgctctagttgctgttaggttgcttaatttcagtgtagtcgttcgttcacgggcactgttgccctctatgtagtatgtttttttttgtttttaatcgttttagtgtttgaccaagtacgcgtaatagatttgtaagttcgacaacgttttaagagttcaattcacgcaa

SEQ ID NO: 98662 - DNA, 306 bp, Zea Mays
atgccaggcgccacgtaccggagactccttgtcgttgcgccactctctccgcccgcggcccgtccaggcccatgctaggcgcccgcggcaaggttgccggagccgccgaggcgggcgttccactgttctacggcccccctggggttcaggtccaccccagcgtcgtgggccggtccctgtccgagggagggcgagggcgtggatacggggactgagaaggggctggagatcgcgagggtggggacctcgccgcggatcgtggagaagctcgccgcgcggggcatcacgaggctcttccccatccag

SEQ ID NO: 98663 - DNA, 1245 bp, Zea Mays
atggggctcccgggatcatcggagtgctcacttgatgtgccatccgatggggggctggcagtcgaggccgccccaaagacagctgtgtgcggtggcaccgatgttggctcacgtttgggttgctcttcttttggctttttagcttcagcaatgaaactgccaactacaacctgcacaggtgtcgctgccatcagcattccagcaacacaacctccaactatgcgtccatcacttccagccagtgccacgctcaaaccacctgttctgctgcgagtgtcaccatcctctgcaagcaagaatgagcccgaaagagagagtatatcgaagtggccctcatatgtcactatcccaccagaggttgctggttgccgcagtgttgccgtgcacagagcaccatttgccgaaattatgcatgtagtgcgcgggccttgttgggaaaaagccattattttggacgcaacatcctcattgggcttcacagttattatgtggggagtaaacgacgtccccgaagatcccaaagcatccagctgtttctttttgcctgacccaggaggacgccctctacgcttgccgtcggggttaggggtagacccgcctccaccggactgggcacccgtcgcttcagtgacccccgccgcggcggtcttgagtcccaagccgatgctcccatctgggccgtacttcctcggcctccccctcttcttcttcacaaggtccccgccgctgacggcgacgatagcaccaccgctggcaccaacgccaccggagccgggctgctgctgctgcaagcccgtcgcgccggaatcagggcggtacatagaccccagcggcatgtccacaatcttcatgctgcttatgggtgacgaggcgtccggcgaagccatagggttaaaggcaagggacatcccgtgcataacgttggccgccgaggcctgcggcaacccggacggcggcggcgccgcgccgaacgcggcggcatgctgcatcatgacaccgccggcgccggcctgcggcggggatcccacgcgcggcggagcctgctgctgctgcggctgctggtgcaggtcccggacgtccatctcgcggcagggcggtgaaaaccctagggctggtgctccggcgcagctcccctcacccgtgccgcagcgcgcctcgtcgggcacagttcacatgcgcagttcgcggcggttggacgtgacctttctccctgtgcaacagaaaaccgacctcgaaatcgaataa

SEQ ID NO: 98664 - DNA, 252 bp, Zea Mays
aagaagagaccgaaacatggtcccggccgagaaaatccccgaaccctggccccccatcactagcgggccgtcaccgcccactctgcaacggcccagccggagggtggcgcgcaggacgtaacccgggagcgggtggggcacagcgaggggatttttttaaccaagccagaaattcgcccccgaggggaatcgaacccaggacctggaggtgctactcggaagccttaaccattacgctagaggccctttcgc

SEQ ID NO: 98665 - DNA, 1468 bp, Zea Mays
tggcagtggcggggtgaggggggaaggaggaggaccaaggcaggcagtcggcagcgaggaggtgaaaagggcagcagctgcccgtgccgtaggagaggccgggcggcggccgcgtacgtccgttgcagcgcgcgcgcgcgcgctctggcctccgtgcgataccacgcgacgctgaatcgccgatcgacatgacgctggaggctctgtgcccgaccagcagcgacgtcctcgtctacgacaccttcaacgccgccgccgcatgcgccgctgcttctgcggggaccttccttttcggcaatgcaccaccggtggaggtgccggcggcggcggcggcccaggcgaacggggagaacagcgtgcagcaggggcggaggaagcggcggcgacggcagaggagcaccaagaacgccgaggacgccgagagccagcggatgacccacatcgccgtcgagcgcaaccgccgccgccagatgaacgagtacctcgccgcgctccgctcgctcatgccggactcctacgtccaccggagcgatcaggcgtccgtggtcagtggcgcaatcgatttcgtgaaggagctggagcagcagctgcaatccctggaggcccagaagctggcgctgaagcggcagctgcagcagcagcagcagcgcagcgtcacggccgcgatacgcgacgacgcggcgcagccggctcgaggccgtgatgacatcggcgcgggcgcgggcggggacgccgcggcgcgcagcgaggtgtcggcgccggagccagacccgcctccgttcgcgcggttcttccggtacccgcagtacgcgcggcggcacgcggcggcgcgggaggacgccggcgcggaggagacgagccgcgcctccgcggtggcggacgtggaggtgggcgtggtggtggacgcgcacgccagcctgcgcgtgatggcgccgcggaggcccgggcagcttctgcggatggtggccgggatgcaggcgctcggcctcgccgtgctgcacctcaacgtggccaccgccgcggtcgacgcgacggcgctctacacgctcagcctcaaggtggaggaagggtgcgccctggcgacggcggaggagatcgccgcggcggtgcaccacgtcctatgcatcatcgacgccgaggcgacgccgcagaggctgctcgctgccggagcaccagggacagggcagccggacgtctagctagtcaggatgattcaggacgaggtcttcccggcgtaacggggcggcatgggctgcgcggggtgtctgcttccgtttcttgtaaagtgcagtggcgtgcgtgcgtggctggccagcacacgagagcctgatggcgtagcgtaggtacagagtatgtaacgggcaataacacgcaggttcgtgtctggacctgtggtctctcgttcgtgcatgcctatgcgtgcccttgtgtttgcgtgtgacgggaattggaattgaggacgggaagc

SEQ ID NO: 98666 - DNA, 1734 bp, Zea Mays
tggcagtggcggggtgaggggggaaggaggaggaccaaggcaggcagtcggcagcgaggaggtgaaaagggcagcagctgcccgtgccgtaggagaggccgggcggcggccgcgtacgtccgttgcagcgcgcgcgcgcgcgctctggcctccgtgcgataccacgcgacgctgaatcgccgatcgacatgacgctggaggctctgtgcccgaccagcagcgacgtcctcgtctacgacaccttcaacgccgccgccgcatgcgccgctgcttctgcggggaccttccttttcggcaatgcaccaccggtggaggtgccggcggcggcggcggcccaggcgaacggggagaacagcgtgcagcaggggcggaggaagcggcggcgacggcagaggagcaccaagaacgccgaggacgccgagagccagcggatgacccacatcgccgtcgagcgcaaccgccgccgccagatgaacgagtacctcgccgcgctccgctcgctcatgccggactcctacgtccaccggagcgatcaggcgtccgtggtcagtggcgcaatcgatttcgtgaaggagctggagcagcagctgcaatccctggaggcccagaagctggcgctgaagcggcagctgcagcagcagcagcagcgcagcgtcacggccgcgatacgcgacgacgcggcgcagccggctcgaggccgtgatgacatcggcgcgggcgcgggcggggacgccgcggcgcgcagcgaggtgtcggcgccggagccagacccgcctccgttcgcgcggttcttccggtacccgcagtacgcgcggcggcacgcggcggcgcgggaggacgccggcgcggaggagacgagccgcgcctccgcggtggcggacgtggaggtgggcgtggtggtggacgcgcacgccagcctgcgcgtgatggcgccgcggaggcccgggcagcttctgcggatggtggccgggatgcaggcgctcggcctcgccgtgctgcacctcaacgtggccaccgccgcggtcgacgcgacggcgctctacacgctcagcctcaaggctacgtaaaggagaaaaggacgatcatggagaatcctctcttggcttggcgagcagagcaggcacctggcccgtcgtccattgacatggcgaggagatcgatgtggactgcagagaaagattgtgttgtgtgccgctgccctgcctttttcttttctagtgctgcgtgtttcaggacagcagagactgactgctgagtaagctatatgtgtttgtgtgccccggagccgagccggacccctcaacgtagcaggtggaggaagggtgcgccctggcgacggcggaggagatcgccgcggcggtgcaccacgtcctatgcatcatcgacgccgaggcgacgccgcagaggctgctcgctgccggagcaccagggacagggcagccggacgtctagctagtcaggatgattcaggacgaggtcttcccggcgtaacggggcggcatgggctgcgcggggtgtctgcttccgtttcttgtaaagtgcagtggcgtgcgtgcgtggctggccagcacacgagagcctgatggcgtagcgtaggtacagagtatgtaacgggcaataacacgcaggttcgtgtctggacctgtggtctctcgttcgtgcatgcctatgcgtgcccttgtgtttgcgtgtgacgggaattggaattgaggacgggaagcaggaatgcaggaa

SEQ ID NO: 98667 - DNA, 625 bp, Zea Mays
gcttcttcttcttctgatgcttcttgacaacggcctgcttcttccggatgcgcaagtcaccggaggtccccacgatctgcgcggcgccggcgcggcgcatccagggatagggggtcattattatgttgctgttatttcgaaccacacgtgcgaaccgggaatgtggactgggttagcggcggcggcgtgggcgtaccttgcacccgagggagcagaagcggaaggtgtcgaggaggctgcgctggcagacctcgcaggtgttggtgacgcccttgcctggcctctgctgcgggcgctcgttcaggaacaccacgcgcgcgctgttgatgatgtacgtctgcacgccggagatgtccagcaccttctggatctccgacacccggatcacgtcgtggtaggacgacctccgtatctggcaccagaccacgcatcgccgtcagagagaagacgcatgcagatggaacagggcacatttgctgccagtccaagaaagtcagctatcctgatctttggactctttttttctctccctccaatactatcgcgtgtagagagacactactgtccgttgcagcttcggatgcaactaaacaggaagtctccgcggcggagcagaggccggtaa

SEQ ID NO: 98668 - DNA, 609 bp, Zea Mays
atgcttcttgacaacggcctgcttcttccggatgcgcaagtcaccggaggtccccacgatctgcgcggcgccggcgcggcgcatccagggatagggggtcattattatgttgctgttatttcgaaccacacgtgcgaaccgggaatgtggactgggttagcggcggcggcgtgggcgtaccttgcacccgagggagcagaagcggaaggtgtcgaggaggctgcgctggcagacctcgcaggtgttggtgacgcccttgcctggcctctgctgcgggcgctcgttcaggaacaccacgcgcgcgctgttgatgatgtacgtctgcacgccggagatgtccagcaccttctggatctccgacacccggatcacgtcgtggtaggacgacctccgtatctggcaccagaccacgcatcgccgtcagagagaagacgcatgcagatggaacagggcacatttgctgccagtccaagaaagtcagctatcctgatctttggactctttttttctctccctccaatactatcgcgtgtagagagacactactgtccgttgcagcttcggatgcaactaaacaggaagtctccgcggcggagcagaggccggtaa

SEQ ID NO: 98669 - DNA, 814 bp, Zea Mays
cgggtgcagggacgtggagctggagtacgacgacgcggtggcattggcgaagtcgatgtcggtgttgatcgcggcggcggcggcggccccggagcccaagacggcacggtgggggaggctcatcccatggaagatcaaggcgctgcggaaccgccccgccggcgatcggcgagacagcgtgagatggaaccgatcgcgttgtagcccgggtcagtctgttgttcatttcctcgatttaggtggcgttggctggtcgatcgatcgcgctcgcagccgcttgcgctaatttactgttttttctctatgtctgttgttttgtctccttgtactctgttggaacttgctgtctgtcgcaaggaggctaacaagggtgaatagagatgacaacagggttacgtgctagaaggcaatagctctgttggtctagcctctcacgggcactgtgcggggttatttataggtacctgagcgcccagcgccttgtgttaaggacgcgtgtgccctcagctacccaggttatccccggaatattcgcataaaacagggtagactgtaattacaggaatgcctttacaaatgaggcccgtaacacacggcggccacgcagggcccgttacaatgggccagatcgcacgtgggcctccgaactggacggggccgcacggtgggaggacctcgtcgccggccttcgtctgatgtcgtaccgagcgaagggtgtccctgcccgttttgtctccgtcggaccagcgactgcggcgaagacttcgagcggagggtggcggctttgccttcgccccaacatttgccctccgag

SEQ ID NO: 98670 - DNA, 96 bp, Zea Mays
gtgtgtgtgtggtactctatactgtatttattactacgcacatatgaatacgatacggagcggtatgaacatactcgatcggagccaagcaaagag

SEQ ID NO: 98671 - DNA, 2287 bp, Zea Mays
acccgtagctgttgttcctgctgttgtcgtagccatagcatcccactcctccctcctcggtagattcgcctcatcgcctccctcctcctcctcctcctcctctctttctgctctccccgctctgcatggagccaggcgcgccgtggcgcggtccgcgccaggggtacgcctacggggtcggatcggcgacggcgatgcagatgcagctgcaggagcgggccgacgcggccgccggtggaggggtgctgaagaggagcctcggcgagctggagaggtggcagcaccagcagcagcacgtggcggcgcagcaggcgctgtacctgcgcgccgtgaggcagcgcacggctgcggcggttgatatcgccgccttgctgggagggatcccgtctcaggttgtccccgggtccagctttggaggggggctagcgtcgccttcgtcgacgttatcgtcgctcaccaccgcgtccagggcggcggtgccgctgatgcagccgcagccgcagaggcaggggccgctcatgacgtcctcaccgcagacgcaggccttcgggttatcgagggcgccgctgcctcagccgtcggtttcgagcgatctgttcattctacaggagctcgagaagcagctgctggacgacgacgacgacgacaacgagccggtggcggcgatgagcggcaccggttccgcggtcaccaactccgagtgggaggagacgatacaacaactcagctccatcgcagccgcgccgtcgcccgggccccctgcagcggcgaccccaaccaacaacaacaacaataacgtggggatgacgaggtcaccttcaaactcctcctcctccaccgcgtcttcatccgcgtcctgctcgccgccgacccccggggccgcgtcgaggcagctattgtctgaagccgcggtcgctatcgcggacggcaaccatgacgcggcggccagccatctggccgccctgaagcgcgcggccaaccagcacggcgacgcggagcagcggctgattgccatgatggtggccgcgctgtcctcccgcattgtccctgccgcctccgccccagctcaacacctcgccgagctctgcggtttcgagcagcgcgctgggtcccaactcctccaggacatctcgccgtgcttccgcgtcgccctccacgccgccagcgtcgccatcgtcgatgcggtcggcgaccaccgtgccatccacctcgtcgacttcgacgtcagcctcccgcagcacgcggctctcatccagtacctcgccgaccaacccgtgcagggaaggtccctgaaggtcaccgccgtcaccgacccgagctcaccgttcacgcagtctctaactgcgtcgctacccgccatcggggagcgcctgaagaagctcgcggagcgagctggcgtggagtaccgctttaaagtggtcagctgcagagcagcagagctggatgcgtccaggctgtgctgcgagcccggggaggcggtggcagtcaacctcgccttcgcactctcccacgtgcccgacgagagcgtctctccggccaacccccgcgacgagctgctccggcgcgtgcgcgcgctgggcccgcaggtggtgaccctcgtcgagcaggaactgaacaccaacacggccccgctggcggcgcgcttcacggacgcgtgcgcgcactacggcgccatcctcgagtcgctggacgcgacgctggggcgggagactgcggagaaggccagggccgaggcggccctgtcgaggaaggcggcgaacgcggtcggccgggatggccccgaccggctggagcggtgcgaggtcttcggcaagtggcgcgccaggttcggcatggcgggcttccgcccggtgtcgctcggctcgagcattgcggaacagatggtcgccccccgcgtcggcccggtgcctcccgggttcacagtcaaggcggagaacggcgtgctccgcctctgttggatggggcgcgtggtgaccgtcgcctccgcgtggcgctagaccaccaccgggacggcgggcggcgcaccgcccgggcgcgccattattgccgtcactaaatcgtcagttacataattcgcgctattgctttcctcgttctcttttttaccttggttgggtgaggagtgatgagtttgtcattgatctggtaaaatccttcctagttggtagcggctcataattcttataactgctcatagtagtatatggaaaagagtaagttatatcgcgatctcctgctaattttgtgtggcgtgttgctaggagaagatgacattctctctgattca

SEQ ID NO: 98672 - DNA, 1926 bp, Zea Mays
ggccgccggtggaggggtgctgaagaggagcctcggcgagctggagaggtggcagcaccagcagcagcacgtggcggcgcagcaggcgctgtacctgcgcgccgtgaggcagcgcacggctgcggcggttgatatcgccgccttgctgggagggatcccgtctcaggttgtccccgggtccagctttggaggggggctagcgtcgccttcgtcgacgttatcgtcgctcaccaccgcgtccagggcggcggtgccgctgatgcagccgcagccgcagaggcaggggccgctcatgacgtcctcaccgcagacgcaggccttcgggttatcgagggcgccgctgcctcagccgtcggtttcgagcgatctgttcattctacaggagctcgagaagcagctgctggacgacgacgacgacgacaacgagccggtggcggcgatgagcggcaccggttccgcggtcaccaactccgagtgggaggagacgatacaacaacaataacgtggggatgacgaggtcaccttcaaactcctcctcctccaccgcgtcttcatccgcgtcctgctcgccgccgacccccggggccgcgtcgaggcagctattgtctgaagccgcggtcgctatcgcggacggcaaccatgacgcggcggccagccatctggccgccctgaagcgcgcggccaaccagcacggcgacgcggagcagcggctgattgccatgatggtggccgcgctgtcctcccgcattgtccctgccgcctccgccccagctcaacacctcgccgagctctgcggtttcgagcagcgcgctgggtcccaactcctccaggacatctcgccgtgcttccgcgtcgccctccacgccgccagcgtcgccatcgtcgatgcggtcggcgaccaccgtgccatccacctcgtcgacttcgacgtcagcctcccgcagcacgcggctctcatccagtacctcgccgaccaacccgtgcagggaaggtccctgaaggtcaccgccgtcaccgacccgagctcaccgttcacgcagtctctaactgcgtcgctacccgccatcggggagcgcctgaagaagctcgcggagcgagctggcgtggagtaccgctttaaagtggtcagctgcagagcagcagagctggatgcgtccaggctgtgctgcgagcccggggaggcggtggcagtcaacctcgccttcgcactctcccacgtgcccgacgagagcgtctctccggccaacccccgcgacgagctgctccggcgcgtgcgcgcgctgggcccgcaggtggtgaccctcgtcgagcaggaactgaacaccaacacggccccgctggcggcgcgcttcacggacgcgtgcgcgcactacggcgccatcctcgagtcgctggacgcgacgctggggcgggagactgcggagaaggccagggccgaggcggccctgtcgaggaaggcggcgaacgcggtcggccgggatggccccgaccggctggagcggtgcgaggtcttcggcaagtggcgcgccaggttcggcatggcgggcttccgcccggtgtcgctcggctcgagcattgcggaacagatggtcgccccccgcgtcggcccggtgcctcccgggttcacagtcaaggcggagaacggcgtgctccgcctctgttggatggggcgcgtggtgaccgtcgcctccgcgtggcgctagaccaccaccgggacggcgggcggcgcaccgcccgggcgcgccattattgccgtcactaaatcgtcagttacataattcgcgctattgctttcctcgttctcttttttaccttggttgggtgaggagtgatgagtttgtcattgatctggtaaaatccttcctagttggtagcggctcataattcttataactgctcatagtagtatatggaaaagagtaagtt

SEQ ID NO: 98673 - DNA, 2179 bp, Zea Mays
gcgagaatccccacgcgccccgtcccaccccacagtccaatatggccgcttcatccagatccaggccgctctccaagctctccccttcccacctcgtccccctcgacctctccacatcctggtgctgcacgccccacggtctcggcggccacgccccacactcctcgtcctcgtcctcctcctcgcacccctcctccccggcccgcgccgccgcccatcacatggacccgccgcccaccagctctaccgtggcctcctcctacgccactccgccccagccttcctacgcgccctcctaccctaccagctacaccaagttcaactccgcgctcaacgcggggttgctcaatcccatgtccccgccgccgctgccacttgacaagacgcgctccagccccacactcttcgacatgatggccaacgagcaggactaccacccccgcaccgccgccggcatccactccatccccgccccgccccagccgcaccagctcccgcccgcgcgctccatggacaggcagatgctgctccaggaccgcatcgccgacctcatcggcagctgtagccccgggaaccagttcaacgacgccgactcctccgacgtccgcctcaccctcagctccaaggacggcctctccgtcacgctctgcgttcaccgccacatactcgtcgcgcacagcaggttcttcgccgccaaactgtccgaccgctggtccaagcagcagcgaacgctgccgcacatcgtcgagatctccgactgcgacgacgtcgaggtgtacgccgagacgctgcggctcatgtactgcaaggatctccgccggaggctgatgcgggaggatgtgaacaaggtccttggcatcctgaaggtgtccgcagccattgtattcgatgccggggtgttgtcttgcttggagtacttggaggctgcgccttgggctgaggacgatgatgagaaggtggctacattgttgacgcagctgcatcttgagaactccggggctggggaggtgcttaaaagggtgtcactggaattggccccttcggcattggttgaagaggcagatgaaggaggcagctgcaacggtggcaattccagtggtggtgaggaggtattgctgaggctcctgcaagtcgttctggaagggaaggacgaaaaggcaaggagggagatgaaggggctagtgtccaaaatgctcagggagaacagcacatcccgtggtggagcaattggtggcgaccttcgcaaggaatcgctctattctgcgtgcaatggatgcttgtccctgctgtgcgagcaatttgtgagggcttcagagggtgatcactcagaggtggcgcggatcgcaaggcaggctgacaacctgcattggatgcttgacatccttgttgagcgccagatcgcggaggatttcttgaggacatgggcaacgcagactgagttagcggcgatgcatcgtaaagtgccagcgatacaccgctacgaagtgagccgagtgacggcaagactctttgttggggttggcaagggtcagatcttggtgtccaaggaggcccgttgccagctcttgagcacctggctagagcccttttacgaggacttcggatggatgcggcgagcatgcaaggggcttgaccggcatttgatcgaggatggactggcaaacacaatcctgacgctgcctcttgcaactcagcaggagatccttctggcatggtttaatcggttcctcaactctggggaggattgcccaaacattcagagagggtttgaggtgtggtggcggcgggcattctggaaaaggaactctgagccagaaccaccatcccgtttgaggattactgcgatctgcgagaactcttgatgacgacggttcatattcgacatggaatgtggcggatgttgtgatataattattgattttctgtgatatgtagtagtgtctagctgtttctcagtttttttttgttatgtctgattaggcagttagccaattacacatgtcatcttgatcctgtttcaatgcaatgtataccaggtacaatgtactactatgccgcaaccattttgattcgaagtgaagtagagtgactatttgtggtttgctatatagcataagcaaacaatggaaggattcagacacatctggagtttggaaatggttgcacatctggggtttgg

SEQ ID NO: 98674 - DNA, 1023 bp, Zea Mays
ccccgtctgccgtccaccacgcatcgccaagcgccatatctgcaggaagcaccgggccaggcacgtcgcttcaccaccccaccccaccccaccttccccttacaccacaccaccaccgcaagccaagaggcacggccacgcatgggtttcccggcgggctactcggagctggtgctcccgaagcagctgctccacctgctgctgctgctggggtacgtccgccgcttcctcctctgggcgttcgacgccgtgggcctcggcgacctgctggatctcggggacgaccaccaagcgccgcagccgcagccgcagcaccggcgggcggagttccgggcggccatgccggcgatggtcatcgaggaggccctccccgtggcgcggttcgacgagctggaggcgcgcgtcgtcgttggcggggactgcgcggtgtgcctcggcggcatcggcggcggcgacgaggtgcggcggctcggcaactgccgccacgccttccaccgcgcctgcctcgaccgctggatggagcacgaccagcgcacctgcccgctctgccgcgcgccgctcatccccggcgcggcgctctggcccgccgacgcctccgacctggacttctcctaccccggcgcgccgctgacgcccgtcgtgccctccccgacgctgctgcggccgcacgagctgctgctgctcgcgggcctgggcggatactgagctcaccgccccgactgccggaaatccacctcccccgtgcgcaatgcgctgccgggaacgcctgaatccgtcggccatcgacgctcggctcgcttccgttccgtccgtgggaggggagcagaaagacagcagccgatgcagaggaaccggaccggaggctcctcgaattgcatatacataggcaaaatgagtaaagcgaccgaccaccccccacaaagaaagggctaggagattagattcctcctgtgcgtaggaagattccgtcgtccgagtgtgtggagtcgtgaatctttccgtggattaaaattttgttgacga

SEQ ID NO: 98675 - DNA, 809 bp, Zea Mays
cttgtgaagataactcttattttgtttctctgtttgcattatttgaatttagactatcagaatgcctcgaggacaatgctcttctgtgtcaacccgtgagaatcccaaagttgatcgggcaactgattcaaatgatgacagccgcaagaataggaggggtgcttatttgctactgggattgctgatagtgttcattcatggatcatggtctgtttatcatatccagtttggaagccttcctttgccccttgatgctgagcaggctggaaagaggggtttctccgaagcttcggcgctgaagcatgttaagtatttgacaggcttgggtcctcacccagtcggttcagatcccctcgatcatgctattcagtatgtatatgcagtagcagaaaaaataaagaagacagctcattgggaggttgatgttcaattggagttgtttcacacagatataggcgcaaatcgtctatctggtggtctttttaagggaatctgaacatgcggcgcgcattttccaaccagtccaagcgtgcagcatcaatgatacactaatgatatgaaactcaggagtgtgtacaaaagagaataattaactcccccccaaagaataaaatgtgttttcgatatataaacacaatttctgctgtaatattacaacccaaaaagaactaaaatctatactgctaaagttcgtgtatcagctcaaagagaaaaaagtgaactctatggtacaaaccgtatgaagtgagccaatccttcacctttccaggatatgggttactttaccaagcctaagttccattagttca

SEQ ID NO: 98676 - DNA, 2411 bp, Zea Mays
gcaaatggcaatggtgcatcgaaaaacccaaatttcagcaaaagtatgcctacaagccaaaacgagctccgaatccgtttcaaccactatcaaatctccgcttcggattttttggttaagacttaagaatgagacatccactccctcctctcccacacgcgtgcttcttgaatgctggacgcggccaaacagcgccagcagcaaatctccaggctgcacagcagcagcagcgaccgcccgcaggcatgcaacagcagcagcggcacggggagaaaaaggtgggccaaaccgggcacgaaaccgaagcgctcaccgtccctcacccaaatcgccgaccgtgaggagagaagccgagctgaagagagggagggcagcaggcggcagcgcggaggggaaatggggaatgcgcgaccagtgtgagcctctcacccccgcgaaatcccaccgcttctgattccgccggctaaattagctgggctaaacggtggacggcggcttcgagaggttcgttcgagacagtcagggtgaggttgtgaggagccacggcgacggggatgatgaagggagggggcgggaaggagacgctcaccgcctccttcctccgcttcctcctcctgctcctcctccccctcaccgccttctacttcctctacacgctgcagctcctcctcacctcggcatcgtcggccgcctccaactgcgtcccggacgccgtctcggtctcccgggtgtccgccaacctcacggcggcggagaagcagctgccccctccggccgcagctgtgtccacggcgacgacgctgcagcacgtggtgttcggcatcgcggcgtcgtcgcggttctgggacaagcgtaaggagtacatcaaggtgtggtggcgcccgcgcggcgccatgcgtggttacgtgtggctggaccggaaggtgcgcgagtccaacatgtccacggcgcgcacggggctcccggacatcaggatatcgtccgacacctccgccttcccctacacgcaccgccgcggccaccgctccgccatccgcatctcccgcatcgtctccgagacgttccgcctcgacctccccggcgtgcgctggttcgtcatgggcgacgacgacaccgtcttcttcccggacaacctactcaccgtgctcaacaagttcgaccaccgccagcactactacatcggctccctatccgagagccacctgcagaacatatacttctcctacgggatggcgtacggcggcggcggcttcgccatcagccggccgctggccgaggcgctcgcgcggatgcaggacggctgcctccgccggtacccggcgctgtacggcagcgatgaccggatccaggcgtgcatggcggagctgggcgtgccgctcaccaagcacccggggttccaccagtacgacgtgtacggcgacctcctcggcctcctcgcgtcccacccggtcgcgccgattgtgacgctgcaccacctcgacgtcgtgaagccgctgttcccggaggtgaggtcgcgcgccgcagcggtgcggcggctgtttgacgggccggtgaagctggacacggcggggctgatgcagcagtccatctgctacgacggcgccaaccgttggacggtgtccgtcgcgtgggggttcacggtgctggtggcaaggggcataatgtcgcctcgggagatggagatgccggcgcgcacgttcctcaactggtaccggcgcgccgactacacggcgtacgcgttcaacacgaggcccctggcgcgcagcccgtgccagaagcccgccgtgtactacctgtcgtcggcgcggcgtgcggccttgcgtggcggggtgaccacggagacgcggtacgaccggtggcgccacccgaacgagacgcggcccgcgtgccggtgggacataaccgacccggacgcgcatctcgatcacatcgtcgtgctcaagaagcctgaccccgggctctgggacaggtctccaaggcgaaattgctgccgagtggtgtcttcgcccaaggatggcaagaacggggagaagacgatgaccatcgatgtaggcgtatgcagagaaggcgagttcagccaagtagccggagcgtgaactttcatatagagatagatgaagataggaagcttcaaattcttttcttttcttgcgcgaatccattcttcttgtagggcatgaactagtcgaaacacctctctttgcgcctcacgggcgtctagctgtaactgcagttcacaaaacgccagaaggccaggactagaagttttggccgggcgttccggcatggtgacggcagtcaacccgccgccctacgcgcaactagcgacggctacggtgcctagattttgggtatagtatgtgctaaacttggcctttttattatggaaacaaaatatttcagccttttgc

SEQ ID NO: 98677 - DNA, 120 bp, Zea Mays
tctttttattttttgtactgcaaatgtttttaagtgttgttcgttctgcaattaaaggggggaatttatgcacaatgcagactgtcaacgcttcaggctctttttattttgtactgcaag

SEQ ID NO: 98678 - DNA, 603 bp, Zea Mays
cttatgcccttgagtacaatgacaagaaaggaataagcttcttcactgacctccttgtcgtcggtgagaaccgccaaacatttgatctagaaggtgatagtggaagcctcattatcctgactggccaagacagtgagaagccgcgtcggcgcgtcccatcgggataatgtggggtgccacagcaaaccgtgggaggctaaagcttaggtgtgaccatggccctcaaaattggaccagtggagttgatcttggccgccttctggatcgtcttgaacttgatcttatcataaccagcgaatcactcaaagatgtcgtgcagcagcaaaggcgcgttggtggctgcagctaattctgctgctggggagtcgtcgacagcagcagctcccgtcctagaagaagtgtaggagatcgtcgagcctctggggatcaagattgagcagctgcgtcggcacgacgtttcagcctctgaaggggaggaggcatctgggatcgatgtggaagagcgccagttcatctcaaactttgtgggcaggtcccctgtgcgtgatgaccagggtgctccaaggcaaattgcgaacctgaacaattcgtcagaggaagagc

SEQ ID NO: 98679 - DNA, 207 bp, Zea Mays
cggggtgggcgcgggggtcatagaggcagggcgtggtggggatgggggcgaagccgaaggaaggtgcgcgaggttaggggcgagggcatgaggacggcgcggggggcgatgatggcggggcgtcgacggaggatttcctgggattgcgggagcgccaatggaaggtacacatcagcaagggcgcgaggtggagcggaggcgcgggca

SEQ ID NO: 98680 - DNA, 1618 bp, Zea Mays
actctgcacttgactttcgcgagtgccccccatgcccgagtcacctgcatctccggccaaacccccctcgcagccgggatctccgctcaatgccgccactccgtccccagcgtcggcattgctgcgaggctccgtgctgctcatcgccttcctcgtactccagctcgtgctcctctggaacatcctcggcctccccagctcccgcttcctcccggtgccgggccaaagagacactacctggcccaacggcgcagtcaacggcggagcgtgcgatgaggggctcatctacgtctacgacctcccgtcggagttgaaccacgacctcgtcgacgactgcgagagcctgtggccctggtactcgttctgcccgtacctaaccaacggcggcttcggcgaggcggccgccacgctgcccgtcttcttcaacgtcacacggaacgtgtcgttgcccagctggtacaacaccgaccagttccagctcgaggtcatcatccaccgccgcctcctctcccaccggtgccgcaccaccgactcgtcgctggccaccgcgttctacgtcccgttctacgtcggcctcgacgttggcagccacctgtggggggacaactctaccgctgccgaccgcgacagggcaggcttgaggctgctccggtggctcaagaaccagacgtccttccagaggtccggcggctgggaccacttcatcacgctggggcgcatcacgtgggacttccgccggtacggcgacgacgggtggggcaccaacttcgttgtcctgccggggatagccaacgtgacccgcctcggcatcgaggccgaccggctggaccccatggaagtcggcgtcccgtacccgaccggcttccacccccgcaccgccgccgacgtgcgcgcgtggcagcggcacgtgctctccctcaagcgcagcaagctcttcggattcgccggtgcgccgcgctccgggttccgggacgacttcagggaggtgctgctggaggagtgcgaggacgctgggagcgagcactgccgctccgtggactgccgcggcacgcggtgcaccgacaacggcgcggcggtgctggagctgttcctggactcgagcttctgcctgcagccgcgcggggacagcttcacgcggcgctcgctgttcgactgcatggtggccggcgccgtgccggtgctgttctggcggcggaccgcgtacgaccagtaccggtggtacctgcccccggggccgcgcggcgaggagggggagtggtcggtgttcatcgaccggcaggcgctgcgcgtgggcaacgtgagcgtgcgggacgttctggaggggctcagcgagcggcgggtgcggcggatgcgggagcgcgtggtggagatgatcccgcggctggtgtacgcgtcatcgtccgacgggctcggcgacggcatggaggacgccctcgatgtggcgctgcgcggcgtgctggagcggttccggcggcgccgggcgagcaccgcgcctgtaggtgtttcagcaaagcactcgccaggccgcttcgtcgcccggagtgtcgacggcaaatcgacgccgccgcctccttctgacggcaaaaatggttcggtagcgacgttgaccaagtggtag

SEQ ID NO: 98681 - DNA, 2455 bp, Zea Mays
cctccacccgtggccgtggtaatcaaatcgaacgcacatgcggtgcgcctccctttcccgacctccccctgtctcggcctccacctaatcccgggcaccccaatccgaggagactgccgtgcgctttaagtgagcgcatcacacgaaaagcagcaggtagccagccgagaccgggagagaagcagcagcagggccgccaacgccatggcggtaggcgcgaccgccgcgaagctgcacctctcgtcggcggcagcggccgcgcgccgcccgtcgctgctccacctcgcggccgtggccgtcctctgctcgctgtcctacctcttcggcatctggcaccacggcggcttctccgctggccccgccgccggcggcgccacctcctcctcctcggtctccatcgccaccgccgtgtcctgcgcctcccccgccctgacgaccgccccctcgtcaccccccgcggggccgctcgacttcgccgcgcaccacacggcggaggggatggagtccgaggccgcgctccgccagcgcagctacgaggcgtgccccgccaagtactccgagtacacgccctgcgaggacgtggagcgctccctgcggttcccgcgggaccgcctcgtctaccgcgagcgccactgccccgcggacggcgagcgcctgcgctgcctcgtgccggcgcccaggggctaccgcaacccgttcccctggccggccagccgcgacgtcgcctggttcgccaacgtgccccacaaggagctcagcgtcgagaaggcggtgcagaactggatccgcgtcgacggcgacaggttccgcttccccgggggcggcaccatgttccctcgcggcgccggcgcttacatcgacgacatcgccaagcttatccccctccacgacggatccatccgcaccgcgcttgacaccggctgcggggtggcgagctggggggcctacttgctgtcacgcgacattcttgccatgtccttcgccccgcgagactcccacgaggcgcaggttcagtttgcactagagcgtggtgtgccggcgatgattggtgtcctcgcctccaatcggctcacctatccggcacgttcctttgacatggcgcactgctctcgttgcctcatcccgtggcaactttacgatggcctgtacttgatagaggttgatcgtatcctgcggcctggaggctattggattttgtctgggccaccaatcaactggaagaaacactggaaggggtgggacaggactaaagaagacctggatgcagagcagaaagccattgaggcagttgccaggagcctctgctggaagaagatcaaggaggcgggcgacattgctatctggcagaagcctactaaccacattcattgcaaggccatccacaaagttagcaagtccatacccttctgctctaaccaaaacccagatgctgcctggtatgacaagatggaggcttgtataactcgactcccagaggtcagtgacttaaaggaggttgccggcggtgcgttgaagaaatggcccgagaggctcactgcagtgccacccagaattgccagtggcagcatcgagggggtcacggaagagatgtttgtggaagatactgagttatggaagaagagagttgggcactacaagtccgtgattgcgcaacttggtcagaaaggccggtaccgcaacctactcgatatgaatgcaaagtttggcggcttcgctgcggcattggtgaatgatcccttgtgggtcatgaacatggtccctactgtggggaactcaacaacccttggggcaatatacgagcggggcctcattggaagctaccaggactggtgtgagggcatgtccacttatccccggacctacgacctcattcatgcggattcactgtttacactgtacaatggcagatgtgaggcggacaacattctgctcgaaatggacagaattctgaggccagagggcacggtcatcatcagagatgacgtggacatgttagtgaagataaagagcatcacggacgggatgagatggaatagccagatcgtggatcacgaagatggtccgctcgtccgggagaagctcctccttgctgtgaagacatactggactctggacgacagcaaacaatagcaataacgtggaatagagagttagaatgattattgacgtgatcggcaaatcttgcgactgccttaccgtttgccctgtgaatctggtggactttgggttccattttctttttgggtattcattggggggagatagttcacataatggagatataatctccttgttaagatataagactgaacccagcacagattttgacataaaaaacatacattgtgcaaagtgggtaaatagaaagtacaatattgggactacctttttctccggatgcacattgtctggttatggctatgatgtcatatgatccctttcacacaaatctaaa

SEQ ID NO: 98682 - DNA, 297 bp, Zea Mays
atggcatcccccggggcacagagagtgatggcagaccaatccattgtccggagacatgccgggcaagactttgctgttctaccctgtaatcctagccagcttctcgacagccacagagaaaggaaggtgtccttggactgggtttctttgggaggactttatttcaataatttcaacttcgagttttcagcttcacttcaacatattcatggttacgatcagtcatatccattcaacaaccaacaattggaaatagcgaaacaattagcagtatggtataaagggcgtcatgcttaa

SEQ ID NO: 98683 - DNA, 1530 bp, Zea Mays
cacatgcaaccatatcttcagctagcttctgcctgcctcgccgccaccaccaccaccaccctctctgggaaccttcttgtcacctcggaggccatggctcccatggcctatatagctgcctgtgccgcggcattgtcggccttcgtagctctgctccactgggcgtaccgatggagccaccccaggtcgagaggcaggcttccgccgggctccatgggcatccctctcctgggcgagacgatgcagttcttcgcgcccaacccgacctgcgacgtgtccccgttcgtgaaggagagggtgaggcggtacgggagcatcttcaagacgagcatcgtggggcggcaggtggtggtgtcggcggacccggacatgaactacttcgtgttccagcaggaggggaagctgttcgagagctggtacccggacaccttcaccgagatcttcggccgcgacaacgtcggctccctgcacggattcatgtacaagtacctcaagaccctggtgctccgcctctacggccaggagaacctcaaggcggtgctcctcgccgagacggacgccgcctgccgcggcagcctcgcctcgtgggcggcgcagcccagcgtcgagctcaaggaaggcctctccacaatgatatttgatcttaccgccaagaagctgatcggctacgagccgtccaagtcgtccgagagcctgaggaagaacttcgtggcgttcattcgcgggctgatttctttccccgtcaacatccccggcacggcctaccatgaatgcatggaggggcggaagaacgcgatgaaggtgctcaagggcatgatgaaggagcggatggcggatcccgagcggcgttgcgaggacttcttcgaccacgtgatccaggagctccgcagggagaagccgctcctgacggagaccatcgcgctggacctcatgttcgtgctcctcttcgccagcttcgagaccacggcgctggcgctcaccctcggcgtcaagctcctcaccgacagccccaaagtcgtcgacgcgttgagggaggagcacgacgcgatcgccaagaacaggaacgacccggatgcgcccgtcacgtgggccgagtacagatcgatgaccttcacgaatcaggtcatcatggagatggtgaggctcgcaaacatcgtgccggggatatttcggaaggccctgcaagacgttgagatcaaaggctacacgatcccggcggggtggggtgtcatggtgtgcccaccggcggtgcacttgaaccctgacatctacgaagacccgttggcgttcaacccatggaggtggcagggaaaacctgaaattaccggtggaacgaagcatttcatggcgtttggaggtgggctacgattctgcgtcgggactgaccttagcagggtcttgatggcaacattcatccaccacttggttacaaagtacagttggaggacggtaaaaggagggaacgtggtccggacccccggtctcggctttcctgatggcttccacatccaactcttccccagaaattga

SEQ ID NO: 98684 - DNA, 1873 bp, Zea Mays
gccccgttctcttctgctgcctgcctttctctcttctggcgtccgcgtgtgtgtgcatttcactgtactgctttcatctcccgctctttcttcacctgctccgcgctagtgctggaaccaagaaagcctcatgcggcggcggctggccgaggtgcggtagagcggcggagatgggctgggcacccaggtggttgcgcgggctgctcggcggcggcggcaggaaggccgccgacacaaggccggtgaaggagaagaagcgctgggggttcggcaagtccttccgggagaagccccccgcgccagtgccggcgcggcctccgactccgacgcctccgtcgcatcccgcggcgacgcctcgccggggctatgcagcggcggatgaggcgggcgacgagcagagcaagcgcgctatcgcggtggccgcggcgacggcggcggtggcagaggccgccgtcgctgccgcccaggccgccgccgccgtggtgcggctgacgagcagcgggcggtgcgcgccgccggccgccgcgaagcgggagcagtgggcggccgttcggatccaggccgctttccgtggctacctggcgaggcgggcgctgaaggcgttgcgggggctggtgaagctgcaggcgctggtccggggcaacatcgtgcggcggcaggcggcggagacgctgcgatgcatgcacgcgctcgtccgcgtccaggcgcgcgcgcgcgcctgccgcgcaattcgctcgcagcatgtcacggcgcatccggatccgccgacgccggagaagtacgagcaggcgggtgcgcccaggcacggccgttccggctctctgaaggcgaactcttcgaggacaccgggcggcgagaggctgggcagggagaggtcggaatcctgcgggaggaactggctggaccgctgggtggaggagaggtacatggacgacgagaagaacgccaagattctcgaggtggacaacggcaagccacggcgccggtatgcttccaagaggcgcggcggcggcggcggaaaccaccaccaccaccaccagtcgccgtgctcgacgacgatgggttccgagcagaacagccggagctacgcgaccatggcggagtcgccgtccaaggactcgacgaccgcgcagcagtcggtgccgagcccggcgtcggtgggcatggccgaggaggccctgagcccgctgcgcgtgcccgtgcccgcggacgtggccgagctctgcgacagcccccagttcttctcggccacgtcgtcgcggcccgggagctcgaggcggggcccgttcacgccgacggccaagagcgagtgctcgcgcagcctcttcggcggctactccgactacccgaactacatggccaacacggagtcgttccgcgccaaggcgcggtcgcagagcgcgcccaagcagaggccgcagtacgagaggtccagctccctacgcagggcgtcggcggcgcagaggtcggcggcggcggcggcctcctccctgcacgccaagttcaccaacaaggcgtacccgggctctggcaggctggatcggcttggcttgccggccaggtactgatcctgatcctgatcctgcctaattcgcgccagggatgatgtgctgccgctgtgtctcgagcgaggacgacgacgaagaagtgcaatcgactagtggtagttaggttccgtgccttggttgtgctattaccatcaacagtttttctgtttcttgctttgtgtagctagccatgtctaaagttgctggtagctgtaatgatgctataatgcgtgcttaactgctgacgaaccttttcctctacatttccgtggtatatatatatgtgccgtcaaatcatgcatgggaattgaatgtgttgttgcaaa

SEQ ID NO: 98685 - DNA, 1880 bp, Zea Mays
gccccgttctcttctgctgcctgcctttctctcttctggcgtccgcgtgtgtgtgcatttcactgtactgctttcatctcccgctctttcttcacctgctccgcgctagtgctggaaccaagaaagcctcatgcggcggcggctggccgaggtgcggtagagcggcggagatgggctgggcacccaggtggttgcgcgggctgctcggcggcggcggcaggaaggccgccgacacaaggccggtgaaggagaagaagcgctgggggttcggcaagtccttccgggagaagccccccgcgccagtgccggcgcggcctccgactccgacgcctccgtcgcatcccgcggcgacgcctcgccggggctatgcagcggcggatgaggcgggcgacgagcagagcaagcgcgctatcgcggtggccgcggcgacggcggcggtggcagaggccgccgtcgctgccgcccaggccgccgccgccgtggtgcggctgacgagcagcgggcggtgcgcgccgccggccgccgcgaagcgggagcagtgggcggccgttcggatccaggccgctttccgtggctacctgtgcgaaggcgaggcgggcgctgaaggcgttgcgggggctggtgaagctgcaggcgctggtccggggcaacatcgtgcggcggcaggcggcggagacgctgcgatgcatgcacgcgctcgtccgcgtccaggcgcgcgcgcgcgcctgccgcgcaattcgctcgcagcatgtcacggcgcatccggatccgccgacgccggagaagtacgagcaggcgggtgcgcccaggcacggccgttccggctctctgaaggcgaactcttcgaggacaccgggcggcgagaggctgggcagggagaggtcggaatcctgcgggaggaactggctggaccgctgggtggaggagaggtacatggacgacgagaagaacgccaagattctcgaggtggacaacggcaagccacggcgccggtatgcttccaagaggcgcggcggcggcggcggaaaccaccaccaccaccaccagtcgccgtgctcgacgacgatgggttccgagcagaacagccggagctacgcgaccatggcggagtcgccgtccaaggactcgacgaccgcgcagcagtcggtgccgagcccggcgtcggtgggcatggccgaggaggccctgagcccgctgcgcgtgcccgtgcccgcggacgtggccgagctctgcgacagcccccagttcttctcggccacgtcgtcgcggcccgggagctcgaggcggggcccgttcacgccgacggccaagagcgagtgctcgcgcagcctcttcggcggctactccgactacccgaactacatggccaacacggagtcgttccgcgccaaggcgcggtcgcagagcgcgcccaagcagaggccgcagtacgagaggtccagctccctacgcagggcgtcggcggcgcagaggtcggcggcggcggcggcctcctccctgcacgccaagttcaccaacaaggcgtacccgggctctggcaggctggatcggcttggcttgccggccaggtactgatcctgatcctgatcctgcctaattcgcgccagggatgatgtgctgccgctgtgtctcgagcgaggacgacgacgaagaagtgcaatcgactagtggtagttaggttccgtgccttggttgtgctattaccatcaacagtttttctgtttcttgctttgtgtagctagccatgtctaaagttgctggtagctgtaatgatgctataatgcgtgcttaactgctgacgaaccttttcctctacatttccgtggtatatatatatgtgccgtcaaatcatgcatgggaattgaatgtgttgttgcaaa

SEQ ID NO: 98686 - DNA, 1423 bp, Zea Mays
atgatgtgtaacctacgagctgctctggtaaccgcttcccctccagcaaggagaacgccaccttgtggcgtcagctctgccgtcgtctttactgcctgcgccttccaggcttcttcgtttcaggaagcaaggcgaggcgggcgctgaaggcgttgcgggggctggtgaagctgcaggcgctggtccggggcaacatcgtgcggcggcaggcggcggagacgctgcgatgcatgcacgcgctcgtccgcgtccaggcgcgcgcgcgcgcctgccgcgcaattcgctcgcagcatgtcacggcgcatccggatccgccgacgccggagaagtacgagcaggcgggtgcgcccaggcacggccgttccggctctctgaaggcgaactcttcgaggacaccgggcggcgagaggctgggcagggagaggtcggaatcctgcgggaggaactggctggaccgctgggtggaggagaggtacatggacgacgagaagaacgccaagattctcgaggtggacaacggcaagccacggcgccggtatgcttccaagaggcgcggcggcggcggcggaaaccaccaccaccaccaccagtcgccgtgctcgacgacgatgggttccgagcagaacagccggagctacgcgaccatggcggagtcgccgtccaaggactcgacgaccgcgcagcagtcggtgccgagcccggcgtcggtgggcatggccgaggaggccctgagcccgctgcgcgtgcccgtgcccgcggacgtggccgagctctgcgacagcccccagttcttctcggccacgtcgtcgcggcccgggagctcgaggcggggcccgttcacgccgacggccaagagcgagtgctcgcgcagcctcttcggcggctactccgactacccgaactacatggccaacacggagtcgttccgcgccaaggcgcggtcgcagagcgcgcccaagcagaggccgcagtacgagaggtccagctccctacgcagggcgtcggcggcgcagaggtcggcggcggcggcggcctcctccctgcacgccaagttcaccaacaaggcgtacccgggctctggcaggctggatcggcttggcttgccggccaggtactgatcctgatcctgatcctgcctaattcgcgccagggatgatgtgctgccgctgtgtctcgagcgaggacgacgacgaagaagtgcaatcgactagtggtagttaggttccgtgccttggttgtgctattaccatcaacagtttttctgtttcttgctttgtgtagctagccatgtctaaagttgctggtagctgtaatgatgctataatgcgtgcttaactgctgacgaaccttttcctctacatttccgtggtatatatatatgtgccgtcaaatcatgcatgggaattgaatgtgttgttgcaaa

SEQ ID NO: 98687 - DNA, 2592 bp, Zea Mays
atggcaaatgccgcttgtgtgggcggaagctttttgggagtagaaaagggaaagcctgccactgtcagcaacctaggcgctcctgcagtcctgctgctggttcttgcctgtctcccgcttgttctccctagttccgacccgaagcagggaatgagcttcggcgatctcgacggcggcgggtccgcggccggcttgcagtacccgtacggcgccttcgcgtcatcgccggtcctctcgctcaccgtggtggacgccaggcgccgccgcggcggcggcgggaacgcgaaggacgcgtcggaggcggagaacgagggacagtcgatgatgagcggacacctcgacgtcgtcctgtctggcggcggcgatggcgaggacggcgaggccgcgaaccagcgcaagcccaagcgcaagaagccgtacaaccgccacacgccgcggcagatcgaacagctcgaagcgatgttcaaggaattccaccacccggacgagaagcagcgcgcgcagctgagcaggcagctgggcctggacccgcggcaggtcaagttctggttccagaaccggcgcacgcatttgaagtgcttgacatggctttcgcttttgcatggtcctgaacttggcaagaaccaactggagcggcaggagaacgcgaggctgaaacacgagaacgacaaactgcgcgtcgagaacctgtccatccgggaggccataagggacctggtgtgcagctgctgtggcggtccagcggtgctcggggagctgtcgcccgaagagcaccagctgcgcctcgagaatgcgaggctcagggacgagctcgctcgagtctgcaccgtcacttccaagttcattggcaagcccatgtctcacatggaactgctgctcgcgaaggagccgcatcctatgacaggctcgtcactggaacttgcagttgctgttggtgttggttccagcgtgccatcgagcaaaatgcctgtctcgacgatctccgagttggccggcagcacatccagctcaacgggaacagtgaccacgcccatggtgactgcatccttgccgatggttagcattgacaagtccaagttcgcccagcttgcagtgagtgcgatgaatgagcttgtcaagatggcgcggatgaatgaaccgctgtggattccaaccattccctcacctggctcaccaatcatggagactctaaactttaaagagtacttgaaggcattctcaccatgtgttggagtgaagcctactgggtttgtgtctgaggcctctagggaatccggcattgtcaccattgacagtagcgctgctcttatggaggtcttcatggatgaggttcttcttgtgcctccttgctcgttgtttttgctattgcctagacgatggtcagacatattctactgcattgttgccaaggcatcaatcgttgaggagatcttacctggtgttgcaggaagcagaaatggtgcattgctgcttatgcaggcagaactacaaatgctttcacctcttgtccctataagggaggttacatttctcaggttctgcaaacagcttgctgagggtgcatgggctgtagtggatgtttccattgatggactgcagacggatcagtgcctagctacaaacacgaaatgccggaggctgccttcaggttgcgtgttgcaagatacccccaatggctgcaaggtcacatgggttgagcatgcagaatatcctgaggcgtccgtgcaccagctctaccagcctcttatgcgctctggcctcgcccttggcgcagggcggtggcttgcaacactgcaacgccagtgtgagtgcttggccatcctcatgtcatcgcttgcagcgccagagcatgactcagcagcggtttctctggaaggaaaatggagcctgttgaagttggcacggaggatgatggagaacttctgcgcagggatgggcgcgtcatcttcccgcgaatggagtatgctggatggctttacaggtagcacggggaaagacgtgcgggtcatggtgcagaacagtgtggatgaacctggggtgccaccgggtgtggtgcttagcgtcgccacagcagtatggctacctgtgacccctgagcggctcttcaacttccttcgcgacgaggagctccgtgctgagtgggacatcctcagcaatggtggccctatgcagcaggtgctacgcatttccaagggccaactggacggcaactctgtcgctctgctgagagctgatcatacagactcccacctgaacagcatcttgattctacaagagacgtgcactgacagatctggcgcaatggtcgtgtacaccccggtggacttcccggcaatgcagcttgtgcttggtggaggggactcgaagaacgtggcgctcttaccatctggtttcgtcattctgcctgctgggtctaccgccagtgggctcgggcacaaggcacgcggatcgctgctcacagttgcattccagatcctcgtgaacagccagcccacagcaaagctgacggtggagtcagtggacaccgtgtacagcctcatctcctgtaccatcgagaagatcaaggcggcacttcactgtgacgtctgttaa

SEQ ID NO: 98688 - DNA, 1643 bp, Zea Mays
aaattcacgtaatctgttgcaatgatatatttttttagttttattgaaaaatagggaaaggcagaaaaaacgagaaaagattcgagtttctaaacccgtcacggcgtcttgttcagaggaattccattcctacgaagaaagtatttccttcctcctgaatcctgatctctcacggagttcccctgtatggcgacgcctcgctcaccgagccccagcgccgccgcgcgtctcgattctgcgccgctgctgggcggcgcctccggcggcgggtcccgtcgccgagatggagcgcttcgccggccctccctccgcggcgcggcgcggctgctgcgtcgcggcgggcggcgggccatgcgggagccctcggtgctggtgcgggaggccgccgcagagcacctcgaggagcggcaggctgactgggcctactcccgccccgtcgtggcgctcgacctgctgtggaacctcgctttcatcaccgtcgctgcggtcgtgctcgtgctcagccgcgacgaggactcgcccatgccgctccggacctgggtcgccggctacgcccttcagtgcgtcgtacacatgatttgcgtcgcaatcgagtacaggatgcgccacggccagcgcggcagcgccgtcgctggcgcagcgcctgcagacgtggaaaggggcagcgacgcatcgtcctcatccagtgacgaggatgacagggagctcgatctccatggtcgccgcactgattacgccagtattgcgaagcacttggagtctgctaatacaatgttctccttcatatggtggataattggattttattggatatcagctgggggtgaggaggttattcaggatgcacctcaactttactggctttgcatagtctttctggcatttgatgtgttttttgttgtattctgtgttgctctggcttgtattattggtattgctgtctgttgttgccttccttgtatcatagcaattctctatgcagtatctgatcaggaaggagcatctgaagatgacattcgtcaaatcccaagatacaaatttcggcggacggatgagcctgagaagcaagatgttgaccccatgggtccttttggtggaataatgatagagtgtggcaccaatcaacctattgagaaagtgcttgcagctgaagatgcagagtgttgtatttgcctatcggcttacgatgacagtgcagagttgcgcgaactcccctgtgggcaccatttccactgcacctgtatcgataagtggcttcacatcaatgcaacatgccccctgtgcaagtacaacattcggaaaagcagcagtagcagtggaagtgaagaagtatgaatgcagtccgcttgacaatgccaatctgtttcaacttctgttccgttgctaatgtaactccaggccttgatgagtgtaaatttttgtatccaaaaaaatgtgctgatagagtcagttatttatcaaagttactcaaagtgctgtcaatatgtcatataagttaataaacagttgggtatgcttctgtatttactgtcaggaatatattattagttgcattgtaacttgtgtccttttgaatgatccgggtgttttcctgcttggttaatgatgacaaaatgtcttgcatggtttcttatgacaagaaa

SEQ ID NO: 98689 - DNA, 1747 bp, Zea Mays
aaattcacgtaatctgttgcaatgatatatttttttagttttattgaaaaatagggaaaggcagaaaaaacgagaaaagattcgagtttctaaacccgtcacggcgtcttgttcagaggaattccattcctacgaagaaagtatttccttcctcctgaatcctgatctctcacggagttcccctgtatggcgacgcctcgctcaccgagccccagcgccgccgcgcgtctcgattctgcgccgctgctgggcggcgcctccggcggcgggtcccgtcgccgagatggagcgcttcgccggccctccctccgcggcgcggcgcggctgctgcgtcgcggcgggcggcgggccatgcgggagccctcggtgctggtgcgggaggccgccgcagagcacctcgaggagcggcaggctgactgggcctactcccgccccgtcgtggcgctcgacctgctgtggaacctcgctttcatcaccgtcgctgcggtcgtgctcgtgctcagccgcgacgaggactcgcccatgccgctccggacctgggtcgccggctacgcccttcagtgcgtcgtacacatgatttgcgtcgcaatcgagtacaggatgcgccacggccagcgcggcagcgccgtcgctggcgcagcgcctgcagacgtggaaaggggcagcgacgcatcgtcctcatccagtgacgaggatgacagggagctcgatctccatggtcgccgcactgattacgccagtattgcgaagcacttggagtctgctaatacaatgttctccttcatatggtggataattggattttattggatatcagctgggggtgaggaggttattcaggatgcacctcaactttactggctttgcatagtctttctggcatttgatgtgttttttgttgtattctgtgttgctctggcttgtattattggtattgctgtctgttgttgccttccttgtatcatagcaattctctatgcagtatctgatcaggtatggcttttcaagtcttgtgtaatgtactacataactcaaatggtggagttgacacggcattcttgattagataactatctacatcatctcactgaatacaggaaggagcatctgaagatgacattcgtcaaatcccaagatacaaatttcggcggacggatgagcctgagaagcaagatgttgaccccatgggtccttttggtggaataatgatagagtgtggcaccaatcaacctattgagaaagtgcttgcagctgaagatgcagagtgttgtatttgcctatcggcttacgatgacagtgcagagttgcgcgaactcccctgtgggcaccatttccactgcacctgtatcgataagtggcttcacatcaatgcaacatgccccctgtgcaagtacaacattcggaaaagcagcagtagcagtggaagtgaagaagtatgaatgcagtccgcttgacaatgccaatctgtttcaacttctgttccgttgctaatgtaactccaggccttgatgagtgtaaatttttgtatccaaaaaaatgtgctgatagagtcagttatttatcaaagttactcaaagtgctgtcaatatgtcatataagttaataaacagttgggtatgcttctgtatttactgtcaggaatatattattagttgcattgtaacttgtgtccttttgaatgatccgggtgttttcctgcttggttaatgatgacaaaatgtcttgcatggtttcttatgacaagaaa

SEQ ID NO: 98690 - DNA, 494 bp, Zea Mays
cgtctccgtactggtacggggacgtctctttctcgaaattctctgcccgcaagcctactactacaacttctgcagccgcccgtccgtctccctcccccaaccgagtatatttatcaggccccttcccccgccccggcgccctccttccccccgctcctgtgcgcgttgtttctcgtcgccgtcgtccgtcctccggcgtccggcaacctgcaaccggcgacgacgatggaggcggcgctgggggcgctgtgccgcgccggaggctggtcgtacgcggccgtctggcgcttccatccccaagaccctcggtgagccgtgttcgttcgtgtgtgtgtgtgtgtttactgtgcgtgtgatggttttctcttctctggcaagcttctgtgcacgttcgaattttgggagctctactacgttgttttcttcttcccttgcctgttcgtcgcgcattaacctgctgcctcttgcaggttcctgttctctctctctctctc

SEQ ID NO: 98691 - DNA, 3075 bp, Zea Mays
cgtctccgtactggtacggggacgtctctttctcgaaattctctgcccgcaagcctactactacaacttctgcagccgcccgtccgtctccctcccccaaccgagtatatttatcaggccccttcccccgccccggcgccctccttccccccgctcctgtgcgcgttgtttctcgtcgccgtcgtccgtcctccggcgtccggcaacctgcaaccggcgacgacgatggaggcggcgctgggggcgctgtgccgcgccggaggctggtcgtacgcggccgtctggcgcttccatccccaagaccctcgattgctcacattgggggactgctactgtgaagatgaggcaaaagcaatggttcagaagatgcttaatcttgttgaagttgttggagaaggcatcctaggacaagctctagtaagcggagagtgtcaatggatttacgacgatacttgccacgcgttgaatcagataagccatgctgataacggagatttacatcagggttatacttggtggcagcatcagtttctcagtgggatgaagactattgcagtgttacctcttcagttgcatggactggtgcaatttggttccacacggaaggttcccaggagctcagtttttttgaatcaggtcagagatatatttgatcggatgaagaatgcttcaagcgatggtccaatggagtatacccagaataactctcttgcatgcggtcagcaacctatccttacttcatcgagacctgtcaatgacatgctcgtacataacaaggtcaacccattgcaaactgagaaacttttggaggatatcgagagaacagaatctataaggagttcgatctgttctccaagcaattcacaaagatctttaaatgatctaacctcccatggtactggtaacagcagcatggatactaatatattagccatgcctgttaactccaagtctatatatgatctcaaacgatttgataacgtcacagagttgtttcatcgaagttctaatgacagaattggttttcaagtcagctctagtaaagagcctgattctaccattgctggtgtaatgtcagaatacaaaagtttgaacaatattcatatgacagaaaatgattcatgtggtcaaaacataggatataccccgtacctttacactaccaccaactcttcaaattctggccttgatgaactttcttattctggcgttgctttgtcgtcatcgtttacagcagtatcagggaaagttaaagattgcctgcaaactgagagtgacaagtttctatgtaaatctgtatcattcggcagcaacccttgtgcttctaaattccaagaaaatcgcctatcaccataccatgccctcatgcacgaacaatccctgatacctgaccctggagaatctgtgaggctcctctcacaagaagaatcctttattgttcaaggtgactcaagtcaattcaaggatactgccgactttacaggccagggtaacagtacatttcctgaattacctaacagatcacctgaagaagctactgctgaaactctagaaaacaacatgaaggactgtagtggaaacaacagtctgctggaaactatgatgcttgatcttagcaccaacagctttgtgcaagattggtgggacaacagtgttctactggcagaaaaccttccaaattcaagcgaaaaggacccagagcctgctatggaattggccaataggcattcattgccaactggggagagaggctcgcctttcatacctgtcatcgaacaattgctaggtgatgttgcacatccacctacacctaccggacatagttcacttgaggctgaagctactgctttagctggccgtgtttcagattatcagctgcctcagtttgctttccgagactgcctaacagtagacaacgcacaaatcccagcattggcctgcagtaattacacatgcagaactagaagtgcacaaaatggttcttcagaagtgccatcagcaaacgtatctgtggacgacacctgcagtttgaacacagcaaactccaatggcagtcagtcgagcaatcctgagggaacgaaggttgctaagagaagagctagagctggggagagtacccgacctagaccaaaagaccgacaactgatacaagatcgcgttaaagaattacgagagattgtccctaatggtgcaaagtgcagcattgatgctttgttggagcgaacaattaagcacatgctgtttctacaaagtgtaaacaaatatgcagagaaaattaagcaagctgatgaaccaaagataatcgacaaagggagcggtgttatcttgaaagacaacccagttgctggcacaaatggtggtgccacgtgggcctacgaggttgctggccaaactatggtttgcccaataatcattgaggatctttcgccacctggtcagatgcttgttgagatgctttgcgaggaacaagggctctttctggagatagctgacaacatacgtggaattggtctgacggtcttgaaaggacggatggagctctgtgatggcaagatatggtcgcggtttcttgtcgaggcaaacagagaggtcacaaggatggatatatttctgtcgcttgttcagttactggaacagaacagccttgttcgatctactgaccagatggccaaggtcatgaataatggggttccatcctttgcaaaccaccaacggtctccgctgctagttccagtgggcattcctgagagactacagtgacatgcagatgcttcaactagatagagttaggtaccacgactgttaacatatctggtagccggaactccatgcattagactgagcctagtgataacatctgaatgaagatagtctcactgctgctaaagatgactgtatcaagaacatgcatgactggtgcagacatgagcctctagcgcagaaattatgaactttccctgattattagtggtgtgatcagtgaaatggcattatctcctgcttagttggttgacaccttgctcctgagtaactgggtcttgatagtggtgtttcttatgcagcgatggcagtgta

SEQ ID NO: 98692 - DNA, 3236 bp, Zea Mays
tttctctctctctctctccacaaaaccacgagatgtttgttaatcggggccggaggtacaaggtctaagttctagtctatggtttaattgtgactttacctttactttttaaaaccttgtgattttatctccattatattattttaaaacgaaaaacggttctttgcacctaatctgcgctgacgttgtaagacgaaaaaaaatagaaaaagataaaaaaaatcccggtcatgcgcaaagaccgaattaccccgatcttatctctctgttctcctcctccggcccttccccatacacgagatatttccgaaaaatacacagcaacgtgtggctacgccaaaatgtccatcgcagggcacgagcgttaggagcgtcgggcgcggggctcgggggctgtgggcggcgagcagcaggacgaccaggggctgtgggcggcagatcagatctccgcgtttctgctctgttcctctgcacttccactccctcctgcatatacgaactcctcccttgtttcaaagtcgcaggagtaaaacgacagagctaaaacgaaaaaaaaaacaaggaccaaaaccacgattttgctacaaaacggggcatgaattcttaagccccaaatgtttaatccatacccatcctagtacgttcggtaacacgactgagattcccttcgtttctttcaactttgtccagagtgatactagctaagatgcggatgcaggaagctgcccccttacctcagctttttttagctagctaaacactgatcccatcaaaattgacagcaagattgctcacattgggggactgctactgtgaagatgaggcaaaagcaatggttcagaagatgcttaatcttgttgaagttgttggagaaggcatcctaggacaagctctagtaagcggagagtgtcaatggatttacgacgatacttgccacgcgttgaatcagataagccatgctgataacggagatttacatcagggttatacttggtggcagcatcagtttctcagtgggatgaagactattgcagtgttacctcttcagttgcatggactggtgcaatttggttccacacggaaggttcccaggagctcagtttttttgaatcaggtcagagatatatttgatcggatgaagaatgcttcaagcgatggtccaatggagtatacccagaataactctcttgcatgcgcagtatcagggaaagttaaagattgcctgcaaactgagagtgacaagtttctatgtaaatctgtatcattcggcagcaacccttgtgcttctaaattccaagaaaatcgcctatcaccataccatgccctcatgcacgaacaatccctgatacctgaccctggagaatctgtgaggctcctctcacaagaagaatcctttattgttcaaggtgactcaagtcaattcaaggatactgccgactttacaggccagggtaacagtacatttcctgaattacctaacagatcacctgaagaagctactgctgaaactctagaaaacaacatgaaggactgtagtggaaacaacagtctgctggaaactatgatgcttgatcttagcaccaacagctttgtgcaagattggtgggacaacagtgttctactggcagaaaaccttccaaattcaagcgaaaaggacccagagcctgctatggaattggccaataggcattcattgccaactggggagagaggctcgcctttcatacctgtcatcgaacaattgctaggtgatgttgcacatccacctacacctaccggacatagttcacttgaggctgaagctactgctttagctggccgtgtttcagattatcagctgcctcagtttgctttccgagactgcctaacagtagacaacgcacaaatcccagcattggcctgcagtaattacacatgcagaactagaagtgcacaaaatggttcttcagaagtgccatcagcaaacgtatctgtggacgacacctgcagtttgaacacagcaaactccaatggcagtcagtcgagcaatcctgagggaacgaaggttgctaagagaagagctagagctggggagagtacccgacctagaccaaaagaccgacaactgatacaagatcgcgttaaagaattacgagagattgtccctaatggtgcaaagtgcagcattgatgctttgttggagcgaacaattaagcacatgctgtttctacaaagtgtaaacaaatatgcagagaaaattaagcaagctgatgaaccaaagataatcgacaaagggagcggtgttatcttgaaagacaacccagttgctggcacaaatggtggtgccacgtgggcctacgaggttgctggccaaactatggtttgcccaataatcattgaggatctttcgccacctggtcagatgcttgttgagatgctttgcgaggaacaagggctctttctggagatagctgacaacatacgtggaattggtctgacggtcttgaaaggacggatggagctctgtgatggcaagatatggtcgcggtttcttgtcgagagaggtcacaaggatggatatatttctgtcgcttgttcagttactggaacagaacagccttgttcgatctactgaccagatggccaaggtcatgaataatggggttccatcctttgcaaaccaccaacggtctccgctgctagttccagtgggcattcctgagagactacagtgacatgcagatgcttcaactagatagagttaggtaccacgactgttaacatatctggtagccggaactccatgcattagactgagcctagtgataacatctgaatgaagatagtctcactgctgctaaagatgactgtatcaagaacatgcatgactggtgcagacatgagcctctagcgcagaaattatgaactttccctgattattagtggtgtgatcagtgaaatggcattatctcctgcttagttggttgacaccttgctcctgagtaactgggtcttgatagtggtgtttcttatgcagcgatggcagtgtattagggtagtagtgctagcttgcagttcgttgcccctgagtcaaccttgggcagttcgtggtaggttcttcatgggcttgggcccaggaccgggccccatgcacgtgcaataagtgcgactgcacagggctcaaaattctgaggggccaatatgtatcaataagcagactaatattacaccatctaagttgaactcagttagcagct

SEQ ID NO: 98693 - DNA, 3289 bp, Zea Mays
tttctctctctctctctccacaaaaccacgagatgtttgttaatcggggccggaggtacaaggtctaagttctagtctatggtttaattgtgactttacctttactttttaaaaccttgtgattttatctccattatattattttaaaacgaaaaacggttctttgcacctaatctgcgctgacgttgtaagacgaaaaaaaatagaaaaagataaaaaaaatcccggtcatgcgcaaagaccgaattaccccgatcttatctctctgttctcctcctccggcccttccccatacacgagatatttccgaaaaatacacagcaacgtgtggctacgccaaaatgtccatcgcagggcacgagcgttaggagcgtcgggcgcggggctcgggggctgtgggcggcgagcagcaggacgaccaggggctgtgggcggcagatcagatctccgcgtttctgctctgttcctctgcacttccactccctcctgcatatacgaactcctcccttgtttcaaagtcgcaggagtaaaacgacagagctaaaacgaaaaaaaaaacaaggaccaaaaccacgattttgctacaaaacggggcatgaattcttaagccccaaatgtttaatccatacccatcctagtacgttcggtaacacgactgagattcccttcgtttctttcaactttgtccagagtgatactagctaagatgcggatgcaggaagctgcccccttacctcagctttttttagctagctaaacactgatcccatcaaaattgacagcaagattgctcacattgggggactgctactgtgaagatgaggcaaaagcaatggttcagaagatgcttaatcttgttgaagttgttggagaaggcatcctaggacaagctctagtaagcggagagtgtcaatggatttacgacgatacttgccacgcgttgaatcagataagccatgctgataacggagatttacatcagggttatacttggtggcagcatcagtttctcagtgggatgaagactattgcagtgttacctcttcagttgcatggactggtgcaatttggttccacacggaaggttcccaggagctcagtttttttgaatcaggtcagagatatatttgatcggatgaagaatgcttcaagcgatggtccaatggagtatacccagaataactctcttgcatgcgcagtatcagggaaagttaaagattgcctgcaaactgagagtgacaagtttctatgtaaatctgtatcattcggcagcaacccttgtgcttctaaattccaagaaaatcgcctatcaccataccatgccctcatgcacgaacaatccctgatacctgaccctggagaatctgtgaggctcctctcacaagaagaatcctttattgttcaaggtgactcaagtcaattcaaggatactgccgactttacaggccagggtaacagtacatttcctgaattacctaacagatcacctgaagaagctactgctgaaactctagaaaacaacatgaaggactgtagtggaaacaacagtctgctggaaactatgatgcttgatcttagcaccaacagctttgtgcaagattggtgggacaacagtgttctactggcagaaaaccttccaaattcaagcgaaaaggacccagagcctgctatggaattggccaataggcattcattgccaactggggagagaggctcgcctttcatacctgtcatcgaacaattgctaggtgatgttgcacatccacctacacctaccggacatagttcacttgaggctgaagctactgctttagctggccgtgtttcagattatcagctgcctcagtttgctttccgagactgcctaacagtagacaacgcacaaatcccagcattggcctgcagtaattacacatgcagaactagaagtgcacaaaatggttcttcagaagtgccatcagcaaacgtatctgtggacgacacctgcagtttgaacacagcaaactccaatggcagtcagtcgagcaatcctgagggaacgaaggttgctaagagaagagctagagctggggagagtacccgacctagaccaaaagaccgacaactgatacaagatcgcgttaaagaattacgagagattgtccctaatggtgcaaagtgcagcattgatgctttgttggagcgaacaattaagcacatgctgtttctacaaagtgtaaacaaatatgcagagaaaattaagcaagctgatgaaccaaagataatcgacaaagggagcggtgttatcttgaaagacaacccagttgctggcacaaatggtggtgccacgtgggcctacgaggttgctggccaaactatggtttgcccaataatcattgaggatctttcgccacctggtcagatgcttgttgagatgctttgcgaggaacaagggctctttctggagatagctgacaacatacgtggaattggtctgacggtcttgaaaggacggatggagctctgtgatggcaagatatggtcgcggtttcttgtcgaggcaaacagagaggtcacaaggatggatatatttctgtcgcttgttcagttactggaacagaacagccttgttcgatctactgaccagatggccaaggtcatgaataatggggttccatcctttgcaaaccaccaacggtctccgctgctagttccagtgggcattcctgagagactacagtgacatgcagatgcttcaactagatagagttaggtaccacgactgttaacatatctggtagccggaactccatgcattagactgagcctagtgataacatctgaatgaagatagtctcactgctgctaaagatgactgtatcaagaacatgcatgactggtgcagacatgagcctctagcgcagaaattatgaactttccctgattattagtggtgtgatcagtgaaatggcattatctcctgcttagttggttgacaccttgctcctgagtaactgggtcttgatagtggtgtttcttatgcagcgatggcagtgtattagggtagtagtgctagcttgcagttcgttgcccctgagtcaaccttgggcagttcgtggtaggttcttcatgggcttgggcccaggaccgggccccatgcacgtgcaataagtgcgactgcacagggctcaaaattctgaggggccaatatgtatcaataagcagactaatattacaccatctaagttgaactcagttagcagctagactgttgctcttcaaacacatctattaatacatatgtttattt

SEQ ID NO: 98694 - DNA, 1328 bp, Zea Mays
ttaattggacaagagagagaggaggggtgcgcggagaggagacggagcggaggaggaggcattctctctctctctctcttcctcctcggtgctcaagaaatccatctagcggaggcgcatcttctccaccatcatcccttctctccaactcccccccccctcgggaattgtgggggtagcaaaggaactggagttcttgcatggatgcagcagcccactggcagcagagcctagggctggtgaagcccctggaggagatgctgatggcggccagcgcgggggctgcaaatccgagccaaggctcgaatccgaacccgccgccgctggcggcgcccctgacggacgcgggtagcaccgagcggcgcgcgcggccgcagaaggagaaggcgctcaactgcccgcggtgcaactccaccaacaccaaattctgctactacaacaactacagcctccagcagccacgctacttctgcaagacgtgccgccgctactggacggagggcggatccctccgcagcgtccccgtgggcggtggctcccgcaagaacaagcgctcctcgtcctcgtcctcgtcctcgtcctcgtcggcggcggcggcgtccgcctccacctcctcctcggccacgagctcgtccatggccagcacaccgggggcggcgtccaagagtccggagctggcgcacgagggcgcgcacgacgacctcaacctagcgttcccgcaccacggtggcctgcacgccgccgagttcgcggcgttcccgagcctggagagcagcaacgacatgtgcgaccagggtggcgggatgacgagcaatggccggggcggcggcgcggggcccgcggtcggcgcgctctcggcaacggagctgttgcggagctccggctgctacatgccgctgcagatgccaggaggagattacacggcggcagggttcgcgctcggggagttccgcacgccgctgctgccgccaccatcgtcacagagcccgctcgggttctctctggacgcgcacgggccggggtcgtccggtgctgccgcagcggcggggtacggttccagcgcggggctgccgcagggcgtgccgggcaacgcgggcaggttgttgttccctttcgaggacttgaagccgccggttagccctggaggtggtggtgtgggcggaggtggtgcaagtgcaaccggtggcgccggcgacggaaatagcagccacgatcagtttgaccacaacaaggagcgaggcggaggcggcggccgcggtgccggtgccgggcacgacacgccggggttctggagcagcatgatcggcggcagtggcgcttcttggtaa

SEQ ID NO: 98695 - DNA, 1263 bp, Zea Mays
atggcttttcttctctctcctcggctcaccaccccttgcatcaaaagaacaaccatgctgtcccagggtgatgtgttgcagacttgcagtgcagcagcggtactgaaacacacagcacaaccctacaagagcacaagcagcaaaggtgtgttttgtgctgtgagcctagggctggtgaagcccctggaggagatgctgatggcggccagcgcgggggctgcaaatccgagccaaggctcgaatccgaacccgccgccgctggcggcgcccctgacggacgcgggtagcaccgagcggcgcgcgcggccgcagaaggagaaggcgctcaactgcccgcggtgcaactccaccaacaccaaattctgctactacaacaactacagcctccagcagccacgctacttctgcaagacgtgccgccgctactggacggagggcggatccctccgcagcgtccccgtgggcggtggctcccgcaagaacaagcgctcctcgtcctcgtcctcgtcctcgtcctcgtcggcggcggcggcgtccgcctccacctcctcctcggccacgagctcgtccatggccagcacaccgggggcggcgtccaagagtccggagctggcgcacgagggcgcgcacgacgacctcaacctagcgttcccgcaccacggtggcctgcacgccgccgagttcgcggcgttcccgagcctggagagcagcaacgacatgtgcgaccagggtggcgggatgacgagcaatggccggggcggcggcgcggggcccgcggtcggcgcgctctcggcaacggagctgttgcggagctccggctgctacatgccgctgcagatgccaggaggagattacacggcggcagggttcgcgctcggggagttccgcacgccgctgctgccgccaccatcgtcacagagcccgctcgggttctctctggacgcgcacgggccggggtcgtccggtgctgccgcagcggcggggtacggttccagcgcggggctgccgcagggcgtgccgggcaacgcgggcaggttgttgttccctttcgaggacttgaagccgccggttagccctggaggtggtggtgtgggcggaggtggtgcaagtgcaaccggtggcgccggcgacggaaatagcagccacgatcagtttgaccacaacaaggagcgaggcggaggcggcggccgcggtgccggtgccgggcacgacacgccggggttctggagcagcatgatcggcggcagtggcgcttcttggtaa

SEQ ID NO: 98696 - DNA, 1761 bp, Zea Mays
caaagaacaccaagaggagcatcagccattacattgtgttcagcctatagccagagccagctgatgaactagagctagtagggttctactgacgagctcctgctgcctctatctgcagcctccctcctgtcctactactcctccgcggtggtgccggccggcgaggccccccttcttacacacgacagacaggtacgctgcaacggaactgaagcaaagacgacagaggccggggcatacatggagatggccgcggcggcgaagggacgacctattagtgccccgccagagtggcgggtgacggtgcccgagggcgcctcggtggcggtggagcacgaggcggcggcctgccgggccgcgcgggcgtgggcgtggctggtctcgtgcgtgctcgcgttctgggacagggggcttggattcggcaggcgtgtctggaggatcggcgccgacgaccccaggagggcggtgcacggcctcaaggtcggcctcgccctcacgctggtctccgtgttctactacagcaggactctctacgacggcgtcggcggcgctgccatgtgggccgtcctcacggtcgtcgtcgtcttcgagtacactgtcggtggctgcgtgtacaagggcttcaaccgagccttcgcgacggccagtgccggtgcggtcgcgcttggcgtgcattggatcgccagcaagtccggtgacaagctccagccgttcatcacaagtggatcagtttttctgcttgctgccatggcgacgttctcgcgcttcatcccgacggtgaaggcgcggttcgactacggcgtcaccatattcatcctcacctacagcctggtagccgtgtcgggctaccgcgtcgacgcgctcctggcgatggcgcagcagcggatgtgcaccatcgccatcggcgtctccatgtgcatcgccatctgcgcgctcatctgccccgtgtgggccggccaggagctgcaccgcgccaccgtgcgcaacatggacaggctcgccgacgccgtggaggcctgcgtcgatgactacttcgccgccggcgccggcgcggaggcgagctccaagcccaacacgaaggcggacgaggggtacaagtgcgtgctcaactccaaggcgtccgaggacgcgcaggccaacctggcgcggtgggagcccgcgcacggccggttcgccttccgccacccgtacgaccagtacaggagcgtcggcgccgccatgcgccactgcgcctactgcgtggaggccctgcgcggctgcgtccgctcatcggcggcggcgccctgccacgccagcaggcggcacctggccggcgcgtgcacgcgggtggcggggcagtgcgcggcggtgctccgcgcggcgtcgacctccgtgaacacgatggcggcgccgtcgcggggcctggacttggccgtgctggagatgggcgccgccgtggaggagctgcaggccgacctgaggacgctcccgtccagcctgctgcttgctgccgaggcaacggcggcggcggagcccgcggctccgacgacgatggtaatggtaggcgcggcacagctgttcaccatcgcctcgctgctggtagaggtgtccgtgaggatcgagggcgtcgtggacgccgtcgacacgctggcgaacctcgcgggcttcgacctcgagtcagcaggcgacgaaaacgagaagcctgcagagcccgcgaaaaacgtgaccgaacagtcggaagggaataataacgggtcgacgacgatgaagatgccagcttga

SEQ ID NO: 98697 - DNA, 2709 bp, Zea Mays
atggaggcggccgcctccagcctctcgacgctgctctccaccttgcgcgtggacgggccctggacgcctccgggaacctgggagtcggccatccctgagagtggcgccgctcgcgttacagacctcggaggacgcctgcagccgatctacgagctcgcatcggttactgatgatgctttgattcatctggccttgcatgcgctgtatggtgtcaaatcatcgttagatgagattgaggagctttcagtgctgttctcctcaaatccagctgacagaacctctaaccgtgttacaaatgtgtggttacgttcctcgagcaccatatctgtggggagtattctcaaatctttacgctctacaggtcttgtggtcttcttcctttgcaagtttgtgcacttttatcttgtccaaagtcgagaaatgaattgtgcaagtagagaagttcatgaacatgaacatcctggtgataaagacactgaacagcatcggccttacagtctagtaaaccaagcatttgcagctgcagttagtaaggtcctcgaaggctatttctgttccttgaatactttaccagcatcaattaggcttaggcgttcagttggccaatctggtataccttccaagacttcagatggaatgagttgtaattccactgcagaagtcactcttctggaagtttatctacacactgaagagttaagaaggcatgttaaatcccttggaaatatttgtttccctaagtttgcaggtgctacattgtgccatgatggtttggatactgaagcaagtgtggagtttgagaatttcccacggggcactgatttgctttcgtatttgtatgtctatattcgtgatgccgatccagttcactatggtcttctgaagtatctttttattcgttcctgtgagccatactttaacttcattaagtcatggatttaccgagcttctgttgatgacccttatgaggaatttctcattacacaaactgaaaataagggtgttcaaggagtctcttctgacataacagatgagttcacccttttcccgttaaagcaagaatactttatttctcagaagtcaaccatgaagcttctttcttcccaatccagttcagtttaccatggaataaattgggcagtccctattgatgagtgcgagaaagatgacagcctaagttgcaaacatgttcctgtgcactcacagaatgctgaacatactgcggtgcttgatggtttagaactggattatcagtatagtcagttttcgccatttgacaggtttatgaagagaaccagttgttcatctgaagacatgaattcagttgagttcttatatactgatcataaaaggtcagtagagaaagtatcacatggtaatgcagttaatgcattacattctgaatcagggcctactaaactatcaaacggcaaaaactatgagaagtttggtaatataaatcagccatggtataccagtattccttacaatctcagtctgaaccccatactgaagaatgcagcttgttactgcacggagagtgatgtgcaacagaaaagcaagaaccaatcacttgccagctttgattttgagtcagtcatggatccatgtgaagtatattgtgcaaggagcacatcctgccttgttgagtttgtaaatggagcaacaattatacagcccagtactcatccttgtgaacggcttgattgttctcccaagcttcttcaagctcagacaagaagtcaggcatcccttacttcctcaggagagatgtcaacaagagacagtcttcagaaaaatgtttatggtggggcattctgggagagatcgttactatataatgataaatcaaaagaaaaaccagctgtggactttagttcacagtttgatatgccccttgatatagttatcaacaagtataaatatgttagcagcttcacaatgaagttgcttgaggaaggttttgatctttgtgcacatctgctagccctgcggcggtaccatttcatggaaatagctgactgggcagattcctttattgctctaatttataataagaaatggtcatttgttaaatctgagcagaaaagatcggagattcaagggcttatggactttgctttgcagagatcttcatgtgattctgatccttataaggaaaggttatttatatacatcagggagccacctgttgattcttttgatgcatctgcatgtgatcttgatttgctggatgatatcttgttgggttataaagctgaatggccagtgaatattgttattacagaagacacacttaaaatatatgctgaaatattctgttatcttcttcaagtcaggtttgcagtgttttcactgactgaagtatggagatttctaaaggagttgacacagttcatcagtcgctccagccatagaggatctgacgtgttgaagaaattgaatgttgtaatgaaagtgaggcataaacttcatcactttctatcaacactacagcagtatctccactgccatttatctgatatttcgtggcgccgttttcaacattcccttaaaaatcaggtcagggatatactggatttggagtatgtgcatatgtgttatattactgatgcacttgacatttggttacgtgaggatatggagtatgaacatacttatagagtaataaatagatttatagatgacatgggaaacattagtacttag

SEQ ID NO: 98698 - DNA, 1184 bp, Zea Mays
tgacatgttcttcagatgtttcttatctgatgagtcaaaacaagttgccacgataatcaaaagcatgctgcaactggctttggagttacgatcatgctttcaaagtattggtgacacttgtgatttaccagtaaatcaactcagtaatctgcaataccttataaacttctctcaggtggacgtaattagaacaaagttcgagggtaacatcaaagatttgtatgttttgcattcgaaatcttcaaaatatggggagctcggtctttcccgtttctgggggtatcagaactacaatgagtaccattctatgaaagttagcaaagatatgggcagcttctgtttttgatacgacatcttaagaccgaaggtttgcctttatctggtggggaatagctcaccttttaaaccattggtgggatcattgtgtgcatttgtttgtttcatggtagtgcagagaggtgcatcatctagttccgggtcttctggaatcactacagctttttgagccacccatgagtcatgacagaaattattgcttgtttgtgctggttgtagtgccacttgcggcgcatgtgcaagtcatgaggcatacacgctgatttgatgaaattgccccttgtattggttttggcgaactaaagagaactgcggttcagacatgccatatacttggagatgcattggtggttgattgtaaggttgcaagtgcatctcaaatttacaacaaaaatgggaaatcacgtgacttgattatcctccattcagccctatacatacgctatataatgtatatgccattgtacaacacgggctttgacagacaccagctaggctccaaaagggcatcccatgtagtagcttcacagtgtgttgctggatcacaaggaagtttagttatgtttcccaagcacagctggagaaagttagtttggcgtcagatgtattatgtatatttagttctgactaagctgtacaaagctagcagaagtgcgcaaatgtcctttctggatcgatctgcctgtaattttgaatctgcacatcgaagtaagcaggaatgtttcgtatatgtgccttcttaattttatagtttgttattgcaactgcaaccaagctgcatgggactacgcatgtacagcactagcttgcatggtaggatcacaaaactagtttgaacttcaacttcc

SEQ ID NO: 98699 - DNA, 297 bp, Zea Mays
atggacagggagagttccaggctaacgcccgggccgacgaagcagcctgaatggccggagcagcagcagtcgctagagctcctcctcgcaggcgaggccgccgtgaggatgcagctgctctcgccgctcggcgaggaggttgccatggcacgggcgccttttgtgtccaggccaagggacagcgagagggagcactgctcatcagacggctcgtcgtcgttcgctgcattgctgaagctgctgctggagaggagggggcatccgtttccgtcctcttcgctggagtcgtcctgctga

SEQ ID NO: 98700 - DNA, 802 bp, Zea Mays
gcacccagtccacccaggccccagcactgccgctgccttgcctgccctcgcttcggcgctttctgctttctccagtgagccgcacccgcactaccgctgacgctaattaaccacaagcgaccgtcgccttcccccacctcctcccttcctcaaaaaaaggcggaggcgggagtggtggtggtgctcgtgggcacgcagcggagcaccctgtacagcagcagcgctgcggcagtagagagtgccattggtggagctggtaactagccctcccccctccgttcccgtcccgcgcgcagccgtctgccgagcctgctcaggtgtgcagtgctcgtattcgggtggactgattacttcgttaaagcctcagcatagtgatgtagccttcctccctctgctggctatatgcttgtatggttatttgcctctacgttagggttaaaaaaaagtccattctgtttatgtgtattttctttgctgtcccttggtatccatctgtggttaatttgggttcaggttgctatttttgttgttgtctttgtatctggctgactgacaagcgagggttcttttttttagcgcaccacattgtgatgagtgaaactgaagcctccgctatgatttctgttgtgttctagccatagtttatgcctgatgctcgatgttctcacttggcgtgaactctccaccttgattacaagtgcaagcatagagtaagcagttttatacactcaatgatgcaacactgcattgccaaaaaaaatcatgttccttaaatggttaccaaattgtttgatgttatctt

SEQ ID NO: 98701 - DNA, 3279 bp, Zea Mays
atggtgaggaagaagagaactggccctggtggctctggagaaacttctggagagtcttcaggagcctctggacaaggttcctcacagcagcctgagcgaactcaacaacctgggggaggacgtggctgggtgcctcaacagggtggccatggtggtgggcaacaccagggtcgtgatcgacattatcagggacgtggaggaccagggccacatcaccttggtagtggggcacctgagtatcacccgcgtgaataccagggacgtggtggtgaatatcagggacatggtggtgagtaccagggacggggtggtgactaccagggacgtggtggtggccgctccagaggtggaatgccacagccatactatggtgggcataggggaggtaatgttggacgcaatgttcctccaggtccgtccaggacagttcccgagctgcaccaagccccatatgtccagtatccagccccggtggtttcgccctccccatcgggacctggctcatcctcacagcctatggcagaggtgagctctggacaagtccagcaacagtttcagcaacttgccgatcgtggtcagagttccacgagccaagaaattcaagtggcaccagcatcaagcaaatcggttcgattcccgttacggcccggcaagggcacttatggggacaggtgcattgtgaaggcaaatcatttttttgctgagcttcctgacaaagaccttcaccaatatgatgtatctataacacctgaggttacttcacgtggcgtcaatcgtgctgtcatgggtgagcttgtaacaatatatagacaatcccatttgggtgggcgtctacctgcatacgatggaagaaagagcctgtatactgctggaccattgccatttacttctatggcatttgaaattaccttgcaagatgaggaagatagtcttggcggtcgccaaggtggacataggcgtgagagagtatttagggtggtgatcaaatttgcagcccgtgctgatctccaccatctggctatgtttctagctggaaggcaagcagatgcccctcaggaagctcttcaagtgcttgacattgtactacgtgaattgcctaccgcgaggtattctcctgtcggtaggtcattttactctcccaacttagggagacgtcaaaaacttggtgagggattggaaagttggcgtggtttttaccaaagcataaggccgacacagatgggcctttcactgaatattgatatgtcctctactgcatttatcgagcctctccctgtgatcgattttgttgctcagcttcttaacagagatatctcagttaggccattgtctgattctgatcgcgtgaagattaaaaaagccctaagaggtgtgaaggttgaggtgactcacaggggaaacatgcgcagaaaatatcgcatttctggcctcacctcacaagcaacaagagagctatcgtatgtgtctttcattgctggtatgagattccctgttgatgatcgtggtactgtgaagactgtggtgcaatacttcatggagacttatggttttagtatccagcacaccactttaccatgcttgcaagtgggtaatcaacaaagaccaaattatctgcctatggaggtttgcaagatagttgaaggacagcgttactcaaagcgactcaatgagaaacaaatcactgctctactgaaagtgacctgccagcgccctcaagagcgcgagctggacatcttacagactgtgcatcacaatgcatactatgaagacccctatgcactggaatttggtataagaattgatgaacgtcttgctgcagttgaagctcgtgttctgccaccaccaagacttaaataccatgatagtggccgagagaaggatgttttgcccagagttggccaatggaacatgatgaataagaaaatggttaatggtggcagagtgagcaactgggcatgtattaacttctctcggaatgtgcaagatagtgccgctaggggtttctctcatgagttggcagtcatgtgccaaatatcaggaatggattttgctcttgagcctgtgctgcctccagtgactgcaaggccagaacatgttgagagagcgttaaaggcacgttatcaagatgcaatgaacatactgaggccacagggaagggaacttgatctgctgatcgtaatactgcctgacaacaatggttctctttatggggatctcaaaaggatctgtgagactgaactcggattggtctcccagtgttgtctgactaaacatgtttttaagatgagcaagcagtaccttgcaaatgttgcactcaaaataaatgttaaggttgggggaaggaatactgtacttttagatgctttgtcaaggagaatcccccttgtcagtgacagaccgaccataatatttggtgctgatgttacccatccacatcctggagaagattccagtccttccattgcagccgttgttgcttcgcaagactggcccgaggtcacgaaatacgctggactagtgagtgcgcaagcccatcgccaggagctgatacaggatcttttcaaagtatggcaggacccgcagagaaggacgggaacttctcatttctttcaagagggcaactggacagaagccccagaggatcatattctacagtttttgagtttcagggatggtgtcagtgagggacagttctatcaagtattgctgtacgaacttgatgccattagaaaggcctgtgcgtccctggagcccaactaccagcctccagttacttttgtcgtggtacagaagcgccatcacactaggctgtttgcgaacaaccacagtgatcagcgcacagtcgatagaagcggaaacatactgcctggcaccgtggtcgattcgaagatttgccatcctactgagtttgacttctacctgtgtagccatgctggcattcagggaacgagccgccctgctcactaccatgtcctgtgggacgagaacaagttcacagctgacgagctgcagaccctgacgaacaacctgtgctacacgtacgctaggtgcacccgctccgtgtccatcgtgcccccggcgtactacgctcatctggcagccttccgagctcgcttctacatggagccagacacctctgacagcgggtcactggccagcggtgcccgtggccccccacccggtgcggcacgcagcagcacgagaggggccgggagtgtcgaggtcaggcccctacctgctctcaaggagaacgtgaagcgtgtcatgttttactgctga

SEQ ID NO: 98702 - DNA, 705 bp, Zea Mays
atgcctcccggtcccggcgtcgcagaccaggcggcgccgccgcggagccctctccggggcaacggcgccatgccgccgcagagcccgctccgcatcaagcaggacggcaagttctacgagcggctcctcaccagggagagctccgcggccaacctgtcgttccggtactactgggcggagccgggcgcggtgccgttcgtctgggagtcgcagccgggcacgcctaaggacgtcgcacggacggccaccggcgcgctcccagccatcacgccgccgccgtcgtaccttctccggcacggcaacgtcgcagtcggtaggcaggtggcggccgcctcggtggcacgccgtgacccgaagagcggcggcagggcggcggcgaggagcggcaagaagcggcgctgcaggctcaagaggatcaggatcagcttcgtcgccggcatcttccggcggctcagcctcgggaagaggtggcggcagcgcccggcgccgccggccaaggtgtggtcgtcatcgtcttccagccggtggctcttctcctcggtggccacggagacgggcgagcacagcctccaccaggtccaggatgagatcgccgttcccgcgcacccgaaacagcacaggaccgtgccggtgccgtgcaggtgcagctttcccgccatgtggctgctgcgcttccgcaacagcttcggccacggctgggcgtag

SEQ ID NO: 98703 - DNA, 814 bp, Zea Mays
gtaatcatcagcaccatatatacgccggtgtgaagtggccgcgcgaggtgccagtttcgttctcatctccgttctctggattgtcccccgctcccctcttccggtcttccactcttccccatgtcggacgcgtataggaaagccaagcccggccgcctcgtcttcaagggcggcgaagccgcctccatccacaagccaaagaagcacaagaagaataagaagcccgcgtcggacgccctcgccgacggcgacatcgaggccgcagccgcggccgcggagggtgctgaaggcggcggaggtgccggcagcggcactggcgacgactacaccatcgacgcggcgaagaagatgaagtacgaggaactcttccctgtggagtcgaagaagttcgggtatgaccccgacaacgccgcccgcgctgccgcccggaaccgcaccgtcgaggaagccctcgacgaccgcgtccgcaagaaggccgaccgctactgcaaatgaggttcactcattggtcattgctgttgtttgcagctgtattgctcagtgtattgaagatggcctctttggagaattatgatccttcacggcatgttgtttagtagtcaaagtgctagtcaagcattttccttatgcatatttgtactagtaattagcaaacataaggattcttgcacatgttattccgataaacttgttctgccctctttgggttgattaagagaatactaccgcctggagattgtttattttgtagtgctgtgttttatgctaatggttagcaacttaatagagaccagaaggtgaaattgagtagtaa

SEQ ID NO: 98704 - DNA, 803 bp, Zea Mays
gtaatcatcagcaccatatatacgccggtgtgaagtggccgcgcgaggtgccagtttcgttctcatctccgttctctggattgtcccccgctcccctcttccggtcttccactcttccccatgtcggacgcgtataggaaagccaagcccggccgcctcgtcttcaagggcggcgaagccgcctccatccacaagccaaagaagcacaagaagaataagaagcccgcgtcggacgccctcgccgacggcgacatcgaggccgcagccgcggccgcggagggtgctgaaggcggcggaggtgccggcagcggcactggcgacgactacaccatcgacgcggcgaagaagatgaagtacgaggaactcttccctgtggagtcgaagaagttcgggtatgaccccgacaacgccgcccgcgctgccgcccggaaccgcaccgtcgaggaagccctcgacgaccgcgtccgcaagaaggccgaccgctactgcaaatgagctgtattgctcagtgtattgaagatggcctctttggagaattatgatccttcacggcatgttgtttagtagtcaaagtgctagtcaagcattttccttatgcatatttgtactagtaattagcaaacataaggattcttgcacatgttattccgataaacttgttctgccctctttgggttgattaagagaatactaccgcctggagattgtttattttgtagtgctgtgttttatgctaatggttagcaacttaatagagaccagaaggtgaaattgagtagtaactgtgtgctgtttgtcttcta

SEQ ID NO: 98705 - DNA, 116 bp, Zea Mays
ttttttttctatgtcaagcattgttagtcgcacacttttgttgattatcttattcctaattggtatacctcttattttcttttgctttggactgttacttgtcaataccagtagtc

SEQ ID NO: 98706 - DNA, 1909 bp, Zea Mays
tccagttgcgacggggtgtccagacactcctttccttgtatcctctgatccacatcctacgtgctacagtctagaagcacttgattgcagccttgaaacttccctggcgcaccaacgcgacgccatggccgcaatggtaaggtctttgtacctgtgcagactgcagaccgcagtcttttccacattttgctcaaaccaaatgtcagcgtgtcgtgccacattggactcacttggatccatgaacttgacatgtctctttgggttcaagaacttgacaggactgcaacgtagcagcaggcactgcactggcacagctagttccgtagtatatttcatggcccaagaagcacacgaagctccagtagtcggtggcagtcgcagcagctcctccccttcacgagacaccggcatgtgggagtctcctcggcagacgcaagcgcacacgcccttcccctcctggatcccctacgccggcacgttcgccgccggggtcggcatggtggcagcggcagactcgagcctgccgagcgagcgcggccccggccccgactgtgcctggaaccagagcgcccccagcgtgggagcgcgtgacgggggcagcggctaccgagggaactacttcctgtctctgctcgattcgaagaacgtgacgccagagatgttcgaggacgacgtcgtcgttcttcccgcggcgtcaccgtctcgcgactacctcggagtcggaggaggggcggccgccgccgccagcaacatggccggcccagccgccgcctatggcctcctcgacccgtactactctcctgttgttgccagccgtgctcctccagtcgaccatgagacggcgagctcgccactcgtgtactcgggggacggtgtggtgcgcgggaccagcatgccatgctacgacgacgaccacgaggagaaacggccaactggtggcaggcagccgcagggttttggagctcccgcggccgcgtttctgcaggaaatgatgatcccgagccgagtggagacgaagctccagagtggcctgggttatttaggcatggtgtctcaaagtcgactcgagacctcctttggcgtcgtggggagcttgccggatgctgctggttctttcagtgacgagtacaacagcaacaggtcaagtgcggacttcatgtccagcaacagcgacagactggagcagcgggtgggcggtagcagcagtggaagaggagctgccacgaggaggaaatcagatggagggcttggaggaaacacgaagaaatctaagcaggaggcttcccccaagcagcctcaagcgcccagagtgaagataggagagaagatcacagctttgcagcaaatcgtgtcacctttcgggaagactgatacatcatcggtgctgtttgaaacgatcgagtacataaaatttcttcatgagcagatccggatgtttagtgaaccgtacatgacgaaaagcacgtacaagggtcacattggactcagaggcgaagaggaggaaagcgggacggggcatgatttgaggggcagggggctctgcctggtccctgtttcgctgacctcgcaagcataccaggatgacaccctgccggactgctgggcgcccgcgtacaggggctgcctgtaccgatgagctcggcatggcgacgactgcatggttaagattcagctaggatctgcaacggctagtcgttggaaactcagaatgatgtgcttgtttctccttgttttattgtcctctactgtagtacttcctttagtagatttccagtgtagcccggaacaacaagaatgtataggcagcaaatcaggccttggctctcagaaaagccagtagcagtagcagaggtcaggcagtcagatgacgatttgccgacacagctcacagcccataattccaaacgtt

SEQ ID NO: 98707 - DNA, 2038 bp, Zea Mays
atgtccacggcgctgctcaaagaatggtccacgggccacggcgcttctccgactgccgctactacctctacaaagcgagaaaccgcacggcacgaggctccccaaattccccatttttacggacaccagcaagccacgccacactcccaatcgccgcagcagctggtcccctgctcggctcgtctgatccagcggctgaatccgcaggccatggggttcgacaaggaggcgagctcctcctcctcgcggctcgacgcggcgccgctgctcccgcagcacggcggcggcggcgcgggcgggcacctgtcctcgcagcccaagacgttcgccaacgtcttcatcgccgtcgtcggctcgggcgtgctgggcctcccctacaccttctcccgcacgggctgggcggcggggacgctgctgctcctcgccgtcgccgcgctcaccttccactgcatgatgctcctcgtcgcagcgcgccgccggatcgcggacgcgcaccccaagatcgcctccttcggggacctgggccacgccatctacggcgcgcccgggcgccacgcggtcgacgccatgctcgtgctcagccaggccagcttctgcgtcggctacctgatcttcatctccaacaccatggcgcacctctaccccatcgccatcggggcccagtccccggcgtcgccgctcctaacggccaaggcgctcttcatctgggccatgctgccgttccagctcggcctcaactccatcaggacgctcacgctcctcgcgccgctcagcatcttcgccgacgtcgttgacctcggcgccatgggcgtcgtcctgggccaggacgcctccgtctggctcgccgacaggccccccgtgttcgccttcgctggccccgcccagctcctctacggcctcggcgtcgccgtctacgccttcgagggcatcggcatggtcctgccgctggaggcggaggccgccgacaagcgcaggttcggcgccacgctcgcgctgtccatggcgttcatcgccgtcatgtacgggctgttcggcgccatgggctacctcgccttcggcgccgccacgcgggacatcatcaccaccaacctcggcaccggctggctctcggtcctcgtgcagctcggcctctgcatcaacctcttcttcaccatgccggtgatgatgaacccggtctacgaggtcgcggagcgcctgctctgcggcaagcgctacgcctggtggctgcgctggatcctcgtcgtgctcgtcgggctcctggcgatgctcgtgcccaacttcgcagacttcctctcgctcgtcggcagcagcgtctgcgtcgtgctcggcttcgtgctgcccgccgtgttccacctcaaggtcttcggcaccgagatcgggtgggccggcctcgtcgccgacgtggccatcatcgtcaccgggattgcgctcgcggtgtccgggacatggacgtcactcgtacagatcttcagttcttccgacctgtaagcatcgacagtctgatatgtgcaatgggagggctcaaattggttccaatagattgagacacaattcagcgaccgggataacactgcatgcatttgtggacgtccgatcccgcaggcgatggttcagatccgatggttgaacagcaatttcttaaacactagccgcagtaccgactgcattttatccagctgccatgtcgattgagcattttatccgatggtaaagtatgggaacaaactattgttgggagctctctgaaatctacattggtttggttcagatagagccatatagattccagctgtaccaggcagcagatccatgtgtaaagcctatatgatgttgtattgaattgaatcgatgactgctttatgcaagattcttttgtccaagagtgactgctttatgcaagattcttttgtccaaggggtttgtagttctctattgttagtatcaccttataagatgttttagtttttctaaatatttttttactacacatctaaacataatgtacaagttacacaatacaagagtgactgctttatgc

SEQ ID NO: 98708 - DNA, 1504 bp, Zea Mays
agaaaatatagaaagagaaaacagttgaaacctccatacctgagtattgacgggtcggtggatgtggctcacgcctcggcgacttcagccggcggccaggggcgttagacggcggcactgtacgtggtccgcagctgagcaattggcagatgtagtgataagctgatccgtcgtctcccgtcttcccgacccgggtcccgcctcgcccgtcgccgccagatccgacgcgctggatcgccagcggcctgctgctgtcgatccgacgtgcggcagtctgctcttcctgccgtttccctgcgcttggggtccataatagcacgcatctggccggctcaagagcatagtggatctgaccggaggaggccgctgctgctgcttctccctcaccgatggcgagggttcgggacaggacggaggacttcaaagaggctgtccgagtcgccgcactctcccatggatacacggaggcccaattggccgcgctcatgtcttctttcatcatccggaagccgtcgcccaagtcaccgttcactaatgccgcaatcaagacgcttcagagcatcagggaactcgagaggttcatagtgaagcataggagggattatgtggatctgcatcgctctaccgagcaagagagggataacattgagcatgaagttggtgtttttgtaaaagcatgcaaggaacagattgatatcttaaagaacaggatccacaaagaagagaagaatggaagtggaaagacatggcttggcactagggatgagagttcacgggtggacttgatagctcatcagcatggtgtggttctaattttgagtgagcgtctacactcggtaactgcacaatttgatcatcttcggtccattcgttttcaagatgctattaacagagcaatgccaaggaagaagattcagaagagaccagaaatcaaacctgctgaaccatccaagtccaatcttgttctaaaatctgatgtatcaaaggttgtagaccatgaagtatctacaacacctatgagagttcaagaacagctattggacgatgaaacaaaagccctccaggtggagttgacaagtcttcttgatgctgtccaagaaacagagacaaagatgatagaaatgtcagcacttaatcatcttatgtcaacacatgttctacaacaagcgcaacaaattcagtatttatatgatcaggctgttgaagctacgaataatgtggagcgtgggaacaaggagctatcccaggcaatccagcgcaacagcagcagtagaacctttctcctactcttcttctttgttcttactttctcgattctttttcttgactggtacaacaactgaattagtctataaagacgtcgtattgttttgctcatgcgaaatgatcaaattatgaaagctgtctatttaaagtgctgatcttttacgtactatgttacttcccaagcatactgtcctatgtgttgttcatctcaatgcgccgggatttgtcattttatctg

SEQ ID NO: 98709 - DNA, 1594 bp, Zea Mays
agaaaatatagaaagagaaaacagttgaaacctccatacctgagtattgacgggtcggtggatgtggctcacgcctcggcgacttcagccggcggccaggggcgttagacggcggcactgtacgtggtccgcagctgagcaattggcagatgtagtgataagctgatccgtcgtctcccgtcttcccgacccgggtcccgcctcgcccgtcgccgccagatccgacgcgctggatcgccagcggcctgctgctgtcgatccgacgtgcggcagtctgctcttcctgccgtttccctgcgcttggggtccataatagcacgcatctggccggctcaagagcatagtggatctgaccggaggaggccgctgctgctgcttctccctcaccgatggcgagggttcgggacaggacggaggacttcaaagaggctgtccgagtcgccgcactctcccatggatacacggaggcccaattggccgcgctcatgtcttctttcatcatccggaagccgtcgcccaagtcaccgttcactaatgccgcaatcaagacgagcatcagggaactcgagaggttcatagtgaagcataggagggattatgtggatctgcatcgctctaccgagcaagagagggataacattgagcatgaagttggtgtttttgtaaaagcatgcaaggaacagattgatatcttaaagaacaggatccacaaagaagagaagaatggaagtggaaagacatggcttggcactagggatgagagttcacgggtggacttgatagctcatcagcatggtgtggttctaattttgagtgagcgtctacactcggtaactgcacaatttgatcatcttcggtccattcgttttcaagatgctattaacagagcaatgccaaggaagaagattcagaagagaccagaaatcaaacctgctgaaccatccaagtccaatcttgttctaaaatctgatgtatcaaaggttgtagaccatgaagtatctacaacacctatgagagttcaagaacagctattggacgatgaaacaaaagccctccaggtagtgtgtggatgttatatgaattattctttagtgaaaaacttggctattttacttaattaccatgcatcatgtgtatcctggaactcttctcaggtggagttgacaagtcttcttgatgctgtccaagaaacagagacaaagatgatagaaatgtcagcacttaatcatcttatgtcaacacatgttctacaacaagcgcaacaaattcagtatttatatgatcaggctgttgaagctacgaataatgtggagcgtgggaacaaggagctatcccaggcaatccagcgcaacagcagcagtagaacctttctcctactcttcttctttgttcttactttctcgattctttttcttgactggtacaacaactgaattagtctataaagacgtcgtattgttttgctcatgcgaaatgatcaaattatgaaagctgtctatttaaagtgctgatcttttacgtactatgttacttcccaagcatactgtcctatgtgttgttcatctcaatgcgccgggatttgtcattttatctg

SEQ ID NO: 98710 - DNA, 1627 bp, Zea Mays
agaaaatatagaaagagaaaacagttgaaacctccatacctgagtattgacgggtcggtggatgtggctcacgcctcggcgacttcagccggcggccaggggcgttagacggcggcactgtacgtggtccgcagctgagcaattggcagatgtagtgataagctgatccgtcgtctcccgtcttcccgacccgggtcccgcctcgcccgtcgccgccagatccgacgcgctggatcgccagcggcctgctgctgtcgatccgacgtgcggcagtctgctcttcctgccgtttccctgcgcttggggtccataatagcacgcatctggccggctcaagagcatagtggatctgaccggaggaggccgctgctgctgcttctccctcaccgatggcgagggttcgggacaggacggaggacttcaaagaggctgtccgagtcgccgcactctcccatggatacacggaggtgtgttgcgtcctcagcttcaccacccgcaccccctcgccagcgtagtgatgaagcctcaccagcggctctcaattattcacgctcattggctcattgtgttggtctgtgtatgctatttaggcccaattggccgcgctcatgtcttctttcatcatccggaagccgtcgcccaagtcaccgttcactaatgccgcaatcaagacgcttcagagcatcagggaactcgagaggttcatagtgaagcataggagggattatgtggatctgcatcgctctaccgagcaagagagggataacattgagcatgaagttggtgtttttgtaaaagcatgcaaggaacagattgatatcttaaagaacaggatccacaaagaagagaagaatggaagtggaaagacatggcttggcactagggatgagagttcacgggtggacttgatagctcatcagcatggtgtggttctaattttgagtgagcgtctacactcggtaactgcacaatttgatcatcttcggtccattcgttttcaagatgctattaacagagcaatgccaaggaagaagattcagaagagaccagaaatcaaacctgctgaaccatccaagtccaatcttgttctaaaatctgatgtatcaaaggttgtagaccatgaagtatctacaacacctatgagagttcaagaacagctattggacgatgaaacaaaagccctccaggtggagttgacaagtcttcttgatgctgtccaagaaacagagacaaagatgatagaaatgtcagcacttaatcatcttatgtcaacacatgttctacaacaagcgcaacaaattcagtatttatatgatcaggctgttgaagctacgaataatgtggagcgtgggaacaaggagctatcccaggcaatccagcgcaacagcagcagtagaacctttctcctactcttcttctttgttcttactttctcgattctttttcttgactggtacaacaactgaattagtctataaagacgtcgtattgttttgctcatgcgaaatgatcaaattatgaaagctgtctatttaaagtgctgatcttttacgtactatgttacttcccaagcatactgtcctatgtgttgttcatctcaatgcgccgggatttgtcattttatctg

SEQ ID NO: 98711 - DNA, 1805 bp, Zea Mays
cagaggaacccaggacaggagaagaggggagggcggcagaccgcagtccaccggccagacagacaggggtgaggcgccgtcgaccgaccgagcgttccgctgctgcttccatggggaactgcctcggctcggacgaggccgccgaactggaggtcgtgaagaactcgggccagccacaagcagctacggcagctccagccatggcgccgcataaatccgagggttcgatgagctcagggtcagggccctccagcagcagcaggtccgctggctcgtccatgagcagcatcgccacgacgaccggtcgaagcggcggcagcaccagcaccagcagcggatcgaggcccctccgcgccgccgccgccgcctcgtaccgggaggaagaagaggaggaggaggaagagaaggaggggaggatcctggaggcgcccaacctccgcatcttcaccttcgcggagctgagggccgcgacgcgcaacttcaggcccgacacggtgctcggcgagggaggcttcgggcgggtgtacaagggctgggtcgacgagaggaccatgaacccgacgcgctccggcatcggcatggtcgtcgccgtcaagaagctcaaccaagagagcgtgcagggccttcaggagtggcagtccgaggtcaactttctggggaggctgtcgcatccgaacctggtgaggctgctgggctactgcgtggaggacagggagctcctgctcgtgtacgagtacatgcccaaaggcagcctggagaatcatctcttcagaaagggcggctccttcgaaccaatctcctggaaccttcggctgcgcatcgccattggcgcggcgcgtggcctggccttcctccactcgtccgaaaagcaggtcatctaccgagacttcaaggcctcgaacatcctcctcgacacgaattacaacgccaagctgtccgacttcggtctcgccaagaatggcccgaccggcggcgacagccacgtcaccacccgtgtgatgggcacgtacggctacgctgcgccggagtacgtcgccacagggcacctgtacgtgaagagcgacgtgtacggcttcggcgtggtgctgctggagatgctcacgggcctgcgggcgctggacacggcccgccccgcgcagcagcacaacctggtggagtgggccaagccgtacctggcggaccggcggaagctgccgcgcctcgtggacccgcggctcgaggggcagtacccgtccaaggcggcgctgcaggcggcccagctcacgctgcgctgcctcgagggggaccccaggagccgcccctccatggcggaggtcgtgctggccatcgaggcgatggagcagctcaggctactcactgtccaggaagaaattacatggactatttctgctggatcaggtcgattgtcagactggtcgattgtcagactgtcaagcccttgcgtcatgcgatctgaggaggatccaggcatcatcaggcgactcggctttgcctcttgctcgcttgcttccgtggacacgacgggtttcagtacatgtgcgcccccaaactcatcgcgacaacaatgcatcacgtcaccaagttcactcatcattggtgtggcggtgggtgcccagggcagttacacgtgcacggtgttcggagccgccgcggtgcgcagcgcagcacagtgcgcagccgcgccgcgccacgccggaagaggtccaggacaagggcaccgaaaaggcccacctgcctggcatagttcagtcctacagctcaccggtagctggcgccgcctggcaggggcggagccaggattatga

SEQ ID NO: 98712 - DNA, 627 bp, Zea Mays
tcaaggatccaaagtttgtgcccaacaatcactggcgatgtctgttgtactgtagatcagtttgacacattacaccaacaagtccaacaggccgttccgtttcttgttggatgcccagcatgcttgaggaatttcttgaatctcttctgtgagatgtcttgttctccaaaccaaagcctcttcattaatgtgacttcagtaaagcagattaatagcactatgactgttgatggcatagattactatgtaactactaactacggtgaagagctatataactcatgcaaggatgttaagtttggcactctgaacacccgtgcaatggattttatcggtgctggtgctaaaacttacaaagattggttggcatttattgggcgacaagcaaaccttaatgagccagggtcaccttatttgataacatttggatcggattttagtgattcatctggtgtgaagcctctaaattctacaatttattcttgcggcgacccttctttgggttgttcatgtggtgattgcccttcttcttctgtttgcgcgggatccttgctgcctcagctgaatacagaaaccgcctgttcagttaaaatgggatctttaaaggtaggcaatatcttgttacct

SEQ ID NO: 98713 - DNA, 94 bp, Zea Mays
gtttggacaacaactttactgcagccttgactgtgctttagcatctaaggacaggatggaggactgcagtttggacagcagctttgctgcagcc

SEQ ID NO: 98714 - DNA, 1810 bp, Zea Mays
tgtttcctctgttctaattaggcattatctactagactgcaaccaggattggagcagcaaattgttctgccacgaaattcctatttacaggattattttgatgaccttgcaaagtacatgaaagtaggtccaccattatactttgttgtgaaggacttcaattacagctctgcgtcggtggatacaaatcaaatatgttcaatcagccagtgtaattcaaattctcttttgaatgagatatcacgacaatcattatcccctgagactagttacattgctaaacctgctgcttcatggcttgatgacttcctaatttggatgtcccctgaagcatttggatgctgtagaaaatttgtgaatggaagttactgccctccagacgatcagcctccatgctgccaactcgatcaggtttcaggctcttgcatgacaagcaaaacctgcagtaactgtacaacgtgcttcctacactcagacttggataatgggcgtccatccacaacccaattcagagataaacttccatggtttcttgacgcacttccatcgagtgattgttctaaagggggaaaaggagcttattcaacaagtttagacctcagtggttatgaaagtggcattatacaagcttcggcattccgaacataccatactccccttaacaagcagagtgactatgttaactcaatgagagctgcccgggacttcagttctaaaatgtccagagatttgcagatgaaaattttcccatattccgtgttctatatattttttgagcaatacctgagcgtgtggaagacagctatcatgaacatatgtgtttgccttggtaccatttttgttgtttgcttcatagttaccagcagtttatgggcttcagcaataattttaactgtgctagcaatgatagtcttggatatgatgggggtgatggccatccttggtattcagctcaatgcaatttctgttgtaaaccttgttatgtcgataggaattgctgtcgagttctgtgttcatatcacgcatgcctttatgattggcactggggacaaagaaactcgtgcaaggcaggctctatccacgatgggtgcgtctgtattcagtggaatcaccttgaccaaacttgtgggagttattgtcctacgttttgcgaaatctgaagttttcgtggtttattacttccaaatgtatttggcacttgtcatcattggattcctgcatgggcttatcttcctaccggtccttttgagtttatgtggccctcctacaaaatgggcgaagccaaaagaacaaagtcagccaccttcagcttcaagtgagcggacttgacaggattttatttgagttggacggttacatactaaaaaatcgaaataggctagtttggtcggtgtgcgtccatgtgctgtcccagtggagcagcagcagtgaggcgtacagcatttgctgaaggtgaaagcagtcttacagatctgtagaaaatgttgtgcatatccatgttagcagccgaactaggttatttggtgttacagtgctacacatggcggggaaggaaactaagaggcgaattggggctcggtgttaactagttgactgcagtccgctggttgtttaatttgtgtcacccaagccgagagtcgagactcgaatagttttgtactgctgttgttttggtatttgctgtgggcattgagcttgtgtctaagttccatatgcttgcgaggcttgtttttatgagaacatatctggtgtatatgggagtttggtgtacatattaaatcaatgtcatttattagatctaacatctcta

SEQ ID NO: 98715 - DNA, 2037 bp, Zea Mays
cgagctgtcccgcccgtccaacgcctcacgctgcggcacactagccgttgccctccttcgctttttctcctttcaaattcgctcccttccctttcccttccctctcacgctgcctcgccgcatctagctaggctgatatccctgctccaaagaacaaaccaaaaacaaaataaaacccgctctaaatctttccagtactccctctctatctctctcatccttcgaatcccaaggaggaggccagagaggagagagtgtgtgggacactgggactagactagagagacgttgccgttgctggttgttgttattaacgccgccccctgcattcctatgctcctcgttctcccggggctcctccgtccgtaaggcaccgccgccgcgtctcggctggaccgacaggccggccgatccgtctcctcctcctcctcctcctgcgggtcggcttcggggacgatggcggcgagggcggctgatgagaacagaaggccgggggtggggaggcccgcgccatgcgtccgagacatggggagccggcgcgcgctcacggacatcaagaacctcgtcggggttgccccgaacccctgcgccgtcgccaagaagcccgtgctgcagaagagcagaagggacgaaaagaagacagcgttgccaagcagccggccgatgacaaggaaattcgtcgcctccttggcgagcaaagggcaacctgaatgtcagccgaccggagctgatccagaacccggagttgatcaacggaaggaaccaatcggcgatggcatcattgatatcgacgtggaactggacgagccggtcgacgatagtgattgtgacgtcgacatgggtgatgagacagagaacaaggacattatgaaccaagatgaatcgctcatggatattgatagtgcagactcggggaacccgcttgcagcaacagaatatgttgaagagctttacaagttttacagagaaaatgaggctaagagttgtgtaaaccctgattacatgtccagtcagcaagatataaatgcaaagatgagagcaattctgattgactggctgattgaggttcactacaagtttgaactgatggacgagacgctatttcttacggtaaacgtaatagatagattcttggaaaaggaagtggttccaaggaagaagctacaactggttggaatcacagctctgcttcttgcttgcaaatatgaggaggtctcagttccagttgttgaggaccttgtgctcatttctgaccgtgcctacacaaaagggcaaattctagaaatggaaaagttgattctgaacacgctgcaattcaacatgtctgttccaacaccttatgtcttcatgaagaggtttctgaaagcagcagacgcagataaacagcttgagctagtgtcatttttcatgctggagctctgcttggtagagtaccaaatgctgaattataggccttcacatctggctgccgctgcggtttatactgcacaatgtgctattaaccgttgccagcagtggacaaaggtttgcgagtcacatagcagatacactggcgaccaactcctggagtgctcgaggatgatggtagactttcaccagaaggctggaaccggcaagctcactggcgtgcacaggaagtacagtacctacaagttcgggtgcgcggccaagattttgcccgcgcagttcatgctggagttaggagggacagcaccgcctccttcaggtgcaatctaattgaatcgccctgttttaactgggtggggtttttttaaaaagattttagcatactctccgtgaacaagatgcagaaaacatcgtgttgatgttgcccaaaagtgcatcgaattttcttggagaattatgattaactgttttttttttctatccgtgtcctgaatgacgagtgacggactgttttgttatactgcggctaataacgaactgtcctgttcatgaatgttgttggaaccttgtaaagaaaaacaagtcctgaatcaaatggtcaaatggatcctttgtccaaaatgttctctc

SEQ ID NO: 98716 - DNA, 756 bp, Zea Mays
ctacactctgacccatgtttcgcctacttggataaacaaaacaccagcaagtagtagtgatcttttgggtttacggttaacagtgacccactgttgtatctcgcagcttgagctagtgtcatttttcatgctggagctctgcttggtagagtaccaaatgctgaattataggccttcacatctggctgccgctgcggtttatactgcacaatgtgctattaaccgttgccagcagtggacaaaggtttgcgagtcacatagcagatacactggcgaccaactcctggagtgctcgaggatgatggtagactttcaccagaaggctggaaccggcaagctcactggcgtgcacaggaagtacagtacctacaagttcgggtgcgcggccaagattttgcccgcgcagttcatgctggagttaggagggacagcaccgcctccttcaggtgcaatctaattgaatcgccctgttttaactgggtggggtttttttaaaaagattttagcatactctccgtgaacaagatgcagaaaacatcgtgttgatgttgcccaaaagtgcatcgaattttcttggagaattatgattaactgttttttttttctatccgtgtcctgaatgacgagtgacggactgttttgttatactgcggctaataacgaactgtcctgttcatgaatgttgttggaaccttgtaaagaaaaacaagtcctgaatcaaatggtcaaatggatcctttgtccaaaatgttctct

SEQ ID NO: 98717 - DNA, 267 bp, Zea Mays
atgacgtccttatgggcgatagcattctccggctggtcgagctcggcggtgctactggcaccgccgagcgagttgcgccggctacgggcaccgccattcccaggtgctgagtactgcccggccacctctttcacgaccacgcccacgctgtcttcctcgccgtcgtcttctaggtccggaataccctcctcctcgcgcacctcccgcgaactccggctcggcatgaacggcgccgcgggcgcagcaggtgccgtggcggagtcgtag

SEQ ID NO: 98718 - DNA, 1969 bp, Zea Mays
aatttgcccgcacaaacccatatatcccaccatacaaaagcgcataacaagcggctcgctggcggcacgacgtcgtccacaccgccgccgcgccgccgcatggcatgactcatcacttcaccaaccctgtgcatgatccagtgggaaatgaaatccacctataaatctcgcgtcccgcgaaccgacccggccgggactcggtaccaaccaacgcaccagccacaagtgacaagtccaatcaccaacaggccgcgtgcgggcagcggccggccactgcaccatgtcgtccagcagggaggtgatggtgctcagcgacagcgaggtgcagtccgccccgccaacgccgcgaccaccgcagccggtgtcggccccgccatcgcagatacacatacactccccgtcgcccgcccgctcgccgctcgccagcccggtcaggaaggcggtggcgggcgtcaagggctacctggaggaggaggtgggcggccacgtcacgcggctcgcggacccgcgcgacgcctggctgcccgtcaccgagtccaggagcggcaacgcctactacgccgcgttccacagcctcagctccggcatcgggttccaggcgctcgtgctccccacggccttcgcctccctcggatggacgtgggcgatcatctgcctgacgctggcgttcgggtggcagctctacacgctgtggctgctcgtcaggctccacgagcctgtcgccggcgccacccgctacagccgctacatgcacctcgccaccaccgtcttcggcgacagatgggccaatatcctggcgctgctcccggtgacgtacctgtcggcggggatctgcacggcgctcatcatcgtcggcggcggcagcatgaagatgctgttcggcatcgcatgcggcgggtcgtgcctggcgcggccgctcaccgccgtggagtggtacctcgtcttcgtgtgcgcggccgtggtgctgtcccagctccccaacctcaactccatcgccggcgtgtctctggtggccgcggccgccgccgtcgcgtactgcaccatgatctgggccgtgtccgtggccaggggtagggtagccggcgtctcctacgaccccgtccacaaggcccccgacgacgacgtggacgccgcactcggcgtcctgaatggccttggcatcattgccttcgccttcaggggccacaatgtggtgctggagatccagggcacgatgccgtcgactctgaaacacccgtctcatgtgcccatgtggaagggcgttaaggtagcatacgccatcattgcgctctgcctgtaccccatcgccatcggtggcttctgggcatacggcaaccagatacctcccaatggcatcctgagcgccctgtacaagttccacagccgcgacgcgtccaggcttgtgctgggggtcaccacgctgctggtcatcatcaactgcctgaccacgtaccagatctacgccatgccggtgtacgacaacatggaggccgggtacgtgcacaagaagaaccggccgtgcccgtggtggatgcgctcgggcttccgcgccttcttcggcgcggtcaacctcctcgtcgccgtcgcgctgccgttcctgtcggagctcgccggcctcttcggagggatctcgctgccggtcaccctggcctacccgtgcttcatgtgggtggcgatcaagaagccgcggaagggcaccgccacgtggaacgtcaactgggcgctgggaatccttggcatgagcataagccttgtcctcatagtcgggaacctgtggggtctcgtggagaaaggcatgcgggtcaagttcttcaagcctgccgatttccagtgataaaaagatgcagatttgtcactcagttggattcgtaatcgtaatgcaatgcttttagatatgttgatttcttcctcaggaatgtataatgttatgtacatattagcaatttgcaagaagcaacgtcgactgaca

SEQ ID NO: 98719 - DNA, 1859 bp, Zea Mays
ctaaattctaaactagtcggcgcctacggtctcgccggctccagggccagggcgtgcggctgagaaggcagggctcgccggcttcggacgacgtgtgtgtgcggcagcaggccggccggcagagctcggattcccggccggtgctgcagcagtgcatgtgcctcctgatccaccgcgcctaacgccgagcaagatgagatcagttcttttcttcgtgtgcatttgcttcctgttcgtgtcgacggcgagggcggaaggcccctaccagttcttcgattgggagatcacgtacggcagtatcagccctattggatctctacaacagggaatcctcatcaacgggcagttccccgggccgaagatcgagtgccaaacaaacgagaacctgatcattaacgtccgcaacaagttgcctgatccgttcttgctctcatggaacggtctgcagcaacgcaagaattcatggcaggacggcgtttctggcaccaactgcccgatcccgccgggccacaacttcacgtaccgcatgcaggccaaggaccagatcggtagcttcttctacttcccgtccttggccctccacaaggccgccggtggcttcggcgctatccgcatcgacagccgaccgatggtccccgtcccgttcccgccgccggccggcgagtacgcggtgctcatcggtgactggtacaccaccaatcacaagtctctgcaacgtatgctggacagcggaaaggaattgcctcgccctgatggcgtcttgatcaacggcaagggtggtgcggacgttgtagatttcgccgtcgagcaaggaaagacgtacaggctgcgcatctcaaatgttgggctgcagaacacactgaacatccagatccaagggcacaagatgacgctggtcgaggtggagggcacgcacacggtgcagaacgcctacgcctccctcgacgtccacgtcggccagtcgctctcggtgctgttcaccgccaaccgccccgccaaggactaccgcatcgtcgtctccacccgcttcaccaacgccacccgcctcctctccaccgccgtcgtccgctacgccggctccagtggccctgctcccgggccactgcccgctgggcccggcgacgacgttgacttctccctcaaccaggcccgttccatcaggacgaacctgacggcgagcgggccgaggccgaacccgcagggctcctaccgctacggctccatcaacgtgacccgcaccatccggctggccagctcggccgggctggtccgcggcaggcgccggtacgcggtgaacggcgtctcgttcgcggaggccgacacgccgctcaagctggcggatcactacaacatcagcggcgtgttccggctcggcggcatccccgacgcgccgccgccggccaccgcggaggaggtgaggaacgagacggcggtcatggactcggaccaccgctccttcgtcgaggtcgtgctcgagaacggcgagggcggcggcgtccagagctggcacctcgacggctacagcgtgttcgtcgtcggaatggacgtggggacgtggagcaagaagagcagggatggctacaaccttgtggacgctgtctcgcgctgtaccgtgcaagtgtacccgagagggtggacggcggttctggtcgcgctggacaacgtgggcatgtggaacatgaggtcggaggtgtgggcgcgcaggtacctgggccagcagttctacctccgcgtgtacacgccgtcgcactcgttccgcgacgagctgcccatcccggacaacgcactcctctgcggccgcgccgccggccgtcaccacagccagtagccgccgccaacccctgccgcggcggtactag

SEQ ID NO: 98720 - DNA, 1176 bp, Zea Mays
atggccagccgcggcggtgcgttcgtgctcctcgtcctgtgctcgctgcccgtgctcctcgcgccgcaggcggcgggcgccacgatgaagcccctcgtgccggcgatgttcgtgttcggggactccctggtggatgtcggcaacaacaaccacctgcgcaagtgcaacgacagctgcaaagccaaccaccggccctacggcgtcgactaccccagccactcgccgacgggccgcttcagcaacggctacaacatggcggaccagctagctcagctgctgggcttcgcggagagcccgccacctttgctctccctgacgaacgcggcgaggctcggtcggctgaagagcacgtgcggcatcaacttcgcgtcgggagggtcggggctcctccctacaaccggcggcgcttctgtgtgcggcggcgaggtggtttccatggccgagcaggtcggcaacttcacgcgtctcgtccggacgtgggaaaggcagaagcggagacggcaggcagcagaggcggcccgcctcgtctccaggtccctcgtcttcatcagcgtcggcagcaacgacctgttcgagtacagcgacttcttcgcggatcctaggaaccggaacgccagccgcaacgacgccgcgtttctgcagggactcgtcgctttttacgcggcctacgtgaaggacctgtacgccgccggggcaaccaagttcagcgtcgtgagcccgtcgctggtcgggtgctgcccgtcgcagaggaaggtagcgcgggactcgcacgacctggacgagctgggctgcctccgcgcggctaacaacctctccggccagctatacctcatgatcggctccatgctgcggaacctcagccaggagctgcccggcatgaagtattccctcggagacgccatcggcatggcaagatggatattcgcccacgctcgcaggcctcccaacaaattcagttcgatcggccggccgtgctgcgggtcaggggatttcggcgagaccgggtgcagcagcaacgttgagctgtgccagaaccggagcagcttcttcttctgggacaggttccatcccaccgaggcggtgtccgcgctcacctcgatacagctcttctgcgacaacgggaccttcgtccacccgatcaacgtgcagcagctggtggcgtcgtcgcggccatga

SEQ ID NO: 98721 - DNA, 895 bp, Zea Mays
cacccaaaattaaattcagctcggagactataagcaccacgtcgagctacaatttagcccatacgtcgagtacctaatgaacgacacctcgagacttcgctttcattcaaccaaacttccagggatttctctcctcacaagcacaccatacatacacatgattagcatctaataaatcggcgtcgaatacatgtaccggagagaaataaacacaaggaaaacaatgggtcctcaccgggattcgacaaggtcacaactggggctgcacaaatcgaggtggagcttgttgctgtatttcatcgagcatgccaagggcactacatagaggtgattctatatccgctgctgctgcgattgtacgaaaccctacgggagacgcagccatggggaggagtagatgcgtgggttttccatggaaaacaagaggagaaggggcgccatggcttcttgctgcaggaaagaaaatcgtcatccatggaagaggaggtcggcggccatggctgatgaaggctctgcacggctggcagcattgggaacttgcgagcaaccattagggagcggctcgacgagcaggagagggcagcaccggcatggagagaaagatgaagggagacgtcgtgctcatcaacaggaagggaaggaacagggcagccgacgttggggctgtgcgtccataccatgggcagcagggagggcgctggacagagggcaggggcgagctccagggaggagcgtcaagctgcagcagggaggggcgaccatggcaggaaggggagggcgccatgggagagacgtcgagagagcagggatgaccagcgaggctctgtaggatcggcgcctagggaggaggcgacgtgaagaagctgacttcctatgcgcaggggatgagggagag

SEQ ID NO: 98722 - DNA, 2066 bp, Zea Mays
ccatctcgaggcggccagacaaggcataaatcaatccctggatcaaaagcaaacagcaagctagcaaaaggatatgatccagcagctgagcatcacgccaagctttgcaggcagccttcttcatatcctcgttctccatcctctgctcccaaaaggagctagcgctagctaggaaacacacagagagacgaaataagcagcgaggcaatgggcaactgcttcaccaggaagtacgacgagcacgagcacgagcacgagataccaatcaccacggacccgccgcggcggacgtcgatgccggtgtaccggccgccccggccccgcgatgacaagacgcgggaggtgccgctgtactcgggctcggaccgccggccgtcctaccgtccgccgcggcttccagtcttcccgtcgggcccgggatcgacgggccggcggcggccgcccaccggccagacgggcacggtcctggaccggcacacggtggacgtgcggacgctgttccacctggagcggaagctggggagcgggcagttcggcaccacgtacctgtgcacggagcgcgcgacggggaaaaagtacgcgtgcaagtcggtgtccaagcgcaagctggtgcggcgcgccgacatcgcggacatgcgccgggagatcaccatcctgcagcacctcagcgggcagcccaacgtggcggagttcaagggcgcgttcgaggaccgcgacgacgtgcacgtcgtcatggagctctgctccggcggcgagctcttcgaccgcatcaccgccaaggggagctactccgagcgccaggccgccgccgtgtgccgcgacgtcctcaccgtcgtcaacgtctgccacttcatgggggtcatgcaccgcgacctcaagcccgagaacttcctgctcgccagccccgccgacgacgcgccgctcaaggccatcgacttcggcctctccgtcttcatcgaagaaggcaaagtttacaaggacttggtggggagcgcgtactacgtggcgcccgaggtgttgcgccggaactacggcagggagatcgacgtctggagtgctggcgtgatcctatacatccttctatgcgggtcgccgcctttctgggaagaaacgcagaaaggcatatttgacgcaatattggccgacgagctcgatctggtctcctccccgtggccctccatatctgaaagcgcgaaggatctcattagaaaaatgctgaacagggaccctcagaggcgcattacggcttcacaggccctagaacatccatggctcaaaggtggtgcacctgacaggcctatcgacagcgcggtcctgtcaagaatgaagcagttcaaggcgatgaacaagctaaagcaacttgcactgaaggtaatcgcagagaacctaacagaggatgagatcaaggggctgaagcagatgttcaacaacatggatacagacaggagcggcacgatcacggtcgaggaactcaaggacgggctggcgaagctcgggtccaagattagcgaagcggaggttcagaagcttatggaagcagttgacgtggacaagagtggcagcattgactacaccgagttcctcactgccatgatgaacaggcataaactggagaaggaggaggatttgttccttgcttttcaacacttcgacaaagacgatagcgggtacataacaagagacgaactggaacaagccatggcggagtatggggtgggtgatgaagcaagcattaaggaagtgctggacgaagttgataaagacaaggatgggagaatcgactacgaagagtttgtagaaatgatgaggaagggaagttatacctgaggaagctctgttctcatggtgggagaggttgtgtatatatgtttcagcaaatgtgtcaagtacaagcaacgaagcaagtttaacttagaacaagttgcttctgcagctatggtccgaggcaagcatgtacagctatttatttattgaccgaatatgcaacgagagagaaaatgtccagtttacttgaaagaaaagttcagagttcgtgcaatcgtacatatgccagtaattttcgcaag

SEQ ID NO: 98723 - DNA, 763 bp, Zea Mays
tcacagatgtgggcgccgggctcgccggggaggctgccggcgatggaggagtgcggcgaggacgaggagacggacgtggacgcgtaccacggggcgatggcctcctcctgttggggccgtctcggcgccgccgcgctgtggcacaggctacggcagcatctcagcctcgtgcgccgccgccgccgccagcgcggccgctccctcctcggcgccggtgggctcaactacgacccgctcagctacgcgcagaacttcgacgacggctgcctctgcctggaagagcgcgagccggacttcagcgccaggttcgcgcccgcgcggcacgccgccggctccccgcggcccacggccgcggcgcgtgacgtcgcgaccgcttgacggcgtagcacatgcagtagcctttaccacgtaccgctcgccgcagccgcgcgcctttggaagagtggcaaactggtaactgctccacacggcttttttagttggtaaatgtacatacgtggtacacggctacacgccgtagtagacgacgcgcgtggatggatgtaagtaggtttgttatagcgtaatctagatcttcgcatcgcatcaagcgaaaaaaggtctctttgccgatttgctgccttcagctgcagcgttcttgcagttgcagggattattcttgggagtttttgctcgtattattgtacatgtacacttgccatttggctgggcttctgcacatcactttgtcctgaataagcctacctcgttctcgttcttgtgg

SEQ ID NO: 98724 - DNA, 543 bp, Zea Mays
caagactgctcacggacggagtcttagagtctcggtcagtctctctctcactctctcttgtctcccagtttctaaccctagccgccaaggctaagctccctcccaagtcccaagtcccaatctgctcgtctgtggtgcagggctgcaggcatccacctccaccaggcgctggcccagtttccgccatccaccaggcgtccttagaatatggtgcagggctaccgagcagcgagcagcaagctgccgagcatagggcgcccatcgctgagcagcgagcaccgaggaccgccaagcagtcgagcaccgagcagctagcactgagcagccgagcagcgagcagagggcagcgaccgccgagctgcctcgtcttctctagtaaattaaacaggcttggatgaattagtttttcgatttagagttttggagagattacttgtatggatttgaaaagattacttgtatggaacattgaaattattgtttggtgctaaaaaatattattggaatgttgttggaatgttaatttgtgataaatttatgcta

SEQ ID NO: 98725 - DNA, 908 bp, Zea Mays
aaattgcaatgcaaagtcgcacggccgcaccctgcgctcctccccaaaactgaattcgctgcgctgcgcttccctcgtcggccccggcccgtgcgcgggcgtaccggctctacctcacaaaatccgccatggctggcggttcgctcgagccaggccaaactcgagccgcgcccaaccagcgcaagaggaaggctccggcccctaccgcagacgctgaggacgaggcggaggcggaggagctgcagagtgtggaggagctggagagagaggtagccgatctggaccgccgcgtcctcgaacacgtccgcggcaccgccaccctcctctccgacgctattgtctcccgcctcgacgcgctccgcccgcccgctcgccctgaagctgcagttatctcggaaacatcagttaccgaagacgaccaggagcttgagaagaaagtcaagatcctcaaatctaagatcgaagctaatattgcagacctgccgaaggtacttgaaaaaataaatgaaaccgttgctcggtgtgagaatttcacgaatttgaatgttaatgtcgatcctgtgtttcgaaggaagttgtagagtttgacacatcatgcatgagactggctgattcagtattatgtgtttaggtgtatttgatcagaaaacatttgatttgagtgctgtagtttcggcgctgaccattttgttgcgtgaaatatggtagcagtgctatgtttaggaagccaagtgtaagttaaaactggaaaagagatctattcagcagaagtatttagtaggtctggcattttctgcattaatatttaattgctggttaacatgacaccatgttggtcacagatgtgtgttcgttcctggcgtacttcttgtaaagtaattatttaaagcagattgtgtggtttgttc

SEQ ID NO: 98726 - DNA, 528 bp, Zea Mays
atgactctgactcgactctaccatcgtagatgtcgaggtatggctcttgcagcggggacagtggtggttgcatccatggactggccacaagtcacaacatataaagctctggtctcggcacaagcacacagggaagagattatacaaaatctcggcggaatgataagggagttgatgatttcgttctataagaggactggcaaaaagcccaaaagaattatattttacagggatggaataagtgaaggacaattcaaccatgttttgctccttgaaatggacgcgataaggaaggcttgtgcctctctggaagatgggtatctacccccagtgacatttgtcgtaatacagaaaaggcaccacacaaggctcttccctggagttcatggaaggagagatgttactgacagaagtgggaacattcttcctggaactgtggttgataccgagatttgtcatccgcgggagtttgatttctacctttgtagccatgctggaattcaggtttatcaaaggagggaggattga

SEQ ID NO: 98727 - DNA, 611 bp, Zea Mays
atgactctgactcgactctaccatcgtagatgtcgaggtatggctcttgcagcggggacaggtgtgatctagatctgaggggcggtagtggcaggggcgggagtggtaatttagcagtaaattttcactccacatttgagcataaagtggttgcatccatggactggccacaagtcacaacatataaagctctggtctcggcacaagcacacagggaagagattatacaaaatctcggcggaatgataagggagttgatgatttcgttctataagaggactggcaaaaagcccaaaagaattatattttacagggatggaataagtgaaggacaattcaaccatgttttgctccttgaaatggacgcgataaggaaggcttgtgcctctctggaagatgggtatctacccccagtgacatttgtcgtaatacagaaaaggcaccacacaaggctcttccctggagttcatggaaggagagatgttactgacagaagtgggaacattcttcctggaactgtggttgataccgagatttgtcatccgcgggagtttgatttctacctttgtagccatgctggaattcaggtttatcaaaggagggaggattga

SEQ ID NO: 98728 - DNA, 449 bp, Zea Mays
ataggcgttcgatccccttagcgcggaggagagctcctccggttcttctctacccttcgcatggaagttcttgcattgcttcgttgcttctctagtttcttccttctacgtctttccagcatacgcatgcccctcgtccgccggttcacgaggcatcgtctgatgatcagtagataataagcaatataatactgatctagaatcgagttgttgtactcttcgcagataggcgcgtgatggcgctttcagcttcccgagttcagcaggcggaagaactgctgcaacgacctgctgagaggcagctgatgaggagccagcttgctgcagccgccaggagcatcaactggagctacgccctcttctggtccatttcagacactcaaccaggaaaaggcttgagcctttttgtttgcaatgatgtcgccaggttttatatccaatttagttaa

SEQ ID NO: 98729 - DNA, 2179 bp, Zea Mays
ataggcgttcgatccccttagcgcggaggagagctcctccggttcttctctacccttcgcatggaagttcttgcattgcttcgttgcttctctagtttcttccttctacgtctttccagcatacgcatgcccctcgtccgccggttcacgaggcatcgtctgatgatcagtagataataagcaatataatactgatctagaatcgagttgttgtactcttcgcagataggcgcgtgatggcgctttcagcttcccgagttcagcaggcggaagaactgctgcaacgacctgctgagaggcagctgatgaggagccagcttgctgcagccgccaggagcatcaactggagctacgccctcttctggtccatttcagacactcaaccaggggtgctgacgtggacggacgggttctacaacggcgaggtgaagacgcggaagatctccaactccgtggagctgacatccgaccacctcgtcatgcagaggagcgaccagctccgggagctctacgaggccctgctgtcgggcgagggcgaccgccgcgctgcgcctgcgcggccggccggctcgctgtcgccggaggacctcggggacaccgagtggtattacgtggtctccatgacctacgccttccggccaggccaagggttgcccggcaggagtttcgcgagcgacgagcatgtctggctgtgcaacgcgcacctcgccggcagcaaagccttcccccgcgcgctcctggccaagtcaatcctctgcatcccggttatgggcggcgtgcttgagcttggtacaactgacacggtgccggaggccccggacttggtcagccgagcaaccgcggctttctgggagccgcagtgcccgacgtactcggaagagccgagctccagcccgtcaggacgagcaaacgagaccggcgaggccgcagcagacgacggcacgtttgcgttcgaggaactcgaccacaataatggcatggacatagaggcgatgaccgccgccgggggacacgggcaggaggaggagctaagactaagagaagccgaggccctgtcagacgacgcaagcctggagcacatcaccaaggagatcgaggagttctacagcctctgcgacgaaatggacctgcaggcgctaccactaccgctagaggacggctggaccgtggacgcgtccaatttcgaggtcccctgctcttccccgcagccagcgccgcctccggtggacagggctaccgctaacgtcgccgccgacgcctcaagggcacccgtctacggctctcgcgcgacgagtttcatggcttggacgaggtcctcgcagcagtcgtcgtgctccgacgacgcggcgcccgcagcagtagtgccggccatcgaggagccgcagagattgctgaagaaagtggtggccggcggcggtgcttgggagagctgtggcggcgcgacgggagcagcacaggaaatgagtggcactggcaccaagaaccacgtcatgtcggagcgaaagcgacgagagaagctcaacgagatgttcctcgtcctcaagtcactgcttccgtccattcacagggtgaacaaagcgtcgatcctcgccgaaacgatagcctacctcaaggagcttcagagaagggtgcaagagctggagtccagtagggaacctgcgtcgcgcccatccgaaacgacgacaaggctaataacaaggccctcccgtggcaataatgagagtgtgaggaaggaggtctgcgcgggctccaagaggaagagcccagagctcggcagagacgacgtggagcgccccccggtcctcatcatggacgccggcaccagcaacgtcaccgtcaccgtctcggacaaggacgtgctcctggaggtgcagtgccggtgggaggagctcctgatgacgcgagtgttcgacgccatcaagagcctccatttggacgtcctctcggttcaggcttcagcgccagatggcttcatggggcttaagatacgagctcagtttgctggctccggtgccgtcgtgccctggatgatcagcgaggctcttcgcaaagctatagggaagcggtgaaggggcagctggaaatttggacatcgacgggcatggaaggcttcatgggatcgaagcaaagatgtatttcttgtttctttagataacagacatgaatcggacctctatat

SEQ ID NO: 98730 - DNA, 1868 bp, Zea Mays
atggaatccctgggtggctcacaaattagcggggaggttggccttctgcagcagcgcttggagaagaagttgtcaagggtgctgacgtggacggacgggttctacaacggcgaggtgaagacgcggaagatctccaactccgtggagctgacatccgaccacctcgtcatgcagaggagcgaccagctccgggagctctacgaggccctgctgtcgggcgagggcgaccgccgcgctgcgcctgcgcggccggccggctcgctgtcgccggaggacctcggggacaccgagtggtattacgtggtctccatgacctacgccttccggccaggccaagggttgcccggcaggagtttcgcgagcgacgagcatgtctggctgtgcaacgcgcacctcgccggcagcaaagccttcccccgcgcgctcctggccaagtcaatcctctgcatcccggttatgggcggcgtgcttgagcttggtacaactgacacggtgccggaggccccggacttggtcagccgagcaaccgcggctttctgggagccgcagtgcccgacgtactcggaagagccgagctccagcccgtcaggacgagcaaacgagaccggcgaggccgcagcagacgacggcacgtttgcgttcgaggaactcgaccacaataatggcatggacatagaggcgatgaccgccgccgggggacacgggcaggaggaggagctaagactaagagaagccgaggccctgtcagacgacgcaagcctggagcacatcaccaaggagatcgaggagttctacagcctctgcgacgaaatggacctgcaggcgctaccactaccgctagaggacggctggaccgtggacgcgtccaatttcgaggtcccctgctcttccccgcagccagcgccgcctccggtggacagggctaccgctaacgtcgccgccgacgcctcaagggcacccgtctacggctctcgcgcgacgagtttcatggcttggacgaggtcctcgcagcagtcgtcgtgctccgacgacgcggcgcccgcagcagtagtgccggccatcgaggagccgcagagattgctgaagaaagtggtggccggcggcggtgcttgggagagctgtggcggcgcgacgggagcagcacaggaaatgagtggcactggcaccaagaaccacgtcatgtcggagcgaaagcgacgagagaagctcaacgagatgttcctcgtcctcaagtcactgcttccgtccattcacagggtgaacaaagcgtcgatcctcgccgaaacgatagcctacctcaaggagcttcagagaagggtgcaagagctggagtccagtagggaacctgcgtcgcgcccatccgaaacgacgacaaggctaataacaaggccctcccgtggcaataatgagagtgtgaggaaggaggtctgcgcgggctccaagaggaagagcccagagctcggcagagacgacgtggagcgccccccggtcctcatcatggacgccggcaccagcaacgtcaccgtcaccgtctcggacaaggacgtgctcctggaggtgcagtgccggtgggaggagctcctgatgacgcgagtgttcgacgccatcaagagcctccatttggacgtcctctcggttcaggcttcagcgccagatggcttcatggggcttaagatacgagctcagtttgctggctccggtgccgtcgtgccctggatgatcagcgaggctcttcgcaaagctatagggaagcggtgaaggggcagctggaaatttggacatcgacgggcatggaaggcttcatgggatcgaagcaaagatgtatttcttgtttctttagataacagacatgaatcggacctctatat

SEQ ID NO: 98731 - DNA, 303 bp, Zea Mays
atggcgtatgcggaggggaggcaggggcgcggtgggtgggagccgcacgacacattgcgtaggtttttgcgatggcacgcacggtgtggtagagccatcgtggtggaggaggtcgcggagtcgtcgacgcaaatgtcatggagccacgatagcagtttacggaggttgcggaggtcgcgtgcggaggttggctatccgacgcaggtgggcgggggtttcgtggagtcagagctccgtgtgcgcggagtcggcgtggatgtcgcggaggcgagggcacggagatggtctacactattgccttaa

SEQ ID NO: 98732 - DNA, 3033 bp, Zea Mays
atggagtcctggaagtttccattgacgcttgaacagaaaaacagtgtgctgacccctgaggtttgccaaggaactgattcagaaaagaaagatactgctgtaggaatcttgaatgagatgaaatctgtgatggaattatccaagaaaacacggcttgatctgtccgcttctgctgaacctgtgaaaccgttgaacaaacatgcagctagagctcctgaggataagcgtgttgggaaagttctgtctgcagagaagagtttagttcctccgacaagcctgggcctggctggacattttgtgcacaatacaggtgggggtgtaccactcaagcctgataactcagacaccgcagcacatgggttaccggtgaagattaggaagtggcccggactaagtaagataacaggttttacaaagcgacagggtggacttcctcaaggttcttatgtcatcggtggatctcccattggctggaattttcttgtgtggcctggaagcaaagcagtctactatggtttgaccaaagcagagtgtcagaacaagggcgtaggggaccaagccaccaaggccccgcttctgtgtcttccattcttgtcggagcgtgctccgttgttgacggaagcaacgcttttggggcatggaaacgggcctgcagcgtcccaactcgcgattgggccctcgcagcacctgccaaaacaagaaaagcctagcccatgcgccgtgcggaggttccacagacatctcacgcctctgaggcaggttgctgtggacagaccgcagaagggaagggagcctgcgctagttgctaatgacggagagcgaggtagagagcttgatcttggtctcgggcgcgaaggagctcctggtgatggtgcagctgctggtgcgctgtcgaccccttgcttgctcccttgtcaagccccagatgtccaggaaggtggactccctcgtgctccccatggcgcggacccatgtgcagggttgggggatggcgtggtcgtggctgacgggaagcgtggcctctacaaccacgagcgttggccagcatgctttgtcactgtgcgccagtttggaagaagggaaaggtcctctacgtgggcctccagttgctccttgtgtgctaggttggtgaggcccccgagcatggtggacatggcggggtcctgcatcattgccctgcccagccgcttcgccatggccacgagctatggattctgcatcggatatgtacctaagtggttcaactggggttaccaccaggaagtggaagatgagtacggagatgagtactatgatcaagatgagtatgaggaggaaggttcgggtgctggggatgggtatgctgaggaggaagagcctacagagggacaaaaggagatccttgaattgagagaaagattaaaagagcagattaggcgaaaggcaaaggctgctgctgcctgcacagctggtcgatcatcttcttcacaaatacctcaagccagggacaaatttggctctttttttgggccatccaagccggtgatttctcgtcgagtgatagaagaaagaaaatcattgaaagaactgcatagcacggttgcaagggagccaaggccttctggagtacataaggatattccatcgtcctctaaagtgcaaagtagagtaaatggacatcagcataaacaaaagattgttaatcaggtaaagaagaaggctgaggcacttaaggataaccgggattattcatttctactctcggatgatgctgacctgtcatcctctccaaaggagaaacctgctgctagatcttccttgactcaaagggctgatcgtgaggtgacacaatcaacagtaaagaggaaggcaccaacaagtcaacctgcacgcttgtcaaatggatatggacctaagaacacaatgtcaactcaaaggcatgctgaaggtaaggtaaattccatgagaagggaggatttctcgaatacagaaagggttgtttcacgtgacaatgagaggatgtatgaaagggttgtttcacgtgacaatgagaggatgcatagtattgcaagaaatggatccaaccaggcaagtactagcaaaaccacaatccaaaagcatccaagcaggggtcccattgctaataagcaaccgtccaaggattcgaatgatgcaactctgaggaagagcagtgtagcctcaaagcaccatcccttagagattgacagaccaaaatcctcgcaaagtcagaggatgcagtcagctggtcagagaccacagcattcttcccatggtcagacgccacatcaatccatgcagcataggacgcagcagtcattgcagagtcggaggccacaacaaatgacacagggtcagaagccacaacagtctttgcagagtcaaaggactcaacagtccttgcagaatcgaaggccacagcagtcctcacatattcagaaatcgcaatcctcacaagcacacagaccacagtcattaagtaacaggtctcaggctttacaaggacaaaggcctctttcttcacagggtcaatatccggagcaaagaagagtacatgcaagtgacagagtcaaacaagctgaaaggcagattcggcctccttccaagtccatgccatcacggccagtctcttccaatggaattcgtgatgatcatgcaaaaaggaagcaagtggcaaaaagaagatttgatgaagatgatgaagaccccttagcaatgatcagaaatatgtttgggtattgtctagacaagcttactctatcctttctgttttggactttgtggctttttgaagatgttgcttatagatatttggattctaattttggcatactttgcaggtatgatcctagtagatatgcaggcagagatgaagatgtcagtgacatggaagccgattttgctactatagaaatggaagagaaaaggagcgcgaggattgctaggcaggaggatgaagaacaacttcgcttgattgaggaagaagagagacgcgagcaggagagaaagaggcgaaagatggcacgaggccgatag

SEQ ID NO: 98733 - DNA, 761 bp, Zea Mays
ctcctgccgacgtgtgttcccggatccgaatccttcatcaaatttagttgtgaacgcgggtcgcctctgatctgatctggccgccaaagccgtgcccgagcccctctccttgacgacgagttctccacccatctctcttcttcctccctctcgtcgctctctccttcgcctttgcctgccccagtcggtgaggcgaggagcgtggaatatcgcgatgctcgattcaagctgcaacaaactccctcactcgacagtacctcccgctgctcctctagccatttcttgctgctgctactacctaagctaacatagccttgatgctgctagcgcatgacctacgctcactataaataagaatgcaataagaataagattttttttcaacacaaaagttctcttaaacaagataaagaaacatatctatttcatagatagatttacaatatgttccctatgctaagttgttaactgggttcatatctattgtgaaagtgctgaccacgaacaatacatgcctcaagatacattggtcaacacagtttcttatgtctaagaaggcaggcgcctatttttcgtaccttttatatgcaggagtatgaagcaacagtggcagcactttcacaaatggagaagagagatgtaatggcaaaaacaatgctggaagctacaaagcaataccaggctggacaggttaaagacaaccaatctttcgcttcaagttattcttttggctacattttacttccactttccaagcatct

SEQ ID NO: 98734 - DNA, 2433 bp, Zea Mays
ctcctgccgacgtgtgttcccggatccgaatccttcatcaaatttagttgtgaacgcgggtcgcctctgatctgatctggccgccaaagccgtgcccgagcccctctccttgacgacgagttctccacccatctctcttcttcctccctctcgtcgctctctccttcgcctttgcctgccccagtcggtgaggcgaggagcgtggaatatcgcgatgctcgattcaagctgcaacaaactccctcactcgacagtacctcccgctgctcctctagccatttcttgctgctgctactacctaagctaacatagccttgatgctgctagcgcatgacctacgctcactataaataagaatgcaataagaataagattttttttcaacacaaaagttctcttaaacaagataaagaaacatatctatttcatagatagatttacaatatgttccctatgctaagttgttaactgggttcatatctattgtgaaagtgctgaccacgaacaatacatgcctcaagatacattggtcaacacagtttcttatgtctaagaaggcaggcgcctatttttcgtaccttttatatgcaggagtatgaagcaacagtggcagcactttcacaaatggagaagagagatgtaatggcaaaaacaatgctggaagctacaaagcaataccaggctggacagaccatgttcttgggaagataaatcaagaaccaaaccaagatacgtcaacaagagaatcaacctgctttctaggggacttggatggcttgacaagagcaagtcatgcccctaaagtcaaaagtttaccaaaaataactatctgggttcatgacttctggtaccaggccctacatgtcattatcagagcccttgtttcttactagcctaattgatctagaaagatcatacaaagttgagttacagtggagtcactatatatgaatttttttagcagggaatgcaggattctgctgaaacatcttgaggctaaactcatctagagtccaagatgaagtcatagctcccaacaagatctagatttttcattaatgcttggattgcctgatcacgacaacaatgtgttgaaatcaacttatatgttttatagggagattgagattcagctggtattttccatgaagttttgtaggaagtgtatcttgtaccatattgagtttagctgtcagataaagttttgttgacggcaatgcaacaccacttaattggggattgaaggtgatgtggttcatctaagaccaagatttctgattttctgtttcaagttcaaaatacatgatagctgctggattatgctgccatgctggtacttaggtcagccctcacctttctatgttaaactgaatccagtgaaggtgtaagtgtaattttttgtagttaggtgttaaataacttaacattcactatattttcttgtgttaatgcaaaattctgttacattttccttttggtgaagtagaagaaggtcaatttaaatgtcctaaaagaaaatcattgtacagtatctgccacaaggcagggttatgggaggttggcaaccaatttgggtgcagtgctgagcatttaggtcatcatttgacattaactaagatacttgtatgtgatctaagcttgcacttcacattttttagaactatactgcttgtgcaacctaccaactttctgcatatattttcatgtcgaaaagaagttcttctttatagaaaatgatttctaggttgacacctcacatgcatattgtttcctcaatgataacaaaaatggtgaaagaacaacattcaagtccatatattcatgaatactctttgagttagtttttcatggttcactaatataagcagatagtgcctacacttatcaatttgctaatgacaggttaaaccaaacatcgttgtactgatcacatgggacgacacatgctaaaatcaatataacagtaacttgatgggactaacaatgcctaaccactagaaatgttgtagttctgtcacttctttaaacattttttgttgtaattttacatggtaattcagaactctgtttatggcacatgttgctcagacataatgatcgagtccctcttcatggtcggagaaattgggggcaatgactacaacctacctctcgtctccaaagtgccgattgaaaagatttgctcattcacaccaagtgtcattgtcaaagtttcttcaacaaacaccgtgaatgtctacgtcattttatatgttgttgctgctgctgagctgacatattatatagatagtaatgtaactgattggagtttgcaggaattgattaggctaggagccaagactctggtagttcctgggggttaacctcccaactgggtgtgttccaaaatacatgttgaaattcaagagtgatgacaaagaagattatgagccg

SEQ ID NO: 98735 - DNA, 2133 bp, Zea Mays
agaaagctggcctcctccgcctttctttccttcctccctcggggctccgcgcgcgcagcagccaggaacagctccgctgcctgctcccttggggaaaaaaaacttcaagaacagcggcggtcggctcttctccaatcctgcttcaaggctgcaccgaccggctctatttgagctatatctctgcaggaaagctcagttcagatccattcacttcactcatgggctcatcctcgggccatcagagaagcaaaacgcgcagcaggaacaggaagcccttgggaattcagctcttggagcgggtccgtggcagccccatctccttcagatcatgccaggctctcgtgctagtgctcacgttcctatcctacgccagctaccacgccaccaggaaaaccacgagcgtcgtcaagagcgtcctcgacccaaagacgaagacgaacctaggcacgtcgtcggcgcattactggccccccagccacctcttctatctccataatctcaaagatgcggacaacagcagcgccggcggctctctctccagcggcggcggcggcggctgggttccgttcaacgaggcggaagacggcacggcgttgctgggcgagatcgacctggcgttcctcggcgcgtacgcggccggcatgttcttcgcgggccacctgggcgacagggtggacctgagggtcctcctcaccgtagggatggtggggaccgggctcttcaccgccgccttcggagcgggctactggctcgacgtgcacagcttctactacttcctggccgtgcagatggtggccggcctgttccagtcgtccgggtggccgtcggtggtggcggtggtcggcaactggttcgggaagagcaagagggggctcatcatgggggtgtggaacgcccacacctccgtggggaacatttccggctcgctggtcgccgctgccatgttgaggtacgggtggtgctggagctttgtggtgcccggtgtcgtcatcgcgctggtcgggctcgccgtgttcctgctcttgcctgttgcgcctgatgtgattggagtccaggaggatctctgtttgaaggacgctccattgcttgaacgacgacgcgcagatgtagaggaaaaggcggttgggtttattgaggcgtggaggatccctggtgttgcccctttcgccctctgccttttcttctgcaagcttgtggcgtatacgttcctgtactggcttcccttctatatcagccacacaggtttgtttgtcaagtttctaaaatgttttgccattttattttactgcatcgaatcgctgtggttctaactaataactgtgttcctgtgtttcagctatcggtggagaatacttgtcggactccgcagccggggtactgtcgacgctgttcgacgtgggcggcgtcgtgggcggcatcctcgccggccacatctccgaccacctggacgcccgggcgctgacggccgcgagcttcaccttctcggcgataccggcgctcttcttctaccgcgtctacgggaacgtctcgctggcctggaacatcgccctcatgttcgtcacggggatgctggtgaacggcccctacgcgctgatcacgacggccgtgtccgcggacctcggcacgcacagctcgctcaacggcaactcccgcgcgctggccaccgtcacggcgatcatcgacggcacggggtccatcggcgccgccgtcggcccgctcctcacgggctacatctccgccaggagctggagcgccgtgttcacgatgctgatggcgtccgcgctcgtcgcggggctgctgctgtccaggctcgtggcggcggaggtggtcgccaagatggagtcccggaggacgcccgcccctgctgcgagcgacctgctgcccgtgtcctcctcctccatggacgaaccgtagatcgcttctagctgcgccccggctgtggtctcctggtgacatggaatggtggcgggagagtagatcacctgtgattttaggcctggtgggactgtggcagcaggtgcgcagtgcgcttctgtcccggaactgtgggatcttgctcctgccgtgccgtgcttcaccgcttctggttcgtcatggtatatatgtatatggaatgtcttctggttgccgacg

SEQ ID NO: 98736 - DNA, 2242 bp, Zea Mays
agaaagctggcctcctccgcctttctttccttcctccctcggggctccgcgcgcgcagcagccaggaacagctccgctgcctgctcccttggggaaaaaaaacttcaagaacagcggcggtcggctcttctccaatcctgcttcaaggctgcaccgaccggctctatttgagctatatctctgcaggaaagctcagttcagatccattcacttcactcatgggctcatcctcgggccatcagagaagcaaaacgcgcagcaggaacaggaagcccttgggaattcagctcttggagcgggtccgtggcagccccatctccttcagatcatgccaggctctcgtgctagtgctcacgttcctatcctacgccagctaccacgccaccaggaaaaccacgagcgtcgtcaagagcgtcctcgacccaaagacgaagacgaacctaggcacgtcgtcggcgcattactggccccccagccacctcttctatctccataatctcaaagatgcggacaacagcagcgccggcggctctctctccagcggcggcggcggcggctgggttccgttcaacgaggcggaagacggcacggcgttgctgggcgagatcgacctggcgttcctcggcgcgtacgcggccggcatgttcttcgcgggccacctgggcgacagggtggacctgagggtcctcctcaccgtagggatggtggggaccgggctcttcaccgccgccttcggagcgggctactggctcgacgtgcacagcttctactacttcctggccgtgcagatggtggccggcctgttccagtcgtccgggtggccgtcggtggtggcggtggtcggcaactggttcgggaagagcaagagggggctcatcatgggggtgtggaacgcccacacctccgtggggaacatttccggctcgctggtcgccgctgccatgttgaggtacgggtggtgctggagctttgtggtgcccggtgtcgtcatcgcgctggtcgggctcgccgtgttcctgctcttgcctgttgcgcctgatgtgattggagtccaggaggatctctgtttgaaggacgctccattgcttgaacgacgacgcgcagatgtagaggaaaaggcggttgggtttattgaggcgtggaggatccctggtgttgcccctttcgccctctgccttttcttctgcaagcttgtggcgtatacgttcctgtactggcttcccttctatatcagccacacagctatcggtggagaatacttgtcggactccgcagccggggtactgtcgacgctgttcgacgtgggcggcgtcgtgggcggcatcctcgccggccacatctccgaccacctggacgcccgggcgctgacggccgcgagcttcaccttctcggcgataccggcgctcttcttctaccgcgtctacgggaacgtctcgctggcctggaacatcgccctcatgttcgtcacggggatgctggtgaacggcccctacgcgctgatcacgacggccgtgtccgcggacctcggcacgcacagctcgctcaacggcaactcccgcgcgctggccaccgtcacggcgatcatcgacggcacggggtccatcggcgccgccgtcggcccgctcctcacgggctacatctccgccaggagctggagcgccgtgttcacgatgctgatggcgtccgcgctcgtcgcggggctgctgctgtccaggctcgtggcggcggaggtggtcgccaagatggagtcccggaggacgcccgcccctgctgcgagcgacctgctgcccgtgtcctcctcctccatggacgaaccgtagatcgcttctagctgcgccccggctgtggtctcctggtgacatggaatggtggcgggagagtagatcacctgtgattttaggcctggtgggactgtggcagcaggtgcgcagtgcgcttctgtcccggaactgtgggatcttgctcctgccgtgccgtgcttcaccgcttctggttcgtcatggtatatatgtatatggaatgtcttctggttgccgacgaagatgaatgcggttggctactcacgctgcaatactccggctgcggacgggcgtttcctggctccgacagcgcccggaggagagggactggctagatgtgccccataatagttgcaacctgctcgcaggaactccgtaggaggccactcttttaactgtgtcgcacacgtttacgaattctaaagtgggcttgatgacggcct

SEQ ID NO: 98737 - DNA, 468 bp, Zea Mays
atggcttgcaagaatttgagtatgcacttccaccacaggaagttccagtggaaaaagcagaagctctctagtgttactgagactgaagctgctccctcaaccaatgatgaaactcctccatctgtagaagacaagaatgaaacttctcaagtacaagatgctgctgaaaaaccagagccagaagaaactaacactgctgcagataaaacacaaacacctgttgtagaggaagcaagtgaggctgtcgaggaggaagaggctgagaaacctgagatcaagctccagcagattttcgtttcccaacaacaaatcaaagaaggcactgtttcacacgctatgttgaataccacagtccctcagcttgtccagttaccgtcttggcatcttttaagctcgactgaattgtgttcaatatgcataaggttgatcgctggaacgagcaacggcaccttccctggacctctgtaa

SEQ ID NO: 98738 - DNA, 875 bp, Zea Mays
tagatcacgagagattgaccagatggctttattctcactccgaaagacaggaataaataagaaatcgaataaggtactacaagctcaagtgtttggttttacatacacaacaatgactctcaacactgccctttttccttggagaaggtgtcggactcttacgaggaaatgaccaaatacaaaaaaaaatgggaattcaacaagagacaatacatgcgaattgaactgacaagtatttggctggaatggttctaggttttgtagaaccgaaaggtgcacaatgcaactgagacaggagagatatatcagcagacacaatgcatgcattcgtgccatgcagggtgcgtgcatatgtaatctcgtacgtgaacagctacgagcgtgtgaccgccggaagctgcttacgcgcacaagtagcccttgggcacgcacttgccacagtagttgacgagggcgctgagcttgatggggacatcgatgacgacgccgagcacgttggccttgatggccgtgcagaggcagacggcggcctcgaagtccgcaaggcctttgatgagggtacagcatggctcggcaggcaccttgccagcctcgcctttgacgaggccgagcacatcggcgcacacgccgaacttgagcgcgttcagcgggcacttgccgctggacgaagggggtggggtagcagcaggaggcggcggcggtggctcgaccgggggcgttggggtcgggcagttgccgcaggcgttggccaccgtgaagaacaggaggttgagagccaagaagaggacggccttggatgccatggctctcaggcgggccttacttaggtggcaagcccctgcactatgcttgtgctagctagccgtgagatggga

SEQ ID NO: 98739 - DNA, 1806 bp, Zea Mays
ctgtaccaccagggcgtggaggtcgacgcgctggtgcgggtcgaggtgcgtgcgttgcgtcacagtaaatcctttgttcgtcgacggacacggtgtctctgagagtttttttggaacggaggtatcccatgtctgggcttcgtaaaattattatcctgaaccaagcaattgcatttctagtattataacacccacaactttggtattttgtgcttcttgccagatttaaccactgtcgagcatcatcagccataaccggagctcagtaacgaaggaggtggccctatgatcgcctaccccgtttttcaaaacaacccgagtccttctctgccgcccgatccgatgcgctggatcgccgacgaccggctccctgtccggtagcttcctgccgatttccggcactggtgcgtcgccggagatgggaagtaccgcttgctcacctacctggacctcagtcgaaataaccattaatagccgaatactcaactacctgaacctgtcccggaaccaccttggtggagaaatatcggcaaccattgctgcaatgcagagccttacggccatagacttctacaataacctgtctgggctcgtgctagcgactaggccatgatgcacacacctacgatggcatgtccaataccttcaagttgctaattgtccttggcttgcttgtctgctccattgcgtttgttgcatggcaatcttgaaggcccgattactaaagaaggccagcgaggcacacagttggagactcactgcgttccagcgcctagacagtctgaaggaggagaggagctaggattgtgtacaagatgacgacaatgctggatggtgagcatgttgcagacttgcagtgaagcggctttcgtcgatgagccgtggctcgtcgcatgaccatgggttctctgcagagaaacaaactcttgggaggatccggtggtagcgcatcttcacgcccgaccagtgctcacggctgtgctgccgctctacgttgccatgatgctggaccgtgagccagccgtgggccgcgcggcggaggctcggctccgcgccgcggaggcagagctggagcgcgcgcgccgccgcggcgcggatctggaggagcggctccggcagctagccggggagggccaggcgtggctgggcgtcgccaggagccacgaggccgtcgccgctggcctccgcgccacgctcgacaaggtgctccagcagcccgccgtcgccgccgccggcggaggagaatgcggcgtggcggaggacgcgcaatcctgctgcttcgtggcatccccgtcggggctcgtcgccggcgacgcggtgtcgacgggttcgtcgccgtcgtgcaaggcctgcggcgtcgttttgctcatcatcatcgcatgcggaagcgacggccgcgaggtgggcctgctcgagcgctcccatggcggtagatgcacccatctcagaaacgagattagatctcgattgatcccttggcgacttcgcgagccagtcagcagcttggggaggagagagagagtgcgtacaggagagatgggggagaggagatggatccccggcatcacggacacgcgcagcgtggggggagcaggggcggggagggggctaggggatggggggttgcagatccccggcatcacggacgcgcgcagcgtgggggagcaggggcgggggctggacggcagctattgcgcaggggtttgcggcgtgctgccgtgcggtgcgggaggccgttgctggacgggagtgggggcagtctacaaatggctcttaatagttgtagagactaacacccctgcatga

SEQ ID NO: 98740 - DNA, 543 bp, Zea Mays
gcggatgctatgcatgcagaggtagcagagctagctagtaagcacgtacgtacgtagcacatgataagaaggctgcattattgagacaaggcacttgaatccggtgggcactctcttgccgcagtggttgaggataaggctgaggtcgaccggtaggttgagcttgattccgaggacctctcccttgatggcggtgcagaggcacacggcggcctcgaggtcgacgagtcccttcagcagcgggcagcatggctccgtgggcggcacgcccaccttggccttgatcagccccagaacattagcgcacacgcccagcttgagcgcgtcgcgggggcacttgccgaacgaggccggcgttggggtcggggtggacggggtcggcgtggggcagttgccaccgcacgcgctggccatggcgaacatcactaggctaacggccaggaacagcgtcatcgatgcgttgcctgccattattgctgcacagcagtgtcctccttgaccacaaggcacaaagcagactgagcttcgtgaggagctctgctt

SEQ ID NO: 98741 - DNA, 1766 bp, Zea Mays
agccgcagccgccgccgccgcctctctctcccttccctcttctctctgccctcacctctctcccccttccatcacctcgctagtaacaggtcaccgtgtgtgtgcgcgccatggggattcatctgccgccgcctgccctcgccttctgcctctcggcgcccactcggttctagtggccgcttcgaggaggcgctcgcgcgcatcgaggagctccaggagcgcgacactggcgccgacgatagcagcacagcctcgtcgttcttgagcgacggagaggcggcgtcgcggccagcaggcgagcagcagtcgcactccgcagatttcttgagcgacggagaggcggcgtccggtggcattcagagacgtgcgtgacggtcggaggtcgtcgagcgcgtctagatagcatccaagacaaatagcgctgttcgcgatctgaggcagctggtaggcagtctgggcttgggcgcacgcgagccagagagggagggctgggagcacgtcatctccaagagcagcgacgacgtctcctacaaggcctggtgcgacaagcccacggtagttgccaattgcgtacatgcattgcaacagatctgggctctagaagctgctaacttggtagcagaaagattgaggcattgcatagcaaaccactggtattttaattttacctattaatcaaatgagtttcaatctggcttggagccttttctattaaataatgccaatgtgaattttcttgagttctctatttttatctgcaggatcaaagagtttagtgaatggccacagtgcatgttcttgagttgcaatcaaagttccttccatataataataacaaaatatttgacataatgaatctgttggaggatagacttcaacatgcaaatggagtcgttgttttggcaacaattaaagtttttctccattcccatgactgttgttcatcaacaggtacgcatgttactcctagagaggtggtctctggatcatgctgcattattgctattacttctcaaaagcatttctttcttgttttagaatatgagatttagtatatgagcaccttctgttgatgcataaaaacaaaatcttatttagattaagatcccataacggactagcacatgacatcacaacaacaacacacttggtccatagataatgttttatttggaggttaatttacttgaatttttttaattccatggactctttactctgggtactggcagtcctaaatagtcattggcccttttatgtgtaaaataacagcttcctggtgttgatcccaatgatccatctgttaaaggtctctgtattgtgatgcaatgaaattcatgttgcctctagactatagcattgttctgcttcaccgtaccttgactaaataagaataaatatattatatgtcaccaaatcttcacatgaactgctatcctgtattatctggtggaaatatgaaggtttctttatttctcttcttaaacagcaagagaagaaggaagacaagtcagacaaaacagaagacgagaagaactgatgtagccatgttcatgcttccactgttgaaatgcatattcaacatagcttgctcagctcctatctgttgtttcaacgttgatttaaaagaagagctggtagttgtgggctttcgaacaatagctggaatgatctagctagctatatgtaaatgatctagttgtgaatgatattataactgtgatgcttttgtgaatatataattgtggtgcttttgtgtttgtgat

SEQ ID NO: 98742 - DNA, 1249 bp, Zea Mays
agccgcagccgccgccgccgcctctctctcccttccctcttctctctgccctcacctctctcccccttccatcacctcgctagtaacaggtcaccgtgtgtgtgcgcgccatggggattcatctgccgccgcctgccctcgccttctgcctctcggcgcccactcggttctagtggccgcttcgaggaggcgctcgcgcgcatcgaggagctccaggagcgcgacactggcgccgacgatagcagcacagcctcgtcgttcttgagcgacggagaggcggcgtcgcggccagcaggcgagcagcagtcgcactccgcagatttcttgagcgacggagaggcggcgtccggtggcattcagagacgtgcgtgacggtcggaggtcgtcgagcgcgtgtaagcttgttgaccattttcagcatgtgtaaattggcggttagatttcgttcaagaagtaagtgctacatttcttgtgtccttaaatcaattaataccactgctgcttgttcactggacatgttttagctagatagcatccaagacaaatagcgctgttcgcgatctgaggcagctggtaggcagtctgggcttgggcgcacgcgagccagagagggagggctgggagcacgtcatctccaagagcagcgacgacgtctcctacaaggcctggtgcgacaagcccacggtagttgccaattgcgtacatgcattgcaacagatctgggctctagaagctgctaacttggtagcagaaagattgaggcattgcatagcaaaccactggatcaaagagtttagtgaatggccacagtgcatgttcttgagttgcaatcaaagttccttccatataataataacaaaatatttgacataatgaatctgttggaggatagacttcaacatgcaaatggagtcgttgttttggcaacaattaaagtttttctccattcccatgactgttgttcatcaacagcaagagaagaaggaagacaagtcagacaaaacagaagacgagaagaactgatgtagccatgttcatgcttccactgttgaaatgcatattcaacatagcttgctcagctcctatctgttgtttcaacgttgatttaaaagaagagctggtagttgtgggctttcgaacaatagctggaatgatctagctagctatatgtaaatgatctagttgtgaatgatattataactgtgatgcttttgtgaatatataattgtggtgcttttgtgtttgtgat

SEQ ID NO: 98743 - DNA, 2165 bp, Zea Mays
cctcgtctcgcgtcttcttccactgctccctcccacctccgctcccagcttttcccattctcgttgatacgagcgagagtcgagacaggtcaaaaggagattgagtaaggaaaagaaaaaaaaaatcgctgctcccgaggcacggcggcggcgagcgtgcgacacctccggcggctccacagatccggcgaccgatctccggccgcctgcggatgctccggggccggcgcggtaaggcccaggggtccacgctcgtagccagatctcggggcgctgctgggaagtggggttcgttccgtccctgcctccctggtggtggggatggggtggtccgcggggctgtggtggctcgtggccgcgctgtgggtggtggcggcggcggcggcggcggcggagggtgaggtcgtggtcgggtcagcgccgaggcggcacgcgtacgcgtcgatgatgtacatgggcactccacgggactacgagttctacgtggccacgcgcgtcatgatgcagtccctgcgccggctcagcgccgacgccgaccgcgtcgtgatcgcctccctcgacgtcccaccgctctgggtccaggcgctatgatggtgtaaaggtggtctctgtggagaatttgaaaaatccatacgagagacaagagaatttcaacatgcgattcaagttgaccttaaacaagctgtatgcatggagcttggtttcgtatgagcgagttgttatgcttgactccgacaacattttcctccaaaatactgatgagttatttcagtgtggtcagttctgtgctgtcttcatcaatccctgtatcttccatacaggtctctttgtgcttcagccctcaatgaacgtttttaagaatatgctacatgagctatcggttggacgtgaaaacccagatggtgcagaccaaggctttcttgctagttatttcccggacttacttgatcagccaatgttccatccaccagctaatggtacaaaacttcagggtacttaccgcctccctctaggctaccagatggatgcgtcttactattatctgaagcttcgctggagtattccatgtggaccgaacagtgtgattacatttccaagtgctccatggtttaagccatggtactggtggtcttggccagttttacctttggggctctcttggcatgaacaacgtcgtgaaaacctagggtattcatctgagataccagtagtattaattcaggctgtactgtacattggagtcatagcagtgacccgactggcgaggcctaccttgaacaagatgtgctacaacagaagaatggagaaaaacactatgttcttgctctctgttctcagagtcgtggctgcttggtccatacttgctgcctacaccatacccttcttcatcatcccaaggaccgtgcatccactgcttggctggcctctctacttgctcggttcttttgctctttcttccattgttatcaacattttcctcttccacccgatcaccgtcctcacaacatggtttggattcataggcgcactcctggtgatggccttcccttggtatctaaatggttttgtcagggccttggcagtgtttgcgtatgctttctgctgcgcgcccttgatctgggcatctttggtcaagacaatgagctccttgcaggtcctgattgagagggatgcattcaggctcggagaacctagccagaatgcggagttcacaaagctatactgaggtgggcatggcagatacatgtgatttatcactttcgttgctcagtttgaacagttaatctgcattcacattgtcaaattctgatggccaattcaaatgtacaactaaacctgcagcctgggagcaagagtggttgtacacaatggaactatctggaaacctctagaatccatgaatgttgttatcttagacatgtaggtgacatatacagtggaaaaggggggagggctgtagaattggtgctgaactgaagaggaactgactggggtcagttgttagttattttgatttattgttcctctgaaaagccaaggcatttttggctttgtttgtaattgatatgatatgttccttcacaaatgaagaaaagggttgaaagttcaaacggtgtagtgttcgaaacagtactttgattttaccgtggtaaaattgtgtggct

SEQ ID NO: 98744 - DNA, 2060 bp, Zea Mays
cctcgtctcgcgtcttcttccactgctccctcccacctccgctcccagcttttcccattctcgttgatacgagcgagagtcgagacaggtcaaaaggagattgagtaaggaaaagaaaaaaaaaatcgctgctcccgaggcacggcggcggcgagcgtgcgacacctccggcggctccacagatccggcgaccgatctccggccgcctgcggatgctccggggccggcgcggtaaggcccaggggtccacgctcgtagccagatctcggggcgctgctgggaagtggggttcgttccgtccctgcctccctggtggtggggatggggtggtccgcggggctgtggtggctcgtggccgcgctgtgggtggtggcggcggcggcggcggcggcggagggtgaggtcgtggtcgggtcagcgccgaggcggcacgcgtacgcgtcgatgatgtacatgggcactccacgggactacgagttctacgtggccacgcgcgtcatgatgcagtccctgcgccggctcagcgccgacgccgaccgcgtcgtgatcgcctccctcgacgtcccaccgctctgggtccaggcgctgaaagatgatggtgtaaaggtggtctctgtggagaatttgaaaaatccatacgagagacaagagaatttcaacatgcgattcaagttgaccttaaacaagctgtatgcatggagcttggtttcgtatgagcgagttgttatgcttgactccgacaacattttcctccaaaatactgatgagttatttcagtgtggtcagttctgtgctgtcttcatcaatccctgtatcttccatacaggtctctttgtgcttcagccctcaatgaacgtttttaagaatatgctacatgagctatcggttggacgtgaaaacccagatggtgcagaccaaggctttcttgctagttatttcccggacttacttgatcagccaatgttccatccaccagctaatggtacaaaacttcagggtacttaccgcctccctctaggctaccagatggatgcgtcttactattatctgaagcttcgctggagtattccatgtggaccgaacagtgtgattacatttccaagtgctccatggtttaagccatggtactggtggtcttggccagttttacctttggggctctcttggcatgaacaacgtcgtgaaaacctagggtattcatctgagataccagtagtattaattcaggctgtactgtacattggagtcatagcagtgacccgactggcgaggcctaccttgaacaagatgtgctacaacagaagaatggagaaaaacactatgttcttgctctctgttctcagagtcgtggctgcttggtccatacttgctgcctacaccatacccttcttcatcatcccaaggaccgtgcatccactgcttggctggcctctctacttgctcggttcttttgctctttcttccattgttatcaacattttcctcttccacccgatcaccgtcctcacaacatggtttggattcataggcgcactcctggtgatggccttcccttggtatctaaatggttttgtcagggccttggcagtgtttgcgtatgctttctgctgcgcgcccttgatctgggcatctttggtcaagacaatgagctccttgcaggtcctgattgagagggatgcattcaggctcggagaacctagccagaatgcggagttcacaaagctatactgagcctgggagcaagagtggttgtacacaatggaactatctggaaacctctagaatccatgaatgttgttatcttagacatgtaggtgacatatacagtggaaaaggggggagggctgtagaattggtgctgaactgaagaggaactgactggggtcagttgttagttattttgatttattgttcctctgaaaagccaaggcatttttggctttgtttgtaattgatatgatatgttccttcacaaatgaagaaaagggttgaaagttcaaacggtgtagtgttcgaaacagtactttgattttaccgtggtaaaattgtgtggcttgtgc

SEQ ID NO: 98745 - DNA, 2236 bp, Zea Mays
cctcgtctcgcgtcttcttccactgctccctcccacctccgctcccagcttttcccattctcgttgatacgagcgagagtcgagacaggtcaaaaggagattgagtaaggaaaagaaaaaaaaaatcgctgctcccgaggcacggcggcggcgagcgtgcgacacctccggcggctccacagatccggcgaccgatctccggccgcctgcggatgctccggggccggcgcggtaaggcccaggggtccacgctcgtagccagatctcggggcgctgctgggaagtggggttcgttccgtccctgcctccctggtggtggggatggggtggtccgcggggctgtggtggctcgtggccgcgctgtgggtggtggcggcggcggcggcggcggcggagggtgaggtcgtggtcgggtcagcgccgaggcggcacgcgtacgcgtcgatgatgtacatgggcactccacgggactacgagttctacgtggccacgcgcgtcatgatgcagtccctgcgccggctcagcgccgacgccgaccgcgtcgtgatcgcctccctcgacgtcccaccgctctgggtccaggcgctgaaagatgatggtgtaaaggtggtctctgtggagaatttgaaaaatccatacgagagacaagagaatttcaacatgcgattcaagttgaccttaaacaagctgtatgcatggagcttggtttcgtatgagcgagttgttatgcttgactccgacaacattttcctccaaaatactgatgagttatttcagtgtggtcagttctgtgctgtcttcatcaatccctgtatcttccatacaggtctctttgtgcttcagccctcaatgaacgtttttaagaatatgctacatgagctatcggttggacgtgaaaacccagatggtgcagaccaaggctttcttgctagttatttcccggacttacttgatcagccaatgttccatccaccagctaatggtacaaaacttcagggtacttaccgcctccctctaggctaccagatggatgcgtcttactattatctgaagcttcgctggagtattccatgtggaccgaacagtgtgattacatttccaagtgctccatggtttaagccatggtactggtggtcttggccagttttacctttggggctctcttggcatgaacaacgtcgtgaaaacctagggtattcatctgagataccagtagtattaattcaggctgtactgtacattggagtcatagcagtgacccgactggcgaggcctaccttgaacaagatgtgctacaacagaagaatggagaaaaacactatgttcttgctctctgttctcagagtcgtggctgcttggtccatacttgctgcctacaccatacccttcttcatcatcccaaggaccgtgcatccactgcttggctggcctctctacttgctcggttcttttgctctttcttccattgttatcaacattttcctcttccacccgatcaccgtcctcacaacatggtttggattcataggcgcactcctggtgatggccttcccttggtatctaaatggttttgtcagggccttggcagtgtttgcgtatgctttctgctgcgcgcccttgatctgggcatctttggtcaagacaatgagctccttgcaggtcctgattgagagggatgcattcaggctcggagaacctagccagaatgcggagttcacaaagctatactgaggtgggcatggcagatacatgtgatttatcactttcgttgctcagtttgaacagttaatctgcattcacattgtcaaattctgatggccaattcaaatgtacaactaaacctgcagcctgggagcaagagtggttgtacacaatggaactatctggaaacctctagaatccatgaatgttgttatcttagacatgtaggtgacatatacagtggaaaaggggggagggctgtagaattggtgctgaactgaagaggaactgactggggtcagttgttagttattttgatttattgttcctctgaaaagccaaggcatttttggctttgtttgtaattgatatgatatgttccttcacaaatgaagaaaagggttgaaagttcaaacggtgtagtgttcgaaacagtactttgattttaccgtggtaaaattgtgtggcttgtgctgaacagttttcctttttataactgcttcgcctgaacgttgagttcagctcgtgtcgctgc

SEQ ID NO: 98746 - DNA, 195 bp, Zea Mays
atggaggtggccatcgccgcaaccacggtcgtcgccatgggctcgcgctcgtgccgctccagggctgggagtacctgttatggtcggcccttcacgctgagcgaaaacatctctaattcccaaaagttccgactccgagcacaacagaaaaaagttcactcattgtttggaaacatcgcaaaaattttctactga

SEQ ID NO: 98747 - DNA, 208 bp, Zea Mays
agcctgacgcggaagccaggtcgtactactccggtggcggactggctggctgcgacgccacctctccgagggaaggcgccgacttcttcggtgttcttcggaactgcgctgttcgttctaggttttgtgtccctcttcacgggacacgtggtcactgatgcatgctgactgggcgcggttccggactcggtggcgatccaagcaggta

SEQ ID NO: 98748 - DNA, 1849 bp, Zea Mays
tccaaaaacatcccaaacaactttcccctccccggctccccacatcttgtctgccacagttccacctctccatttcgccgaggaagaaaaaggaaaaaaacacagaaggggttggagagaaacggatcaggggcggaaggttccagccctagcacagcaatggcgggttggtgcgaggaggcggtggcgttgctgcagcgccccgcggcggcggagatggccgtcgacgtgctgctctgcgcggtgccgatctgggccgctgtcatgatcggcctcgtcgtcggctggtcctggcgcccgcgctggacggggctgctcttcctcggcctccgcacccgcctccgcatcatctggctgccgcccggcctcggggcccggcggctctggttcgcctgcactgcgctctccgcctgctccgtcgcgcccaggctcctctcctccgcattccgccgctgcagaggtaagcaacaggacaaggcctcccctgaggatactgctgctgtggctcgggacggcggaggttgcgccgatggcaggacaaattttgagggtgaacatgatactgtcactgagaaggacctagaacttctccttcaacttttagataataaggaaagcggggatacagcttggcagaatttgatggagcgtacaacctccaacatgacctacaaggcctggcggcgtgagcctgaggagggacctataatgtactgcagccgcactatttttgaggatgctacacctgaactggttagagatttcttctgggatggtgattttcgtctaaagtgggatcccatgcttgcatactccaaatctttggatgagttccctcagaatggagcaacaattgtccactggataaaaaagttcccattcttttgcagtgaccgtgaatacatctttggaggacgcatatgggaatctgggaagacttactattgtgttacaaagggtgttccatatccatcattgcccaagaaagaaaaaccaaggcgtgtggagttgtacttctcaagttggcgtattagagctgttcaatcgcctaaacatgtgggtcagcaatctgcgtgcgaagtaactttggttcactatgaggacatgggcataccaaaagatgtagccagggttgctgttcgccacggcatgtggggtgctgtgaagaaacttcagtctgggttcagagcgtaccagcaaatgagagacacagaaaataccctgtcacacagcgccattatggctcgaatgaccaccagggtatccatcacggcttcgaatggtggcttagaccatgacctctccatcgccgataaaatcagtggcgagaatgacagctcccatgcagttcagcatggttttgactggaagtgggtggtttttggtggtgcggtggctgcggtttgtgtgctcaacaccggactggtaggcaaggtcctgttgcttggagcagcgagacggcaggcaaagaagtgatgtgaggagcaaccttccagcctctgcagaaaggcattcgtcaggctgtagctacaaccgtacaggcaaaaagtattgaggaaataggtggggttcgacagatataattgcaatgtgtaattttggattgtgcacttgtgcagtagatgtagcatgcttgctaccataacagattccgctgtatcaggaatcgctggctaatactccgtatatctgaagatctaagaggtcactgcatgtttgcagctttctatgttcgatatacgtataacggcactgcatgttataagagaaatccattctctgacactgaacagccttttaacatttctttctgaggctgtcattaggtcctggtgccatgtcatatgaa

SEQ ID NO: 98749 - DNA, 1432 bp, Zea Mays
catcttgtctgccacagttccacctctccatttcgccgaggaagaaaaaggaaaaaaacacagaaggggttggagagaaacggatcaggggcggaaggttccagccctagcacagcaatggcgggttggtgcgaggaggcggtggcgttgctgcagcgccccgcggcggcggagatggccgtcgacgtgctgctctgcgcggtgccgatctgggccgctgtcatgatcggcctcgtcgtcggctggtcctggcgcccgcgctggacggggctgctcttcctcggcctccgcacccgcctccgcatcatctggctgccgcccggcctcggggcccggcggctctggttcgcctgcactgcgctctccgcctgctccgtcgcgcccaggctcctctcctccgcattccgccgctgcagaggtaagcaacaggacaaggcctcccctgaggatactgctgctgtggctcgggacggcggaggttgcgccgatggcaggacaaattttgagggtgaacatgatactgtcactgagaaggacctagaacttctccttcaacttttagataataaggaaagcggggatacagcttggcagaatttgatggagcgtacaacctccaacatgacctacaaggcctggcggcgtgagcctgaggagggacctataatgtactgcagccgcactatttttgaggatgctacacctgaactggttagagatttcttctgggatggtgattttcgtctaaagtgggatcccatgcttgcatactccaaatctttggatgagttccctcagaatggagcaacaattgtccactggataaaaaagttcccattcttttgcagtgaccgtgaatacatctttggaggacgcatatgggaatctgggaagacttactattgtgttacaaagagtcacgccttcatcttcctcgccgcactagggcagatgcctcgcaggagctactcacctgcaccagagctgcctgggaaaaggccgcgcgtcgtggccgctgccggggcagggacacggacccgggccttgcccatgccggggtgggggcaccggcaagtatgcacccacgccggctgtcagggtcacacatggacctcccaccaataatgttcttgctcgtgagacggaggaggaagacaagtcgctcgatggaaaaagaacgaatcaataactttcatagccactggcaggtggttgatttcgtggactttccgaactccatagcagatgaaagcagggagaaggctactgtgaaatttggactggtcagaagctgtttttggctgtggctttgggtgggagccaacccatctggttggctaaaagccaaagcaggttggaaagcccaactaaagggggccttactcatgtaattatgctccctttattatcttaaaaaaacaattgtttaatt

SEQ ID NO: 98750 - DNA, 819 bp, Zea Mays
gtctgccacagttccacctctccatttcgccgaggaagaaaaaggaaaaaaacacagaaggggttggagagaaacggatcaggggcggaaggttccagccctagcacagcaatggcgggttggtgcgaggaggcggtggcgttgctgcagcgccccgcggcggcggagatggccgtcgacgtgctgctctgcgcggtgccgatctgggccgctgtcatgatcggcctcgtcgtcggctggtcctggcgcccgcgctggacggggctgctcttcctcggcctccgcacccgcctccgcatcatctggctgccgcccggcctcggggcccggcggctctggttcgcctgcactgcgctctccgcctgctccgtcgcgcccaggctcctctcctccgcattccgccgctgcagaggtaagcaacaggacaaggcctcccctgaggatactgctgctgtggctcgggacggcggaggttgcgccgatggcaggtgagcgtagtggttgaatctattttacattgtggctggcggggttggctgggtaccggggtgggtggcggaaatgcagcgcctgtcaatcttgtcaactgtctctcttggagaccagttgtctttcagtttgaaattgtattgaacgatcttgcggttctttcattgggcgaccctgtccttgtgttggaggcagtttaggagatttgaacttttttcccctcatgaaaattactctctttaagctgacttgatgaactgacacacatgacgatagagttggagttgagggagttattgtattttgaattcgtgacattgaccgatgttg

SEQ ID NO: 98751 - DNA, 2505 bp, Zea Mays
catcagcggcctgataagctatagccatcttcttctctgaattccagtccaagggccggaataccgtcagagggagtgggagagggggggaaaaaagatggtgaagctcgcatttggaagctttcgcgactctttgagcgccgcgtcgctcaaggcctatgtggccgagttcattgccacgctgctcttcgtgttcgccggcgtcgggtccgccattgcctactcgcaattgacgaagggcggcgctctggaccccgccggcctggtggccatcgccatcgcccatgcgttcgcgctcttcgtcggcgtctccatggccgccaacatctccggcggccacctgaaccccgccgtcaccttcggcctcgccgtcggcggccacatcaccatcctcaccggcatcctctactgggttgcccagcttctcggcgcttccgtggcgtgctttctcctgcagtacgtcacccacggacaggctatcccgacgcacggcgtctccgggatcagcgagatcgagggcgtggtgatggagatcgtgatcaccttcgcgctggtgtacaccgtgtacgccaccgcggccgacccgaagaaggggtccctgggcaccatcgcgcccatggccatcggcttcatcgtcggcgccaacatcctggccgccggccccttcagcggcggctccatgaacccggcccgctccttcggccccgccgtggcggccggtaacttcgccggcaactgggtgtactgggtcggccccctcgtcggcggtggcctggcggggctcgtctacggcgacgtgttcatcgcctcctaccagccggtcggccagcaggagtacccatgaaagtccggatgagctagcccgatcgatccgtctgtgttgatttcaccatcgtcgtcgtcgtgtcatctggcgcttcgtgctgtgatcatgttttgtcctgtttgcatttcccaacgtctggttttcatttccattcaccaacggtgccaagatgccgtaagcaagcgagagaagtgttcggtctgtatctgtataaatgcaatgcacagttcggcgtttccatgaacgaattttcacatgtgcgtgtgtatacctaacgggtgcgtgaactttggaacgggcacgcgcggcagcaaccgctgcgaactacccaggcgtcgtttcactcttcggacgcggccctctctccgatccctcgctctcgctatatataaaactccggaacacacagagcctacgtgcgggattattcgtgcgcgcgcaggatagtacactgaaaaacaacgaagagcgagagcctctccgccatggcgtcgaacaacctcctcgtcgacttgaagcgctgcttctcggcgccgtcgctccgttcctacctcgccgagttcatctccaccttcctcttcgtgttcaccgccgtcggctcagccatctccgcccggatgctggcgacgccggacgttaccagcagcgcctggcccctggtggccaccgccgtcgcgcaggcgttcgggctcttcgccgcggtgctcatcgccgccgacgtctccggcggccacgtcaaccctgccgtcacgttcgcgtacgccatcggcggccgcatcggcgtcccgagagccatcttctactgggcgtcgcaactgctcggcgccaccttcgcatgcctctccctcaacctcttatccgccggcgaggaggtgccgacgacgaggatcgcggtggcgatgaccgggttcggtggcgcggtgctggagggcgtgctcacgttcctgctggtgtacacggtgcacgtggtcggggagcgcgagcctcgctcgcgcggcggcgacggcaagcgggagttcgcggccacggcgctgggcgcgctggctgttgggctcacgcagggcgcgttcgtgcttgccgcgggcgcgctgacgggcgcgtccatgaacccggcacgctcgttcgggccggccgtcgtcagcggccacttcaagaaccaggccgtgtactgggccggcccgatggtcggcgcggccgtcgccgcgctggtgtaccagatcatggcgtgcccgagcgtgacagggaacgtggaggcggtggtcgtttgacaagctagtgtgcaactgtgcatccattcgttgtggttgtgaatgagtcgatggatctaaatgtgtgtgtgtgtgagagagaccatgatgacattgtgtttgtaattagtttgtccagtgggctttcagttccgtcgcgttgctgtactgaaatagtttgttgtacgaatgatgatcccgagcatatatttaccgttgattccccggatgagcattatgcgccgtcagataaacccggtcaccaaattacttattttaattcatcaatgttgttcgcgacatataatcctcatccaaaactgacaaaccgcaatgcacgccccatcggctagcggccataaactccagctccggcacgaatgtaaaagcgtgacactttctcccaagaaagaccgtttctcttggcggttg

SEQ ID NO: 98752 - DNA, 678 bp, Zea Mays
gtcgaggactggggtgttgtgtccagcgtgcccactgatggcgaggcccgcgccgccatcgccagtatgaagcagttgtttgggaaggcttctgtcctggattctgaaccgactgaactacaagccctcgcattgcccgtctcagggcatccttcatctgggatattcatggatcatcttgctctggattcggatgcatctatggccatactcgatgaatggactgaaccagctaagctcgttctgaattcaagtgcgcttttaacagaggaacatcaaagtgtgctggatgcattccacttattgcgcgaagacgcctatgttcagaaaatggttatggctttgtcaactgacaaggctgtatggaatgctgtaatgaacaatgatgtggtacaagaatttaagaggtccttcaaggatgccaaggaaacgtatctcaagggaagctctactcctcctcctcctggatttatgatgtgggtcatgaaaaacgtccatgcaaaaattagggaattcttcaagacaatgtttgggcttacgaatatactcttccaagcgggtgaccatagctatcaagccggtgaacagaactatgatttctatgattgtatagtgaggatgtcattcatgctcacggtgttcgtatttgttatggtaaccgtagctcgtatacgatga

SEQ ID NO: 98753 - DNA, 1591 bp, Zea Mays
aggccagatgcattgctcaggaggcaggagcgcttgggccgtgcgagctgcgggatttgggagatgcgtgcagttgaatgcgtgggattcgccgtgatttgtttatgctgatcgccctctcctcccgacccgtgctccctccgcgtccgctctctccctttttctcgtccccagttgccgccgagccaattcagcgccgctttactgttatataagccgcgcctccgcaccggaccagggctctgagatgtgtttatctttctctcctcgcagcgccgtgtgctcttgtgctgaagatccatcccatccatggaagggtgccaactgctagtaggctgtaggatggagatggaggaggaagcgttctttgactcgcgagaggagctcacggcgtcgccggcgcccagcccgggccctgcattgccgtggtcgggaagcctcgacagtgtgtgtcagaggagggagcggttcatgagaagcatgggcctagagtgctgcccggctcccctgcaggccgatgccgtggccaccgtgggcgatgtcgacaaggaggaagaggctgtgccggaatttgggagatcgtggtcgcagtcggatgagaacgactgctccatgtcgagttggtccacggaggagacgaagagcttagaggatggtgtctcggatgacaattctgtcagtggatccagccgggatgatgctagcagcaaggtgagcaggagtttcagttcgttgtccttcatccagaggctcatgagccgcagtggtaagctctctggtgttcccaaggcggtcgagaggaggagaaacggatggcttcggaggctgggcttgaggtctggtatcctcgatcatggaggcgatgaggctagcaccagctcctcagagagtgagcaaaacaggggtggaaggtatgaaagggtcaaggtccgcagctacaggaagcggtcgaaagaactgtcagcagtttatcaaggccaagtgattaagggccatgatggtgccatcctggctatgaagtttagtccggatgggcagtttcttgctactggaggggaagatggagttgtcagggtctggggcgtcgcgcagtctgaggactgcaaaatcccaatggatgatccttcttgtgtttacctcaaagctcatcgccagagtggcttgggtcctgttgatgctgacaatgagaagaaatgcaaagttaagggcgtgaagcaatctgcagattctgcctgtgttgtgattccaacagtggtgttccagatctcaaagcaaccactgcatgagttccgtggtcactctggtgacgtactgagtctgtcatggtctaacaacaagcatctactgtcagcatcaacagacaaatctgttcgcttgtgggaaattggatctgcaaactgcatcactgtttttccgcacagcaactttggtaggtctatagtctcttacttgctgctccaaaacttttcaactatgcttctgaatttgacctcaccatttcgctatgaaaatttacttttgcagtgacttgtgtccagttgaatccaaccaatgagaatcaattcatcagtggatccatagatggcaaaat

SEQ ID NO: 98754 - DNA, 2853 bp, Zea Mays
aggccagatgcattgctcaggaggcaggagcgcttgggccgtgcgagctgcgggatttgggagatgcgtgcagttgaatgcgtgggattcgccgtgatttgtttatgctgatcgccctctcctcccgacccgtgctccctccgcgtccgctctctccctttttctcgtccccagttgccgccgagccaattcagcgccgctttactgttatataagccgcgcctccgcaccggaccagggctctgagatgtgtttatctttctctcctcgcagcgccgtgtgctcttgtgctgaagatccatcccatccatggaagggtgccaactgctagtaggctgtaggatggagatggaggaggaagcgttctttgactcgcgagaggagctcacggcgtcgccggcgcccagcccgggccctgcattgccgtggtcgggaagcctcgacagtgtgtgtcagaggagggagcggttcatgagaagcatgggcctagagtgctgcccggctcccctgcaggccgatgccgtggccaccgtgggcgatgtcgacaaggaggaagaggctgtgccggaatttgggagatcgtggtcgcagtcggatgagaacgactgctccatgtcgagttggtccacggaggagacgaagagcttagaggatggtgtctcggatgacaattctgtcagtggatccagccgggatgatgctagcagcaaggtgagcaggagtttcagttcgttgtccttcatccagaggctcatgagccgcagtggtaagctctctggtgttcccaaggcggtcgagaggaggagaaacggatggcttcggaggctgggcttgaggtctggtatcctcgatcatggaggcgatgaggctagcaccagctcctcagagagtgagcaaaacaggggtggaaggtatgaaagggtcaaggtccgcagctacaggaagcggtcgaaagaactgtcagcagtttatcaaggccaagtgattaagggccatgatggtgccatcctggctatgaagtttagtccggatgggcagtttcttgctactggaggggaagatggagttgtcagggtctggggcgtcgcgcagtctgaggactgcaaaatcccaatggatgatccttcttgtgtttacctcaaagctcatcgccagagtggcttgggtcctgttgatgctgacaatgagaagaaatgcaaagttaagggcgtgaagcaatctgcagattctgcctgtgttgtgattccaacagtggtgttccagatctcaaagcaaccactgcatgagttccgtggtcactctggtgacgtactgagtctgtcatggtctaacaacaagcatctactgtcagcatcaacagacaaatctgttcgcttgtgggaaattggatctgcaaactgcatcactgtttttccgcacagcaactttgtgacttgtgtccagttgaatccaaccaatgagaatcaattcatcagtggatccatagatggcaaaatccgtgtgtgggatattcccagatgcagtgtcattgattgggtggatattagagacataataacagcggtttgctatcgacctgacggaaagggagcagtggtcggaaccattactggaaattgtcgattttatgatgcatcagataatctcctgaggtttgaaacacaagttgcactcagtggcaagaaaaagtcttctcttaaaagaatcactgctttcgagttctcaccaagcaacccaagtaaattaatggttacctctgctgactcgaaggttaaaattcttgaaggaaccactgtgactcagaattatagtggactccgtactgggtcttgccagtccttggcaacattcactcctgatgggcagcatatagtttgtgcaagcgaagactccaatatttatgtatggaaccatgaaaaccaagacgaggcttcactgaaacatgcgaaaaccatatggtcctcagagcgcttctactccaacaatgcagccatcgcaataccatggaatggcccgaaacccagaaacccggtctctctggcctcccaaatcttgtcaccacaaggagataacttgtggtgcatgagtaaggctgtcaagtgcagttcgagtcagagcgaagattctgctatcaacagttttgtgtcaaggtttgctcctggtattttcaatttgaatcaggagttctcctctgagtccacttgcagaagttcagcgacctggccagaggaaatcctgccgtctcgctcgattcgtgcaattctggacgagtcgcagtacaagttcctaaggaactgtttccagagcacaccaaactcgtggggtcaagtgatagtcactgcaggatgggatggcaagatcaggtcgttccagaactatggcttaccggcgcaccagtgaacaacagctggagcatctgctgaaactacaccggcagttttggcacctcacatggcgtgtggtttgttggtacaagacatcacatgctcagtgctcctcctgctgaattgtacatggaccagtgttgtacataatcaacctggtggtcctttgagatctccgcgtcagcggttgttcatggcaggacccgtggattgtacctttttgtagaaattttttgtgtgtagatcagatctgactctctccctttgcccccccttatcaattgctcattgatatatatactacagaaatgttagtctcagctgagtgtaagttcccctcccattgtattgcgggaacagccagatatatatatgtgccactcaagtatacaaaattctttcatttttttttgaacttttcctgctctgttgttctgcaagttttcattttgtcgatcgaatttcagat

SEQ ID NO: 98755 - DNA, 1578 bp, Zea Mays
atgaagccaacggcgagaccccgtcccaggtgcagtttacagatcccaggtttttgtcccgcgagaatggaatctctatttgtaggcttgtctcataacaagccaaaaaattcggtggcaaccgcaatagttcgagaagtgttatctcatgactggttgctcctagactatatttgcacgcaaggtgatcttgctctcatcgattttattaaggaaatcccttgtgaaccaagggtagaagtcgtgcttattgatgatgcctttgttgaaaggaaatggatggagtgtttatttcagccgaacgcatatttaggtgacgaggttatagactgttacataaatttgataaaagctcaaaagcatctaaagtgccgatctggaggtcgcgttcacatagaaaatgctttccagttcaatttcctgaagcgagatggtgatgttgaaattaaaacagaagagctatatccaaataaatacatgacacaaatatgtagcgctgaacgaagggtgttactttacttagaccatgacatggtgtttattccgataaacatccgagagacgcactggtatcttgccgtgatccatgcaagaaatatggagatacaagtgctcgattcacttggtacttcacaagatcgcaaagacctcactgactctattaaaggactacaaagacaaatagatatgatatctcaacgtaaggagttaaaagaccacaggtggccagacctccaagttgcttcttggccgctcagagaaatagacatgggatatgcaaactcttcatgtggcctctttcttttgaactatatcgaatactggacaggggatgaactgtctgacagttttaccaaggttctcatgccatggaaattcaatggatgtcacgcccttttcgtaatagatcatgttaaaaagcatgtgacttttatcgattttacaccgactcaagattggtgtaaacacatgccatacaagaggttcgcggaagcgattatcatggcctcaaaaaaatataagattgcttacagcaagaaacgttctggatgggcggaggatatctttaagtgggaacatacaattcagactggtgttccagttgacttaagagggaagctccagacagagaaggcaccggcggcactaggacctaattctctggccatcaaagcaaacactgtccagttaactggtcatagcatttttttacaacaacagatagcttatcttgttcacatcggaacagatgttgaaattgctcttgatcaatcccgtgtgttatatgacatggacagcgatgatgaagagtggatatcaagctggcggaaatccttagtaagagacaacaccaccacacttcagtttgcagaagatttgtttgagagggttatggacaaactagagaagtttgcatatagccacaactgtaatggactcagcattgatcagatgaaggaactggggactgatgatgtacctctgcacactattgaagtgatacatgcatattggcaagacaagaggcaaaaaaggggaatgccacttattcgacattttcagctttctattgtttag

SEQ ID NO: 98756 - DNA, 1810 bp, Zea Mays
acgtagcactctgctacacccccattgtacacctggatcctctccttacgcctataaaaggaaggaccagggccctcttagagagggttggccgcgcggggacgaggacgagacagtcgctctcttggggccgctcgcttccctctcccgcgtggacgcttgtaaccccctactgcaagtgcacccgacctgggcgcgggacgaacacgaaggccgcgggattcccacctctctcacgccggtctccggccgcctcgctcctttccccccttcgcgctcgcccacgcgctcgacccatctgggctggggcacgcggcgacactcactcgtcggcccgagggacccccggtctcgaaacgccgacaaattctaatatcatttgaccacataaacttcaaatataacaacaatattatttcgtgtcgggctgtgctttagactcctatttttgaaccgtactcgtgctggcccgaaaagaccagcccatattcccagcactactcgcaacgatgtcatcttgcggacgtttcgttgtgaactaccggtagaggtcgcaaaatttacttggtttcataggatttagattctattctaaaatactttacgctcttacctttaaatatatacttttttatcaatttttttttctttcaatacatgtctttgccactctcgttttccaaggcggaacgtgaatgtctgcacgcaggggggatattctggccgcaggttcgttggcggacagcgaaagtgtagcagcagtagttgccagtatgatcagctagctagcaatggctactggcgctggagttagctgattgcggcatatcgttccttgttctctcttcagtttaggagcaacggttggcccggttcgggcgggcgattgtgatttaggcacctgccattggactcctgcgtctacgtgatgccgggctacggccttgcgggcatatcacgtacaacgagtagcggttagagaggataccgtacattatacgagcacaacagcggaacggcgaggtgagcaggcgtagcagcgacgcgacgggaaccgtgctcgttccgtagtgtagtctgccctccgccgcgtgggaactgactcgagaccgcaaacgctgcgtgtggccacgtctgtacgcgccccgctgccgccgccgtggccgttcgtccccggccgtcttggagcgagtcagcgtccgtcgccgtccgcgttccgacgcctccgtctgagacgaagccaactggagcattatagcgtgcgtgacatctatctgtggaccagtccacgccacgcttcgcatggaactcgagggcgatcaaattaataatcagacagacagacagacgccccccagcttgcattccctgctgtgctggcctaaaactgggtacagagactccaaaaaccgtgccatttgtcatcgtttttatttacgaggcgatgagtgggatcccattacggaaaaaaggcaggaggggattcctgcgccggaaagccaactgtggcgccactacgcactgtcctccatccttccatatgatgcatgtaaccaaagaaacttgtggcgaaaacgggaagagagatgacaggatggcacgagcaaaagaggagcgcagctgaagggacgaagacgattgcgaccgcccgtctttcggagaacgatcaggttgtacaggctgcctcttgcttcagccccagcactactagctagctaggaggagcgacacggacgggccggcatcaggtgctgatcttctaccaacaacagcggataaatagtcgtggttctgaaagcttgcccgcacc

SEQ ID NO: 98757 - DNA, 1629 bp, Zea Mays
ggcaacgttgagccgacgcgcccttcttcgtgccgaattcgctgtcaacgagagctttcaacggtaacgatgatgtgcctgccagggaagcgtccgagcaagaacaaaacagtgcgcgccatagcccacagggcggcccaccgattaaaaccgagtctctctggacgtcccccgcgtctaccttctctatctccacccccaactccccaagagccgatcagaccatttgtaccgacccccgagaggcgaccaggcagtccggaagcgcgtccgtccgttggtgctgctggtgccttgtggtcgagcgatgtcgaacgccgccgacgtggaggcgggcgcccaggcgagggcggcgccggcgacgacggggatcaagccgcccccggggcggtacaacaacatgaccagcaacgggccgtacacgccaccgtcgccgttctactacgaccccgcggcggcgcacgggcggcaccactggtcgtggctggtgccgctggtggtcatcgccaacgtgctcatgttcgtgctggtcatgttctacaacaactgcccgcgcagcggcggggactgcgtcggccgcggcttcctccgccgcttctccttccagccgctcaaggagaaccccctcctcggccccacggccgccacgctgcagagatacggagccctcgactggtacaaggtcgtgcacgggaaccaggcctggcggctggagtcgtgcacctggctgcacgccggcctcatccacctgctcgccaacatgatcagcctcatcttcatcggcgtccgcctggagcagcagtttggattctggaaggtgggcctggtgtacctcgtctctggcttcggagggagcgtgctctccgtcttcttcatcaggaagggcgtctccgtgggcgcctccggcgcgctcttcggcctcctgggagcgatgctgtcggagctcatcaccaactggtccatctacaccaacagatttgcagccatgctgaacctgatcatcatcgccgccatcaacctggcgctcgggatactcccgcacgttgacaacttcgcgcacatcggcgggttcgccacaggcttcctcctcggcttcgtgctgctgatccagccccagttcgggtggctggagcagcccttcggtgccaagaccaagtccaagtacaaggcatatcagatcatcctcctgcttgctgccctcgtcttgctggctgcagggttcgctgttggattggtaatggtgttcagaggagagaacggcaacgatcactgtagctggtgccactacctgacctgcgtgccgacgtcaagctggaagtgtgacaattgaactgatcagagattagtgacgggttagcatgcttgcgtcgtacagaagagaacatgcgtccccaccacgagagacaatgtcaagatagatacgtgcccctcaccttctatgacattgtcaatgtattgctttcaagtttgatttttaaagtctgcattgtacagaattctcctgcctccattggatccaaatgaggagtttattggtattttttcttgtatatgttaaaaaaaactctgtaaatcactctgcctgtgttctggtttatggttttattcattgatttcctctgctgtgtc

SEQ ID NO: 98758 - DNA, 5188 bp, Zea Mays
ggcaacgttgagccgacgcgcccttcttcgtgccgaattcgctgtcaacgagagctttcaacggtaacgatgatgtgcctgccagggaagcgtccgagcaagaacaaaacagtgcgcgccatagcccacagggcggcccaccgattaaaaccgagtctctctggacgtcccccgcgtctaccttctctatctccacccccaactccccaagagccgatcagaccatttgtaccgacccccgagaggcgaccaggcagtccggaagcgcgtccgtccgttggtgctgctggtgccttgtggtcgagcgatgtcgaacgccgccgacgtggaggcgggcgcccaggcgagggcggcgccggcgacgacggggatcaagccgcccccggggcggtacaacaacatgaccagcaacgggccgtacacgccaccgtcgccgttctactacgaccccgcggcggcgcacgggcggcaccactggtcgtggctggtgccgctggtggtcatcgccaacgtgctcatgttcgtgctggtcatgttctacaacaactgcccgcgcagcggcggggactgcgtcggccgcggcttcctccgccgcttctccttccagccgctcaaggagaaccccctcctcggccccacggccgccacgctgcagagatacggagccctcgactggtacaaggtcgtgcacgggaaccaggcctggcggctggagtcgtgcacctggctgcacgccggcctcatccacctgctcgccaacatgatcagcctcatcttcatcggcgtccgcctggagcagcagtttggattctggaaggtgggcctggtgtacctcgtctctggcttcggagggagcgtgctctccgtcttcttcatcaggaagggcgtctccgtgggcgcctccggcgcgctcttcggcctcctgggagcgatgctgtcggagctcatcaccaactggtccatctacaccaacagatttgcagccatgctgaacctgatcatcatcgccgccatcaacctggcgctcgggatactcccgcacgttgacaacttcgcgcacatcggcgggttcgccacaggcttcctcctcggcttcgtgctgctgatccagccccagttcgggtggctggagcagcccttcggtgccaagaccaagtccaagtacaaggcatatcagatcatcctcctgcttgctgccctcgtcttgctggctgcagggttcgctgttggattggtaatggtgttcagaggagagaacggcaacgatcactgtagctggtgccactacctgacctgcgtgccgacgtcaagctggaagtgtgacaattgaactgatcagagattagtgacgggttagcatgcttgcgtcgtacagaagagaacatgcgtccccaccacgagagacaatgtcaagatagatacgtgcccctcaccttctatgacattgtcaatgtattgctttcaagtttgatttttaaagtctgcattgtacagaattctcctgcctccattggatccaaatgaggagtttattggtattttttcttgtatatgttaaaaaaaactctgtaaatcactctgcctgtgttctggtttatggttttattcattgatttcctctgctgtgtcatgtccattttcaaacgttcagactaataataggagtagatgacatcttgcagctgaaccacttcttccgcgttgctgaatggctccggccttttttttggtatatacaagaaccaaaacaaatcgtaacagaactaaaaaaatctcttatacagctagatcggttggtctcttgatcatagggtgctgtaaccaccacgggaataaaccagatggcttaaagtaatgttcataggctataacaacatcaatcagaatcaagggaatggagccacaacgagaatcacaccacacctaactttgcgctataaagaaatgaaggaaagaatgaccaccttgactaaactactccagcaatcccattagcctgctatatcccttcagcgcaccccaaaagaatacaaaattaagggagcgcaagtgaaaagggttcaaagttcaaactcgcattagcctattgttttgttagtggcagcttccaaaatgttttggtagccacaagtattttctcggtactgcctgattctggttcactgtcatgcacctgtgccttccaccgaatcgactgagcgatctgtgctgccttggctactacgtctggcgaggcccgtataacggcagttccttctgggcgcagtatgcgatccatctccaacatgacatcaaacaggtcacatctgaaaaagaaagtcatacaaaaccatgtgtaaggttagtcatgtaaaggtaaaactatgataacaatcttggctaatccatttacttgaattctaacaagacatgttcattgaattaagaatgctaaaggtcaaatggtcaatacagtagtacagcagcaacccgcaaagtacttcagtttcctttgttttatttgttcacctaagtcaactctaaccagatacttctttcctagaaaatacatcctccaatcaaaaataagttcattaggacatcaagtccaaaggttgtggcgggagaatagagaccaaagattttagactcaggccgtgtttctttcggagtataatctgtccagattatataatccagcataaataatctagcaggtaaataaacaattagattataggtccagattatataaatatataatctaaagcccagattatgataatctcataatctcctcaagagtagctaatttgagattatttttggcaaaagacccactattacaaatctgacatttttcttcttttcccaaatcacacgcacgcagggtattgttgtttttgtctttgtatctcaaaatcaataaccttcattcatataatctagttatccaaacagctccatatagattataatctcaacaaattataatctagattgtataatctataagttgaaacaaacatgccctcggtagaactaaaaccgaatatatgagattgatttcgatactactacatataaaggagatgttaatttggaagggcaggtagtgtacaggaagatacctttgtatttaggatcaatgttagatattcatgaagatgtttgccataatatcaaagcaaagtgaatgaagtgatgtcaattatctgacattctatataacaagagagtaccgtagaagctaaaaagcaagttttataagacgataattagacctgctatgttatatagtgcaaaatattggtctaaaaaagacaacatgttcatcaaataagtgttgcaaaatacgtatgttgcattagttttgtggccatacaagaaggaatcaagatcgtaataatgatatacgtggtagactagaagtagcactaattcaagaaaagctcgtccaacattggttgaaattgtttagatatgtccaacagagacctctaaagacaccaatgtatagtggtatcataaaacgaatagcaatgaaaagagagaaagaggaaaccaaaattaacataggaagaggcagtaaaaggagacctaaaatgataaaatatacacaaatatgagtgcatgaaaaataaccatacatgtgtccgaaccttgatttgtgggttttgttaggttttaactctagcctaccctaacttgcttgggactaaaagagactttgttttttttttgaacgaactttgttgttgttataggacatcgatgcggtctacaatatggtattttgggtaacaaaaaatatattgttattaaatgggtgattattgtagaagtatttttataaggaatttaataataccaatcttgtgttgtttcaggagtcaggtcaaacctaacctagatagagttatattccgatcaaaggaagcaattcaagttaaatcacgtttaggctgcaacccaaactcaagcttctgcaaaacacaaattgcaccgatcattgaaacaaataaatgatagaactttttttcctcgaacgcacaagagacatatgcatcatttcattaagaagggaggaaaaaaagatccaaaatggatcagtacatgctgcagaaaccattggaaacaaacaagatctacaaatttaaaattaaacagaaaacaagtcttaaggtatgtaacaagaacatagttgttactgtactaatttacatttggtgagattcacatgtcaaaggtcttttttactcattaagcagtacacattaacacctgcaccaacagtttattatggacatgtcttcaacttcaagataataacctaggcatagcaggaattgggacgctcaacatagtagtaacctataaatacatacaagtttcaggaaacatcactttctcaagcgaagtttgattcttatctcattagtgtaaagaaaagacagggagacaagttttaatgatgatatttttataaattattatggatttctgcagaatttaccaatcaagtgaaacgaactgtgaaatttaataataaagtacttatgtcaaacatcttaatggagatggagtacaagataaggttttctcatatcacactgatacaaggttaaataaatgaaatgagaataatataaaaatattagaaaatgggacaataactccaggtatatggctggtgtacctgctagtgcctgaaatcgggccacttatcaaggagtcaattgcatcagcatgaataagatcataggtacgaggatacgttgagaatggttcacacctgacaacaaaaacatataatcagtacaatttgggaacataactatctgtctactacttgagtatttcttcaaatctataaacctaaaatgacaagcagttcatttatatggagcattttatatttgatcaaaccatctgcatgtaatcaattgtggaacgtagagcgtgtagaaagtacaggggtaaaagctacatgatgtttctcaggtctatataaacagagaaatatgcaaatactactttacaaaaataaagtttatgtttagtgccacaacaaactaagtgttttcctagcattacatttcattggttgatcaatgcaattttatcagatacacaagtaaattcaggatacgtttgcataagagttaaacagaggtaaacagtaacgacattgtatgtaaaattatca

SEQ ID NO: 98759 - DNA, 1429 bp, Zea Mays
tacagctagatcggttggtctcttgatcatagggtgctgtaaccaccacgggaataaaccagatggcttaaagtaatgttcataggctataacaacatcaatcagaatcaagggaatggagccacaacgagaatcacaccacacctaactttgcgctataaagaaatgaaggaaagaatgaccaccttgactaaactactccagcaatcccattagcctgctatatcccttcagcgcaccccaaaagaatacaaaattaagggagcgcaagtgaaaagggttcaaagttcaaactcgcattagcctattgttttgttagtggcagcttccaaaatgttttggtagccacaagtattttctcggtactgcctgattctggttcactgtcatgcacctgtgccttccaccgaatcgactgagcgatctgtgctgccttggctactacgtctggcgaggcccgtataacggcagttccttctgggcgcagtatgcgatccatctccaacatgacatcaaacaggtcacatctgaaaaagaaagtcatacaaaaccatgtgtaaggttagtcatgtaaaggtaaaactatgataacaatcttggctaatccatttacttgaattctaacaagacatgttcattgaattaagaatgctaaaggtcaaatggtcaatacagtagtacagcagcaacccgcaaagtacttcagtttcctttgttttatttgttcacctaagtcaactctaaccagatacttctttcctagaaaatacatcctccaatcaaaaataagttcattaggacatcaagtccaaaggttgtggcgggagaatagagaccaaagattttagactcaggccgtgtttctttcggagtataatctgtccagattatataatccagcataaataatctagcaggtaaataaacaattagattataggtccagattatataaatatataatctaaagcccagattatgataatctcataatctcctcaagagtagctaatttgagattatttttggcaaaagacccactattacaaatctgacatttttcttcttttcccaaatcacacgcacgcagggtattgttgtttttgtctttgtatctcaaaatcaataaccttcattcatataatctagttatccaaacagctccatatagattataatctcaacaaattataatctagattgtataatctataagttgaaacaaacatgccctcggtagaactaaaaccgaatatatgagattgatttcgatactactacatataaaggagatgttaatttggaagggcaggtagtgtacaggaagatacctttgtatttaggatcaatgttagatattcatgaagatgtttgccataatatcaaagcaaagtgaatgaagtgatgtcaattatctgacattctatat

SEQ ID NO: 98760 - DNA, 749 bp, Zea Mays
gatacagcatagtactcctaacttaatatatttggttccaattcacatgcatggttttgacggcagcagctatataccacggagatcacgtagaggggagtcgtttttgcggttaagcacgcatagtattaccagctacgtaccagcaacttacacttcgctacacaaagcaacaaacagaaaactgttgacggtaataggcaccaccgaaggaacaagatctaataacgaccactagtagaattcacttcatcctcatcgcttgagttgagacactgggtatcaatcagttcaggcgcagcaccacattatcctgaagcgagctaggtaggatccggatcagtacctgaccggcatgccaagtcggtccaatctgccggagcccggatacgccttcatggcgtgcaacgaggccaccgacctctgtgccgctgccggccccgccgcgagggcgtgcgccgacgccctgcggagggagcccgacttctcgtactgctgctgcggcctctgcttgggcgcgctctgggaacgcgccttggcgcggaacgactccgtgttcgccatgtagttggggcagtcggagtagccgccgaagaggctgcgcccagcccatctccgcctctctaccgcccgtcggccggccgccccatgaggctttcttggttccagcacttggccggagcacggggtaaagaaagagcgggagatgaaaccaaaacagtgaaatgaacacacgcttcaccgagaag

SEQ ID NO: 98761 - DNA, 1517 bp, Zea Mays
tgccgtcttcgcaggagcaggacagaggaaaagcagaagcaggccagcccaaaagaagcacgttcacggttcaccaagtcaagcaaacctctctcaaattccaaacccccacaatcaccgcacccccttcctccttccacattgcccatttgcccccccaagcaagagcaaccaagcacgccgcggtccgtgctccctccctccctccgatctagagtagagcgcgcgcccaagtctagaacggagaccaatgcgcaaggtgctcatcaacgccgtcctcttcccggctctcgcggcggcggtcgctctggccatcttctgcttcgtccgctgccgccgccgccgcggccggggtcgcggccgcgaccgctcggtactgccctcgcacggcggcggcgcgagggcggaccggttccaggcgggcggcgcctcgggcggatacgccgccggcgggggggaggaggcgctgatgcggttccccggcggcgaggcgctcacggtggccgcgatcctcgaggcgcccggggaggtggtggccaagtcctcgcacagcacgctgtaccgcgccgggctcagcgccggcgaggccgtcgcgctgctccggttcgtgcgcccggcctgcgccgcgggcgccgacgaggcccgcgcggccgcgcgggcgctcggcgccgcgcgccaccccaacctcgtgccgatccgcgcgctctacatcggcccccgcggggagaagctgctcgtccacccgttctacgccgccggctcgctgcgccgattgctgcaagagggaatcaatgattcacagaggtgggagataatctgcaagctgtcgatcgggatcgccaaaggactggaccacctccacacagcgtcgcacaaggcaaacgttcacggcaacctcaaaacaaacaacgtcatgctggacgccgatttccagcccaggatctcagacttcgggctctacctcctgctgaactccgccgcggcgcaggagatgctcgagacgtctgcggcgcagggctacaaggccccggagctgatgaagatgagggacgccacaagggagagcgacgtgtacagcctgggagtgatcatggtcgagatgctcgctcagaaggaggtcgcagacggccgtaataagccgccgccgaacgcgcgcgacatccacctgcccgcctccttcagagacctggtcctggagaggaagatctcagaagctttcggctccgagcttcttctgaagcggagcaaggactccgggatggagggccgcctggacgcctacttcgaactggcgacggcctgctgtaatccgtcgccgtcgttgagaccggatacgaagaaaatactgaaaaggcttgaggacatagcaagacaataatagtagaggcgtgcggtcgggtgcggcggtgaggctatccccggtcctgtttagaaagtaagtgtggtgttatagcagcaaccgcccaacagaggattacttgtaatgtttggttacttgttgcatacgacggcagaga

SEQ ID NO: 98762 - DNA, 2920 bp, Zea Mays
aattgtaaactatggtgaggcatgagattgatgtgataccacagtccacagtgtaaccagtgaaagaaaagaaaagacggacgcattccaacccatccattccgtgtccctgggcaccatgcatggctgtccggtgacccggcctgaacctgcgaggaaaatgtgaagaccccacgcgaccaaacagcagaccacagtgagggatacagatcggacccgaatttctcctcattgattgtcctacacctccctgcccgtagagagccacgcacgcacaaaggggggaggagaggacaggaggccaagcagcagcggcagagacgcaggcgccgcaatgcagggctccaggaccaaatctggctccgctgaggcgaagggcaacggcaagccggacaaggagaagaagggtggcggcggcacgccgccaactcccaaggacagcagaccgcgcaagccggctgtgcccaaggcgagcgccgccagccatggcacgacgcgcgcggccgacaagtcccccgggtcggggtcggaccgcaaggcgcccacgcccaaggccgcctcccgcctcgccacgcctcccgagaagcaaggggggaagcccgcgaagccgccgcaggagcagcaggcagcgaagcctcctcaggagctgcaggcgcagcttgccgtggtccgagaagagctcgtgaaggccaaggagcagctggtggagaacgagaaggaaaagggcagagtccttgcggagctggagcgtgccaagcaggcggctgatgaggccaatgccaagctgcaggaggcgcttgatgcgcagaggagggccgaggacgcgcaggaggctgacaaactccctgccggcgagtcggaccaagcaagcatgcacagccagcaggaggctgatgttactgcgctgcgatcggcagtggagcagcttgagaaggccaggtatgagctggccgacgcaatcgatgccaggaatgaagcactcagccaggtagatgatgctgttagggcttctgaggtgaaggctcaggaagccgagctgcttactgcagaggttaagcgcctcaaagggctggttgattccaagctggatggcgaagcgaagactgtagagaggattcagaatcttgaagcagagaactctgcattaaagctcgagctcgagaaagcaaagtctgctgaagagaaggctgttcaattggagcacatggttgatgaacttaagagtgatgttgatgatgctaggaagtctggctccaagtcagagcagttagctgatgaatggcagaagaaggcacatctgctcgaggtcagattgcaagaggctgaccagtctaatattttgaagggcgagtctttgaactcagcaatggcagaattggattcaacaagtagcttgctctatgataaagaatctgaagttgttgcccttcgggacaaagtcaggttcttggaggatgagctggcaaagctcaagtgtgatattgatgtgtcgggccaacgggcaaatgctgcggagaaagaggcggcagatctatggacagaggttgaagggcttaggttgaaggtctgtgcagcggaagaagagaaaatggaggcgctgaatagtgttaggaatggtaggtcagaaatagagaccttgaatgaacagaagaaccagctggctgacgagcttgaagctagcaaagatgagcttgagaaaattaagaaggcaatggagggtctggcctcagccttacaggaaacatcagctgaatccagagagatgcaagagaagtaccttttcaaacaagatgagattgagcatgctcaggcacaggtagaggagcttaacatgaacctgaagaatactaaagagaactatgagctaatgcttgatgaagcaaactacgagaaggtttgccttaccaaatcagttgaaaggctagaagcagaagctaagagtgcgcatgacgaatggcagtctaaagagctaagttttgtcaactctattaagaattcagaagaagaaatagtcgctgtcaaagttcagatggacatgaccttggaggttgttaaggagaaagaaaatgaaaacactgagttgcaggagaagctgctgcagcttgagtctcagctaatggaagctaacagaatcagggaggaagccaacgctaaaactatccaatggaaggagaaagtgttagaccaagagaatgaattgcagaacataaaacaggagaacgacgacctgcaggcaaaggtatcggctgcttctgagaagattaaggaactctcttcccagcttgccaatgcaagagatggcacgacgaatggtaaagccaaggaagaagataatgagaagggcgacaccgaaaaggatgacgaacctgttgtggtagttgccaaagtatgggagaacagcaactttgctgactacgattcatctaaggttaaggagaacgatggcgactcgcaggttgatttggaatcaaacaggggcgacgcaggtgttgatagcaacggcctgctcccaactaagcagagcagtggcaggacatcaccaactaaacagcaccagcagcataagaagaagctttctctcaagagattcggtggtctgctgaagaagaaaagcgaaaattagcataaaaaccatctgatcatattctttgttctatcctttgtggcatatttctttggcgagccatctatttcccgagtcttcacatatgttatggaaagcagatgatggatgcttcaaagaagaatacagaatgtcgagtgtatttacataattgcgtatgctgagttcgtgtcttacatttttgtatgcgagctcttgtaattgttcattctatgcttttgttaatgttattgtctatgaagtagagattttcaaatcaggtctactactaaaagatcaattggcctgtatgagcag

SEQ ID NO: 98763 - DNA, 755 bp, Zea Mays
ctcctgcctgcagtttccgtagaagaaaagtgcccctacactgctacagacagagagaactcacattgcggttgcggacctcagcttgcccactacagagctaaccaaaagagatgaaagggagcctttcccacgagctcgagacggggctcccagccgccgacgtgtgggaggtctacggaggcctccttgttggggacttgattccccagctgcttcctcaagttttctcaaaggttgaactcgtagagggagacggtggagttggaacggttctgctcgtcactctcccgccagggactcctggatcagaggctttcaaagagaagttcgtcaaggtcgatgacgaaaaccgcgtcaaggagtgcctggtaaccgagggaagcttttttgaccgtggcttcaagaaatacctggtgcgaatcgagatcataggagaagatcgggaggcatccaccataagatcaactatcgagtacgaagttgaccaggagcatgcaggcaacccccctgttgccagtagcagtggcttggctactatcgctaaggccatcgcagaatatatcatcaagcagaagaagaaaggtcctcctgagtcctgagtaattaagctcccatgtaatcaactccgggaagaaaggatattatattatatcgtgtatatgtttgatcagtgaacaactgaagttaatttgtgtctaccaatgaacaaatagaatacggtaacgagcgaatggttgccatttgaacccaaa

SEQ ID NO: 98764 - DNA, 508 bp, Zea Mays
cagttttccatgtttgttgccgaaggtgacaagtgatttgttggcgccatctacctaccttcctcttgatcccggccggacagaatgcagaggcagctgagcgtctcctcgatgcccaagctcctgccggaggaagccgccctcggtggcgacgacgacgacgtcgaggccaagcccgagaaggcgccggccccgcgcccgtcggggaaggagcggtcggtgcacctcgtaccgctcatcgtcctcctctgcttcccgctcctcttcctctgctcccacgccccctctccctctgacatgtcgagttttgggaagaaggatgggagcatgaaggccaggttgctctgatcgtgggaccaaggactggacaaattaatgatgcagcaagaacattcgagatatttggttttgttttcagttcctctcttcatacaaatcgtgtatttggtgatttcttctgagatacgaagcataaacacgggcctctgtggagcttgtccctgccggt

SEQ ID NO: 98765 - DNA, 2214 bp, Zea Mays
atggagatcgagcggcagctcagccgcagggatgcggatgtgggcgcggacgacgacgacgacgacgtggcgctggtggagcaggtccggctgaccgtgccgacgaccgacgacccgacgctgcccgtgtggacgttccgcatgtggaccatcggcatcgtctcctgcgcgctcctctccttcttcaaccaattcttcgcctaccgcaccgagcccatcatcatcagccagatcacagtccaggtggcggcgctgccggtcgggcacttcatggcgcgggtgctgccgaagacgaagctctcggcgttcggcagggagtggacgatgaacccggggcccttcaacgtgaaggagcacgtgctgatctgcatcttcgccaacgccggcaccgcgttcggcaacggcggcgcttacgccatcagcatcatcaccatcatcaaggcgttctacaagaggaacatctcgttcgtcgtcagcctgctcctcatcatgacgacgcaggtgttgggttacgggtgggcagggctgatgaggaagcatgtggtggaaccggcgcagatgtggtggccgcagagcctggtgcaggtgtctctcctcagggcgttgcacgagaaggaggaacaacggcggatgacgcggagcaagttcttcctgatcgcgctcatctgcagctgcgcatggtacatcgtcccaggctacctggtcccgacggtgagcgcggtgtcgtgggtgtgctgggcgttccccaggtccgtgaccatgcaccagatcggctctggcatgaatggcatcggcctcggcgccttcacgctggactggtccgtggtggccgccttcctgggcagcccgctcgtgtcccccttcttcgccatcgtcaacgtctacgtcggcttcgtgggcttcatctacgtcgtgctgcccgtgtgctactgggcgttcaacctctacaacgccagcacgttccccatcttctccaccgacctcttcacgggcgccgggcagctgtacaacatctccgccatcgtcaacgacaggttcgagatcgacatggacgcctacgccaagcaagggaggatccacctcagcttgctgttcgccgtatcgtatggcctcggcttcgcctccatagcagccacgctgtcgcatgtctcgcttttctacgggaaggagatataccagaggatgcgagagtcatacaagggcaaggcggacgtgcacacgaggatgatgaagaggtacgatgacatacccaactggtggttctacttgctgctcgtggtgaccatggccgtggcgctggtgctctgcaccgcgttcaagcacgaggtgcagctgccgtggtgggggctcctcttcgcctgtgcaatcgccttcttcttcacgctccccatcagcgtcatcaccgccaccacaaacacaacaccggggctgaacgtcatcaccgagtactgcatggggctgatcatgccggggaaacccatagccaacgtctgcttcaaggtcttcggctacatgagcatgaaccagtccgtctccttcctcactgacttcaagctcggccactacatgaagatcccaccgagatccatgttcctagttcagttgatcgggacgcttgtggcgggcacggtgaacaccatagtggcgtggtggctgctgaccacggtgccgcacatctgcgagaaggagctcctcccgcagggcagcccgtggacgtgccccggcgaccacgtcttcttcgacgcgtccgtgatctggggcctggtcgggccgcgccgcatcttcggcccgctgggctactacaacgcgctcaactggttcttcctgggcggcctcgtctgcccggtgttcgtgtggctgctggccagggcgctgccgcggcacgcctggtggatccgcctcgtcaacctgcccgtcatcctgggcgccacggcctccatgccgcccgcgtcgcccatcaacttcacggcctggtgcttcgtgggcgccgtgttcaacttcttcgtgttccgctaccgcaagcagtggtggaagcgctacaactacgtgctgtcggcggccatggacgccggcgtggccatcatgggggtgatcatctacttcgcgctgtcgggacacccgatcgactggtgggggtcgaggggcgagcactgcgacctcgccacctgccccacggccagaggtgtgatggtggacggctgccccgtcttctga

SEQ ID NO: 98766 - DNA, 1584 bp, Zea Mays
atgtgcgacttcttccttccgcggatggagggcgaccaggccggcggtggcgaccttaccgacatcgtccggtccggcggggccgtccctagcagcgccgccgaggccacggcgagggatgagtggcagctccaccagggggagccgccgatgctcttcccgccgcttccctcgtcgacggcgacggcatcggaagcaggctgcgccgcagggagcaccggcgctaacgtcttcggcgccgacgaccctttctccggcctcgtggacccgttctgtaccgactactactcctcatgcgccgacttcttggacgccaccatgccggacgcgatgcccaaggtcggcttcgacgcggctatctgtggcggcagcggcagcggctgcggaggaggcggaggccagggccagctgatagacgtgaggcggaagcagcctctcttgccgcgtggggtgcagatgctgccggttggcgcgctggcgccgagggagatacaaccgtacccggcgtttgccagcgacatggtcaagctcggaatcacggccgggcaggtggccgggtgcgccatcgacgccgccgtcgtcggcatgcagatgccctcgcctcgcgccgcgggcgggatcaagcgcaggaagaaccaggcaaggaaggtggtgtgcatcccggcgccgacagcagcaggggggagaccaactggagaggtggttccttctgatctctgggcctggaggaagtacggccagaagcctatcaagggttctccttatccaaggcatgtgttaattcggcacgcatccactaattacctgggattacgtttcaagggaaatattaatcttaagctgaacaaacaaactgctggtgacaaattggagtttaagcaagacatatggggatgcttagggtactacagatgcagcagctcaaaaggatgctcagcgcggaagcaagtggagcgaagtcggaatgaccccaacatgctcgtcatcacctacacctccgagcacaaccatccatggccgactcagcgcaatgccctggctgggtcaactcggaaccaccacggcaagaacagcagcggcagctcaggttccaagggctcacagaacgagaagcaagagcaacagcaaccaagcaacgtcaaggaagagcccaaggatccggcggccacgacgacagccactagcacgattactacgttgacaactagtatttctccggcagcggttgtgaaagaggagacgttggcagctggatcatcagaagcattggggcaagtcatggatacagcagtagcagaccacaacattgaactcatggaccaggtgttcagtgagagctacaggccgatgataccggaggccggccaccctgacgacttcttctccgacctcgcggagctggagtcagatcccatgagcttaatcttctccaaagagtacatggaagcgaaaccaagtggtggtgatcgtggccatcacgagaaagcaatatccaaggacttggatccactgtttgacatgctagattggtctgctaattcttcatcagcagggagctcatttgagcaaggaaagagaggctaa

SEQ ID NO: 98767 - DNA, 6229 bp, Zea Mays
acgctccccgtcgttcgtattcgatgcgcacctcagtcctcagctgagccgagcggaaccagctcgcacgagaggaggcggccaaacggagaggaagtgagaccgaggtgagaaactgacaggacaggaggacaatcgccgccgcccgcagcaagaagagagcatggacttcctcacgcttccccgccgcgatctgcaggcgctgtgcaagcgcaacggcatccgcgccaacatgaccagtgccgccatggccgacgccctccgcgcgctccccaaggtcgaagggatcgaggagtacgttaaggttctgcagccggtctccgtgctgcaaacggcggttaagccggtgaatgaggagcagaagcaggagagtccgcttccgcgtggccgccgcgtcacggcccagtcatcggagcccattgaggcggaggaagacaaggaaaatgatgcaaagcgacagtcgaacaaagagggcgtgcaggtacctggcgtcgggcggcgtggtgccagccgtcgcgctaggcccgtgcctgccgtgcctcagacgctgggcaaggcagtggcggaggaggatggccagggagagcaaaatctgaagcaggaggccaaaagggatagcgcgcctgctcccgtcgtgggccggctcgctcggccctcgactgttgtaatcgcgcgggcagacgagtcggaggttgcaggtgtggaagaggagcagagcaaggaggtggtagatgatgcgctggcccttggcgtaggccgccgcggtgccagccgccgcgctcggccggcgccttctattgctgcgctagcaggcaatgtggtagaggatgaggagcagatagtccctatcccacgcggccgtcgtgtgaaggcccatggaaactcgtctgagcctatcaggttggacaccagttatgatgatgaaaaggaggaagcgaagcccgtggaggagcaagacgacgcgcaaatcgttggcgtgggtcgtcgcagaggtgccagccggcgcgctcaggcggcgtctgctatagctgcgccagaagccaagacagaggaggagcagaaggcccctatcactcgcggccgccgcgtcaaggccaagtcgaccgagcttatcaggctggacgacagcagcatggagaaaaaggaggacccgaagccggaggaggagacgggagatgcgccagcagttggtgcggagcggcgcgctccttctccttcaaaagctccggctacgaggagaagcggtgcagcaagcaaagccgaagcaggggatgtggccgtggaggtagtatcaagcttggccactcgccagcgcaagacgatgaaagcagcagcagctgctgctgaggcagaggagaaggcaccacgaagggccacgaggcgcggcgcggtgacgagtacccttatgcagcaggagctacaagagaaaccacaagaggctataggtgcaacagatgaggccgcgagggctctacccatccggcctactcgccagcgtaagccgacaatgaaagcagcagctgctgcaacagcacaggagaaggcaccaatagccacgaggaggggcgcgttgatgactctcttgcagcaagatgtacaagaggaaccaaaagaggctgtgggtgcaccggtttctcaccagcgatgtgatgctctggaagagacgaaagaggcttttgttcctcaaaaagaagaaataaacgagctggacgcaccgaaacaagatgaagatgaagacatggttatcattgatggtgagaagctgatggaagagactccagcagaagatccacctgtgaccgatcaggaacgcacgggtaaatcagaattccaagagcagcaagtggacgatgaggagaagtgtttagcaaccctggaggaaccgccgatcattggtcttgtttcaatggtaaccgagcagccatctgaggacgatggaggtgtcaattttcaggatggtggaggttccagtgcggctctgttggacaagaatgctggtgaagagatagaattggtggccggcgttcgggctctgcaggtaccattgacaggcaacggaagtgatgccagccatgaaagtgaaatgagaaagttcaatgaagtactaactgtcagagagaaaaacagtgaggttgatacacaagaagtcgatggtgatgttgacaaagtgctgcatgactctgtggatgacaccattcttattgattgctcaagtgagaatgttgaaatggagaaggcaggaaacgtcacacgtgagatgcctgagaaccaagctgcattggatgaggatgttggtaaaccgaatgaagtggttatcggtgacaagccccaagacacagtgacagataaagttgttcaggagggaagggaagtactgataactgatgagatgcagcaggggacagctggaatgcatgatgagatcgaggatgatcagtttgaatctgtttttgttcaagctgatcaagtagtcactgctgacaacctgctggaacaagtgacagatcgtgaaattactgtggaggagaacacagcactgatagttggtgagagacaacagagcacggttacaatggatgatgatgttgtagaggaccattctgatactgatggtgatcattccaatgaacacatagaagcggtaactactgtcaaagttccagaactcaagctgattgaagatatttttgttcaatctgatcatgcagttgctactgacaacctaccagaacaagtgagagattgtggaattaccatggagaccacatcactgatagttgatgagaagcaacagatcatggttacagtggatggagatcttgtcatggatggttctgaaaccgataatgttcatcctgatgaacagatggaagtggtaactgctgaagaagtgctagaggacacagggataactgttgaagatgttgaggagaagcaaaagagcacagttacagtggataaagatgtcgttgatgatcattttttcaaaactgatgatgttcatgccgatgaacagatggaagcgtcaactactgatgaagtaccagagctcacagaggcagattacgaagttgttgaggagaagcaacagagcacatatacaatgaatggaggcattgaggatgatcatttcaaaacccatgttgctcatgctgatgaaaagaaggaagttgttgctactgatgtgccagaagtcacagggacggtcggtgaaattgaggagaagacatcagttacaatggatggagatgttgtctttgatcatgcagatggacagaaggaagtgatagttactgaagtgccagatgaagtcacagtgactggcgatgaaggtgttgagagaaaagcagctgtgattactgaggccataccagatcacgggactgccccaagtatcgcacatacaatgaatgggtgtgtcaaggaaacccattttggtgatggcaatgagcagaagaaagtaatcactgctgacataatctcgataccacaagatgattgtgtccggaaggagaatgcatccagcatagatgtcgcagagtccctgtccagcaacaagtcatcagggtgcaagaacagcagtgagaagaacactactgaacccatggcggtgctaaaagataagggactaaaagcgaccaagaaacccgtggatttgttagcgcttagcctagggaagcttaaagccaagctcaaggataggctgaacgccgagaagaagaaagaagcgaagaggctggcgcttgccagggtggacgagaacgtttgccgatcgatcccacgcaaaggggcagggcagcagcggaacctgaatctgcaacaacactaacccagggaagaagctggctctgaagtgtgtgcgtgtgcgtccatctagcacctgtggtgaaaccatggtttctcctttacccgtcggctaggcatctaacttatgtgtgatttgcgtgttcgcttggagatgaggcctactaaaccgattcggctgtgttttatcaggtccaatcgtaggtcccagtacccagcattgttttggcctgtgtgtgaggcctgcttgtgtgtcggttgacttgtcttatttcgaactcgttgagaaaggctgcttgcttttttatatctcgtgcagtaacaaagtagtgtcagattgtatggaaatgcgcctcgcttgctcgttgtttatatctggtattagaatgcttagctgccagtatgtggtggagacgcaaattggtaattactacttggatacacagttgagcagggtgctgtcagttcagaaatcggtcggaagagagctactctgcttgatgatttcttgtactgctccgatagtagtagttgtttgaacgtactgcacactcatgtgggcgcctgagtggtgtgctatagggattgatttgagtcgcggtcacggaataaaggaagctagttctagtggttatcgatcatatgaaccgcaagtacttgtataacgctgataacgacaccggtacatcacaggcacacacatctcctgcttgttcttattacaggcacgagcatgacgttgccaggactctccctcccggccgccgcccttgtatcagcagtgtgggctggcagcgtcgcgtcgcgtgggcgtggcgcggttcaggcgacggggggcggcttctcgacgtcctcgagcgggcggaaccacaccttctggtccagcaccgtgcctcctgctgcagccgcattcgcggcggcagcgtcagcggcgacgcccagctggttggtgtccaccgccgccgggccgaacacgccggtcttggggtgggggctccagtacttgtcggggctccccgcgccgccgatcacatcgtccggcacgaacgccgggcgcacctgctcctccgggttcttgtcgtacgacgaggcgtgcacggccctcctgcgttacggaacgaaacacgcgatgcaatgcaatgaggggcggtgagcaaacgcaacaagagctggaagtgatgttccttcttttttctcaagaatcgataggacccaacaaaatcgttgctaggagtacacgtcaggatcaggttccgcgcacgggtacggctgcacatgggcgggcgcatgaaacccggattgctaataatgcctgggccaacctgcagcagaagaggacacgtgggtgggggccgaggataattgcgaggtcacagcccacaggccagccaggtggacctccgttccgtcgcactccatagcttaccgtaccacgcctggtcccgaccccaccgtcatcgagccatggcagttggcagagcagagggtggatggacgacaactgccgcgcaccagagtaccagacccatcaggccccggcgtggcttggctttgaggacgtgcacgtcctgcgtgcctccagtttgaggatgtgcacttcctctctctctctccgcggctaccatgcgagtcttgcagatttgacagtttgaagtgggcagaaaatcaaaatctactgtgtgtggtactcgcaaaacgcccgaaaagaactaggaaagtggattaaacaagctggtgatggtcccaaagcagacagttgccatgtctacgactctacgtagagtcgtagtcgtagaccatgggagagaagataatagtagctcctcctcctacagttggcaaattccagtagattttctgccgagcaaaatcttgccaccagcagcagcacacacattgagaatcagagtcatccacagagctaagaagcaagcaagcaaatcgctctgctctgctgcaactaccacaggaacttggattggaccaacttaacaagaacgcgcatcctaaaaaaaaacacagtagttctactagcacagacgagcaaaccgaaagagaatgaaccacggggcgaaaccgcgttcgtgttgccgtcgtcccagtacctcggggaggcggccttgccggccaggacgcggctgacgaagctcccagcgatcgcccgccccttggagctagccgctgctgccatgcaaaagatcgatcgttcgggggcggaggaaatccaccacacccaacagtggaagcgctgcgctgtgccgccggcgaggccgagggagagaggttgaaatgatgatagtagtcaccacacccaccggctgcccccattttatagcgcccgagctagccggtgccggcacaccgtcgtacagcgcctgctattgctattgctattgctattggctattggggagcagcactgacg

SEQ ID NO: 98768 - DNA, 4132 bp, Zea Mays
tcgatgcgcacctcagtcctcagctgagccgagcggaaccagctcgcacgagaggaggcggccaaacggagaggaagtgagaccgaggtgagaaactgacaggacaggaggacaatcgccgccgcccgcagcaagaagagagcatggacttcctcacgcttccccgccgcgatctgcaggcgctgtgcaagcgcaacggcatccgcgccaacatgaccagtgccgccatggccgacgccctccgcgcgctccccaaggtcgaagggatcgaggagtacgttaaggttctgcagccggtctccgtgctgcaaacggcggttaagccggtgaatgaggagcagaagcaggagagtccgcttccgcgtggccgccgcgtcacggcccagtcatcggagcccattgaggcggaggaagacaaggaaaatgatgcaaagcgacagtcgaacaaagagggcgtgcaggtacctggcgtcgggcggcgtggtgccagccgtcgcgctaggcccgtgcctgccgtgcctcagacgctgggcaaggcagtggcggaggaggatggccagggagagcaaaatctgaagcaggaggccaaaagggatagcgcgcctgctcccgtcgtgggccggctcgctcggccctcgactgttgtaatcgcgcgggcagacgagtcggaggttgcaggtgtggaagaggagcagagcaaggaggtggtagatgatgcgctggcccttggcgtaggccgccgcggtgccagccgccgcgctcggccggcgccttctattgctgcgctagcaggcaatgtggtagaggatgaggagcagatagtccctatcccacgcggccgtcgtgtgaaggcccatggaaactcgtctgagcctatcaggttggacaccagttatgatgatgaaaaggaggaagcgaagcccgtggaggagcaagacgacgcgcaaatcgttggcgtgggtcgtcgcagaggtgccagccggcgcgctcaggcggcgtctgctatagctgcgccagaagccaagacagaggaggagcagaaggcccctatcactcgcggccgccgcgtcaaggccaagtcgaccgagcttatcaggctggacgacagcagcatggagaaaaaggaggacccgaagccggaggaggagacgggagatgcgccagcagttggtgcggagcggcgcgctccttctccttcaaaagctccggctacgaggagaagcggtgcagcaagcaaagccgaagcaggggatgtggccgtggaggtagtatcaagcttggccactcgccagcgcaagacgatgaaagcagcagcagctgctgctgaggcagaggagaaggcaccacgaagggccacgaggcgcggcgcggtgacgagtacccttatgcagcaggagctacaagagaaaccacaagaggctataggtgcaacagatgaggccgcgagggctctacccatccggcctactcgccagcgtaagccgacaatgaaagcagcagctgctgcaacagcacaggagaaggcaccaatagccacgaggaggggcgcgttgatgactctcttgcagcaagatgtacaagaggaaccaaaagaggctgtgggtgcaccggtttctcaccagcgatgtgatgctctggaagagacgaaagaggcttttgttcctcaaaaagaagaaataaacgagctggacgcaccgaaacaagatgaagatgaagacatggttatcattgatggtgagaagctgatggaagagactccagcagaagatccacctgtgaccgatcaggaacgcacgggtaaatcagaattccaagagcagcaagtggacgatgaggagaagtgtttagcaaccctggaggaaccgccgatcattggtcttgtttcaatggtaaccgagcagccatctgaggacgatggaggtgtcaattttcaggatggtggaggttccagtgcggctctgttggacaagaatgctggtgaagagatagaattggtggccggcgttcgggctctgcaggtaccattgacaggcaacggaagtgatgccagccatgaaagtgaaatgagaaagttcaatgaagtactaactgtcagagagaaaaacagtgaggttgatacacaagaagtcgatggtgatgttgacaaagtgctgcatgactctgtggatgacaccattcttattgattgctcaagtgagaatgttgaaatggagaaggcaggaaacgtcacacgtgagatgcctgagaaccaagctgcattggatgaggatgttggtaaaccgaatgaagtggttatcggtgacaagccccaagacacagtgacagataaagttgttcaggagggaagggaagtactgataactgatgagatgcagcaggggacagctggaatgcatgatgagatcgaggatgatcagtttgaatctgtttttgttcaagctgatcaagtagtcactgctgacaacctgctggaacaagtgacagatcgtgaaattactgtggaggagaacacagcactgatagttggtgagagacaacagagcacggttacaatggatgatgatgttgtagaggaccattctgatactgatggtgatcattccaatgaacacatagaagcggtaactactgtcaaagttccagaactcaagctgattgaagatatttttgttcaatctgatcatgcagttgctactgacaacctaccagaacaagtgagagattgtggaattaccatggagaccacatcactgatagttgatgagaagcaacagatcatggttacagtggatggagatcttgtcatggatggttctgaaaccgataatgttcatcctgatgaacagatggaagtggtaactgctgaagaagtgctagaggacacagggataactgttgaagatgttgaggagaagcaaaagagcacagttacagtggataaagatgtcgttgatgatcattttttcaaaactgatgatgttcatgccgatgaacagatggaagcgtcaactactgatgaagtaccagagctcacagaggcagattacgaagttgttgaggagaagcaacagagcacatatacaatgaatggaggcattgaggatgatcatttcaaaacccatgttgctcatgctgatgaaaagaaggaagttgttgctactgatgtgccagaagtcacagggacggtcggtgaaattgaggagaagacatcagttacaatggatggagatgttgtctttgatcatgcagatggacagaaggaagtgatagttactgaagtgccagatgaagtcacagtgactggcgatgaaggtgttgagagaaaagcagctgtgattactgaggccataccagatcacgggactgccccaagtatcgcacatacaatgaatgggtgtgtcaaggaaacccattttggtgatggcaatgagcagaagaaagtaatcactgctgacataatctcgataccacaagatgattgtgtccggaaggagaatgcatccagcatagatgtcgcagagtccctgtccagcaacaagtcatcagggtgcaagaacagcagtgagaagaacactactgaacccatggcggtgctaaaagataagggactaaaagcgaccaagaaacccgtggatttgttagcgcttagcctagggaagcttaaagccaagctcaaggataggctgaacgccgagaagaagaaagaagcgaagaggctggcgcttgccagggtggacgagaacgtttgccgatcgatcccacgcaaaggggcagggcagcagcggaacctgaatctgcaacaacactaacccagggaagaagctggctctgaagtgtgtgcgtgtgcgtccatctagcacctgtggtgaaaccatggtttctcctttacccgtcggctaggcatctaacttatgtgtgatttgcgtgttcgcttggagatgaggcctactaaaccgattcggctgtgttttatcaggtccaatcgtaggtcccagtacccagcattgttttggcctgtgtgtgaggcctgcttgtgtgtcggttgacttgtcttatttcgaactcgttgagaaaggctgcttgcttttttatatctcgtgcagtaacaaagtagtgtcagattgtatggaaa

SEQ ID NO: 98769 - DNA, 1667 bp, Zea Mays
atcgatcatatgaaccgcaagtacttgtataacgctgataacgacaccggtacatcacaggcacacacatctcctgcttgttcttattacaggcacgagcatgacgttgccaggactctccctcccggccgccgcccttgtatcagcagtgtgggctggcagcgtcgcgtcgcgtgggcgtggcgcggttcaggcgacggggggcggcttctcgacgtcctcgagcgggcggaaccacaccttctggtccagcaccgtgcctcctgctgcagccgcattcgcggcggcagcgtcagcggcgacgcccagctggttggtgtccaccgccgccgggccgaacacgccggtcttggggtgggggctccagtacttgtcggggctccccgcgccgccgatcacatcgtccggcacgaacgccgggcgcacctgctcctccgggttcttgtcgtacgacgaggcgtgcacggccctcctgcgttacggaacgaaacacgcgatgcaatgcaatgaggggcggtgagcaaacgcaacaagagctggaagtgatgttccttcttttttctcaagaatcgataggacccaacaaaatcgttgctaggagtacacgtcaggatcaggttccgcgcacgggtacggctgcacatgggcgggcgcatgaaacccggattgctaataatgcctgggccaacctgcagcagaagaggacacgtgggtgggggccgaggataattgcgaggtcacagcccacaggccagccaggtggacctccgttccgtcgcactccatagcttaccgtaccacgcctggtcccgaccccaccgtcatcgagccatggcagttggcagagcagagggtggatggacgacaactgccgcgcaccagagtaccagacccatcaggccccggcgtggcttggctttgaggacgtgcacgtcctgcgtgcctccagtttgaggatgtgcacttcctctctctctctccgcggctaccatgcgagtcttgcagatttgacagtttgaagtgggcagaaaatcaaaatctactgtgtgtggtactcgcaaaacgcccgaaaagaactaggaaagtggattaaacaagctggtgatggtcccaaagcagacagttgccatgtctacgactctacgtagagtcgtagtcgtagaccatgggagagaagataatagtagctcctcctcctacagttggcaaattccagtagattttctgccgagcaaaatcttgccaccagcagcagcacacacattgagaatcagagtcatccacagagctaagaagcaagcaagcaaatcgctctgctctgctgcaactaccacaggaacttggattggaccaacttaacaagaacgcgcatcctaaaaaaaaacacagtagttctactagcacagacgagcaaaccgaaagagaatgaaccacggggcgaaaccgcgttcgtgttgccgtcgtcccagtacctcggggaggcggccttgccggccaggacgcggctgacgaagctcccagcgatcgcccgccccttggagctagccgctgctgccatgcaaaagatcgatcgttcgggggcggaggaaatccaccacacccaacagtggaagcgctgcgctgtgccgccggcgaggccgagggagagaggttgaaatgatgatagt

SEQ ID NO: 98770 - DNA, 2069 bp, Zea Mays
cctacgtccgccgccagcttcaagctcccagagaccaaaccttccctccctacacactaacccacaccagccgccggccagcagcagccatgccgcccaagttggacccctcgcaggtggtcgaggtattcgtccgcgtgacgggcggctaggtcggcgcggcgtcgtcgctggcgcccaagatcggcccgctcggcctctccccgaagaagatcggcgaggacatcgccaaggagaccgccagggactggaagggcctgcgcgtcaccgtgaagctcacggtgcagaaccggcaggccaaggtctccgtcgtcccctccgccgccgccctcgtcatcaaggcgctcaaggagcccgagcgggaccggaagaaggtcaagaacatccggcacagcggcaacgtcgccctcgacgacgtcgtcgagatcgccaggaccatgcgccccagatccatggccaaggagatggccggcaccgtcaaggagatcctcggcacctgcgtcagcgtcgggtgcaccgtccacggcaaggaccccaaggacctgcagcaggagatcgatgatggtgaggtcgagatcccctccgcttaaaggcaatcctcgcggcggcgcggactacgacggtggctgactcgtagcgagaccttctccctcctcccccgcctgacgcccggcgaccactactcactcgctgctctggaagtctggcaggggtttcgcccggttcgacaacatcagggacgacagcggcgccatgccgctacacctcgccgccatgcaaggccgccccgcctacatgcaggtgctactagagaacgacgccattgtctccgttctcacaggctcatacaggtttaaaatctctcctgcgacagcaactgggcactaaactcaagcaatccctccagagcctcagctctctgctggttagtgccttactggtgtctaccactggctagggaccggtaatatctatgctgtctgacaagtcatctggccactcccttaaggaccaattaactcgcatggctgagaatgactatctacttagcggtggccttgaaggtattggttctactggaaagaagtgtgaagtcgctcgccgaagaaatggtttagataccaacaagccaaaaaaaggggcaacctgatacaacaggtggtgggccaacaggaagagagctgaatatcggacaagcatgtttccattcagaaccgagcaacgcttcaaaccagttcatcctagcccaattgatgcaggtgaattcattcttaagcaggacaacaactattactatacatcccttgtttagtctgcaaagctggtacaatggcaggtgcaacattttgagataattggattggacaagcttcttgataatagttctgtagaatcaatgaatgaggaacatacaattggtgattcattagacgaggctgagcaggaggaattgaaccatgagattgctctggagtctactgaagactgcactggctccttgtgcaaagccactgcttttctatttcccaagacagcttttgacttcctgacaaatgtggctgctagtttgtttggtattcatggttctccatctccaagctcagttttggtagatcctcgatatgaaattgtgaagatggcagaaatgcagccatgtgcagaagaaacgccaaaagaagaacagatagtgaagtttgtggcgcagattgacaagccaattctctcttcagaggatgccgtctcaaaaagattcgatgtagtcactgactgtttggatcatcattttgtgaaggaaaatggccatgaaagtgttacaagaggttggctgaagaaggtgcgactggaatggaacatcctgcaaaatgacctaccagatggtattcatgtgagagtttatgaggaaaggatggatcttctgagggcttgcatcgttggggcacctggaacaccttaccatgacaatctttttttcttcgatattttctttcctcctgattaccctcatgaaccacctgtaagctcttccattccagtctctattgttcttgtagacaaaatcacgtgtttgg

SEQ ID NO: 98771 - DNA, 2612 bp, Zea Mays
cctacgtccgccgccagcttcaagctcccagagaccaaaccttccctccctacacactaacccacaccagccgccggccagcagcagccatgccgcccaagttggacccctcgcaggtggtcgaggtattcgtccgcgtgacgggcggctaggtcggcgcggcgtcgtcgctggcgcccaagatcggcccgctcggcctctccccgaagaagatcggcgaggacatcgccaaggagaccgccagggactggaagggcctgcgcgtcaccgtgaagctcacggtgcagaaccggcaggccaaggtctccgtcgtcccctccgccgccgccctcgtcatcaaggcgctcaaggagcccgagcgggaccggaagaaggtcaagaacatccggcacagcggcaacgtcgccctcgacgacgtcgtcgagatcgccaggaccatgcgccccagatccatggccaaggagatggccggcaccgtcaaggagatcctcggcacctgcgtcagcgtcgggtgcaccgtccacggcaaggaccccaaggacctgcagcaggagatcgatgatggtgaggtcgagatcccctccgcttaaaggcaatcctcgcggcggcgcggactacgacggtggctgactcgtagcgagaccttctccctcctcccccgcctgacgcccggcgaccactactcactcgctgctctggaagtctggcaggggtttcgcccggttcgacaacatcagggacgacagcggcgccatgccgctacacctcgccgccatgcaaggccgccccgcctacatgcaggtgctactagagaacgacgccattgtctccgttctcacaggctcatacaggtttaaaatctctcctgcgacagcaactgggcactaaactcaagcaatccctccagagcctcagctctctgctggttagtgccttactggtgtctaccactggctagggaccggtaatatctatgctgtctgacaagtcatctggccactcccttaaggaccaattaactcgcatggctgagaatgactatctacttagcggtggccttgaaggtattggttctactggaaagaagtgtgaagtcgctcgccgaagaaatggtttagataccaacaagccaaaaaaaggggcaacctgatacaacaggtggtgggccaacaggaagagagctgaatatcggacaagcatgtttccattcagaaccgagcaacgcttcaaaccagttcatcctagcccaattgatgcaggtgaattcattcttaagcaggacaacaactattactatacatcccttgtttagtctgcaaagctggtacaatggcaggtgcaacattttgagataattggattggacaagcttcttgataatagttctgtagaatcaatgaatgaggaacatacaattggtgattcattagacgaggctgagcaggaggaattgaaccatgagattgctctggagtctactgaagactgcactggctccttgtgcaaagccactgcttttctatttcccaagacagcttttgacttcctgacaaatgtggctgctagtttgtttggtattcatggttctccatctccaagctcagtaagttatttgttgaacaaattcagccaagctcattttttccagagttcttaagtgaatatgttatccaggttttggtagatcctcgatatgaaattgtgaagatggcagaaatgcagccatgtgcagaagaaacgccaaaagaagaacagatagtgaagtttgtggcgcagattgacaagccaattctctcttcagaggatgccgtctcaaaaagattcgatgtagtcactgactgtttggatcatcattttgtgaaggaaaatggccatgaaagtgttacaagaggttggctgaagaaggtgcgactggaatggaacatcctgcaaaatgacctaccagatggtattcatgtgagagtttatgaggaaaggatggatcttctgagggcttgcatcgttggggcacctggaacaccttaccatgacaatctttttttcttcgatattttctttcctcctgattaccctcatgaaccaccttgactggagcggcaagtgactcgcggcgggcggcggggactcgcggatggcgcccgcgaatcgcggcgttgggcgggcgggcgggcggcggttgtttgcggctgcgggatcctcagcggttgtgcgcgcgggagccacgcgagctggcggcggcggctgcgagatcctcggcggttgtgcgcgcgggagccacgggagcgaggggagagcgggcggttgtgcgcgcgggagccacgcgagctggcggcggttgtttgcggctgcgggatcctcggcggttgtgcgcgcgggagccacgggagtgaggggagagcgggggcagtctacatgtgagtcttaatagttgtagaagactttggaaagtagtggaatgtcacattctaaaaaaatagcctattctaatagtaagattctaattcctcaaaatgaaaagaaacaaacggggcctaagtgttttggtgattaagtatccaacacaaatgttttgaactctttatgtgttaaacaggcaaaaagtatgtttctag

SEQ ID NO: 98772 - DNA, 2541 bp, Zea Mays
cctacgtccgccgccagcttcaagctcccagagaccaaaccttccctccctacacactaacccacaccagccgccggccagcagcagccatgccgcccaagttggacccctcgcaggtggtcgaggtattcgtccgcgtgacgggcggctaggtcggcgcggcgtcgtcgctggcgcccaagatcggcccgctcggcctctccccgaagaagatcggcgaggacatcgccaaggagaccgccagggactggaagggcctgcgcgtcaccgtgaagctcacggtgcagaaccggcaggccaaggtctccgtcgtcccctccgccgccgccctcgtcatcaaggcgctcaaggagcccgagcgggaccggaagaaggtcaagaacatccggcacagcggcaacgtcgccctcgacgacgtcgtcgagatcgccaggaccatgcgccccagatccatggccaaggagatggccggcaccgtcaaggagatcctcggcacctgcgtcagcgtcgggtgcaccgtccacggcaaggaccccaaggacctgcagcaggagatcgatgatggtgaggtcgagatcccctccgcttaaaggcaatcctcgcggcggcgcggactacgacggtggctgactcgtagcgagaccttctccctcctcccccgcctgacgcccggcgaccactactcactcgctgctctggaagtctggcaggggtttcgcccggttcgacaacatcagggacgacagcggcgccatgccgctacacctcgccgccatgcaaggccgccccgcctacatgcaggtgctactagagaacgacgccattgtctccgttctcacaggctcatacaggtttaaaatctctcctgcgacagcaactgggcactaaactcaagcaatccctccagagcctcagctctctgctggttagtgccttactggtgtctaccactggctagggaccggtaatatctatgctgtctgacaagtcatctggccactcccttaaggaccaattaactcgcatggctgagaatgactatctacttagcggtggccttgaaggtattggttctactggaaagaagtgtgaagtcgctcgccgaagaaatggtttagataccaacaagccaaaaaaaggggcaacctgatacaacaggtggtgggccaacaggaagagagctgaatatcggacaagcatgtttccattcagaaccgagcaacgcttcaaaccagttcatcctagcccaattgatgcaggtgaattcattcttaagcaggacaacaactattactatacatcccttgtttagtctgcaaagctggtacaatggcaggtgcaacattttgagataattggattggacaagcttcttgataatagttctgtagaatcaatgaatgaggaacatacaattggtgattcattagacgaggctgagcaggaggaattgaaccatgagattgctctggagtctactgaagactgcactggctccttgtgcaaagccactgcttttctatttcccaagacagcttttgacttcctgacaaatgtggctgctagtttgtttggtattcatggttctccatctccaagctcagttttggtagatcctcgatatgaaattgtgaagatggcagaaatgcagccatgtgcagaagaaacgccaaaagaagaacagatagtgaagtttgtggcgcagattgacaagccaattctctcttcagaggatgccgtctcaaaaagattcgatgtagtcactgactgtttggatcatcattttgtgaaggaaaatggccatgaaagtgttacaagaggttggctgaagaaggtgcgactggaatggaacatcctgcaaaatgacctaccagatggtattcatgtgagagtttatgaggaaaggatggatcttctgagggcttgcatcgttggggcacctggaacaccttaccatgacaatctttttttcttcgatattttctttcctcctgattaccctcatgaaccaccttgactggagcggcaagtgactcgcggcgggcggcggggactcgcggatggcgcccgcgaatcgcggcgttgggcgggcgggcgggcggcggttgtttgcggctgcgggatcctcagcggttgtgcgcgcgggagccacgcgagctggcggcggcggctgcgagatcctcggcggttgtgcgcgcgggagccacgggagcgaggggagagcgggcggttgtgcgcgcgggagccacgcgagctggcggcggttgtttgcggctgcgggatcctcggcggttgtgcgcgcgggagccacgggagtgaggggagagcgggggcagtctacatgtgagtcttaatagttgtagaagactttggaaagtagtggaatgtcacattctaaaaaaatagcctattctaatagtaagattctaattcctcaaaatgaaaagaaacaaacggggcctaagtgttttggtgattaagtatccaacacaaatgttttgaactctttatgtgttaaacaggcaaaaagtatgtttctag

SEQ ID NO: 98773 - DNA, 636 bp, Zea Mays
gccttgcactgcaccactgtcaatctgtcaggccacgccacagcgtgattttgtctacatacagtacggttaatctctttttttctgattgatctctgtgatccagtgactggagcggcaagtgactcgcggcgggcggcggggactcgcggatggcgcccgcgaatcgcggcgttgggcgggcgggcgggcggcggttgtttgcggctgcgggatcctcagcggttgtgcgcgcgggagccacgcgagctggcggcggcggctgcgagatcctcggcggttgtgcgcgcgggagccacgggagcgaggggagagcgggcggttgtgcgcgcgggagccacgcgagctggcggcggttgtttgcggctgcgggatcctcggcggttgtgcgcgcgggagccacgggagtgaggggagagcgggggcagtctacatgtgagtcttaatagttgtagaagactttggaaagtagtggaatgtcacattctaaaaaaatagcctattctaatagtaagattctaattcctcaaaatgaaaagaaacaaacggggcctaagtgttttggtgattaagtatccaacacaaatgttttgaactctttatgtgttaaacaggcaaaaagtatgtttctagact

SEQ ID NO: 98774 - DNA, 94 bp, Zea Mays
catcgcttacctcgcgcgttagctgcggagcttcaaatcaggtatcaaggatgataatcaataactcaaggaagttatgcagcaaaggtttaat

SEQ ID NO: 98775 - DNA, 1339 bp, Zea Mays
ggccttgcccttgcattggaaaacagttaccgctatataacaaacagccgcggcgcacggcgagccaagcccgtcaaggcacgaggactgcaggagcagaaagttggcaaccctttgagttcctcactcacacgcgcgcgagccgagagagcatggatcccaacgacgccttctcggcggcgcacccgttccggtgggacctcggcccgccggcgcacgccgcgcccgcgcccgcgcctccgcctccgccgctagcaccgctgctgctgccgcctcacgcgccgcgggagctggaggacctggtgggccggctacggcgtgcgcccgtccacggtggcgcggatctcggagctcgggttcacggcgagcacgctcctcggcatgacggagcgcgagctggacgacatgatggccgcgctcgcggggctgttccgctgggacgtgctcctcggcgagcgcttcggcctccgcgccgcgctgcgcgccgagcgcggccgcgtcatgtccctcggcgcccgctgcttccacgccgggagcaccttggatgccgcgtcacaagaagcgctgtccgacgagcgcgacgccgcggccagcggcggcggcatggcagaaggcgaggccggcaggaggatggtgacgacgaccgccggcaagaagggcaagaaaggggtcgttggcacgaggaagggcaagaaggcgaggaggaagaaggagctgaggccgctgaacgtgctggacgacgagaacgacggggacgagtacggcggcgggtcggagtcgaccgagtcgtccgcgggaggctccggggagaggcagcgggagcacccgttcgtggtcaccgagcccggcgaggtggcgagggccaagaagaacgggctcgactacctcttccacctgtacgagcagtgccgcgtcttcctgctccaggtgcagtccatcgctaagctgggcggccacaaatcccctaccaaggtgaccaaccaggtgttccggtacgcgaacaagtgcggggcgagctacatcaacaagcccaagatgcggcactacgtgcactgctacgcgctgcactgcctggacgaggaggcctccaacgcgctgcgccgggcgtacaagtcccgcggcgagaacgtgggcgcctggaggcaggcctgctacgcgccgctcgtcgagatcgccgcgcgccacggcttcgacattgacgccgtcttcgccgcgcacccgcgcctcgccgtctggtacgtgcccaccaggctgcgccagctctgccaccaggcgcgggggagccacgcccacgctgccgccggactcccgccgcccccgatgttctagcgtgcgtcgt

SEQ ID NO: 98776 - DNA, 640 bp, Zea Mays
aagcccgtcaaggcacgaggactgcaggagcagaaagttggcaaccctttgagttcctcactcacacgcgcgcgagccgagagagcatggatcccaacgacgccttctcggcggcgcacccgttccggtgggacctcggcccgccggcgcacgccgcgcccgcgcccgcgcctccgcctccgccgctagcaccgctgctgctgccgcctcacgcgccgcgggagctggaggacctggtgggccggctacggcgtgcgcccgtccacggtggcgcggatctcggagctcgggttcacggcgagcacgctcctcggcatgacggagcgcgagctggacgacatgatggccgcgctcgcggggctgttccgctgggacgtgctcctcggcgagcgcttcggcctccgcgccgcgctgcgcgccgagcgcggccgcgtcatgtccctcggcgcccgctgcttccacgccgggagcaccttggatgccgcgtcacaagaaggtacggcgtataggagtatgtactcgtgtcacacacatacagacatacttgtatatatgctcagttttcttctgtagttctgtactagttctgtgtgttttgcctctgcgagcaatgtgatgtgatgatgtggtcgctggtcga

SEQ ID NO: 98777 - DNA, 1384 bp, Zea Mays
aagcccgtcaaggcacgaggactgcaggagcagaaagttggcaaccctttgagttcctcactcacacgcgcgcgagccgagagagcatggatcccaacgacgccttctcggcggcgcacccgttccggtgggacctcggcccgccggcgcacgccgcgcccgcgcccgcgcctccgcctccgccgctagcaccgctgctgctgccgcctcacgcgccgcgggagctggaggacctggtgggccggctacggcgtgcgcccgtccacggtggcgcggatctcggagctcgggttcacggcgagcacgctcctcggcatgacggagcgcgagctggacgacatgatggccgcgctcgcggggctgttccgctgggacgtgctcctcggcgagcgcttcggcctccgcgccgcgctgcgcgccgagcgcggccgcgtcatgtccctcggcgcccgctgcttccacgccgggagcaccttggatgccgcgtcacaagaagcgctgtccgacgagcgcgacgccgcggccagcggcggcggcatggcagaaggcgaggccggcaggaggatggtgacgacgaccgccggcaagaagggcaagaaaggggtcgttggcacgaggaagggcaagaaggcgaggaggaagaaggagctgaggccgctgaacgtgctggacgacgagaacgacggggacgagtacggcggcgggtcggagtcgaccgagtcgtccgcgggaggctccggggagaggcagcgggagcacccgttcgtggtcaccgagcccggcgaggtggcgagggccaagaagaacgggctcgactacctcttccacctgtacgagcagtgccgcgtcttcctgctccaggtgcagtccatcgctaagctgggcggccacaaatcccctaccaaggtgaccaaccaggtgttccggtacgcgaacaagtgcggggcgagctacatcaacaagcccaagatgcggcactacgtgcactgctacgcgctgcactgcctggacgaggaggcctccaacgcgctgcgccgggcgtacaagtcccgcggcgagaacgtgggcgcctggaggcaggcctgctacgcgccgctcgtcgagatcgccgcgcgccacggcttcgacattgacgccgtcttcgccgcgcacccgcgcctcgccgtctggtacgtgcccaccaggctgcgccagctctgccaccaggcgcgggggagccacgcccacgctgccgccggactcccgccgcccccgatgttctagcgtgcgtcgtcgatgtgtgcctgcaccgtcgccgtacgtctcacagttcctttttcttttagagtgtgaaccaccatggaaaattggattccctctcatatgatgttgccacttctcagtt

SEQ ID NO: 98778 - DNA, 1017 bp, Zea Mays
tgggactagagtcacgcgctctgctctgctcgcctgtgatgttacttgctcttgttcgatcataccgcaaactcgcagcgctgtccgacgagcgcgacgccgcggccagcggcggcggcatggcagaaggcgaggccggcaggaggatggtgacgacgaccgccggcaagaagggcaagaaaggggtcgttggcacgaggaagggcaagaaggcgaggaggaagaaggagctgaggccgctgaacgtgctggacgacgagaacgacggggacgagtacggcggcgggtcggagtcgaccgagtcgtccgcgggaggctccggggagaggcagcgggagcacccgttcgtggtcaccgagcccggcgaggtggcgagggccaagaagaacgggctcgactacctcttccacctgtacgagcagtgccgcgtcttcctgctccaggtgcagtccatcgctaagctgggcggccacaaatcccctaccaaggtgaccaaccaggtgttccggtacgcgaacaagtgcggggcgagctacatcaacaagcccaagatgcggcactacgtgcactgctacgcgctgcactgcctggacgaggaggcctccaacgcgctgcgccgggcgtacaagtcccgcggcgagaacgtgggcgcctggaggcaggcctgctacgcgccgctcgtcgagatcgccgcgcgccacggcttcgacattgacgccgtcttcgccgcgcacccgcgcctcgccgtctggtacgtgcccaccaggctgcgccagctctgccaccaggcgcgggggagccacgcccacgctgccgccggactcccgccgcccccgatgttctagcgtgcgtcgtcgatgtgtgcctgcaccgtcgccgtacgtctcacagttcctttttcttttagagtgtgaaccaccatggaaaattggattccctctcatatgatgttgccacttctcagttctcacttgtatgttgcgttgcccggttatagtcaggagtgggcttagattt

SEQ ID NO: 98779 - DNA, 1304 bp, Zea Mays
gactaacactggacctttggttacaaaaatcatgaaatgttgttgctgcaacattgtgtatgctattaggcccaccgacatgttttgaaaataccgtataaacatttctccactgtgagaagctaacttttgtaaatgcatcttgtcaaaatttatcatccattcgatcatgcttaaaaaggtaacaatagaagcaataagccttattctactccacactatattccaaacaactatgttgtctaaaccaatgtttttgaaagctccttttatcatgtgacaagaaaattatgaccaattgttgagtcggacctttagctatgaaagcccttctaacttcatctctaatattaggagcaaaggaattaattggaatatgaagtcccagattagaaataatgtgatccaggtttaaatgatttataccatcaacatcttcaccattggcatctggaatatgtgcattctcttcttgaacaattggaatttcttcactattattctcttgaacttgaacttgtatttcgggttcattgcaaactccactagcacgagtgtttggtccacttccactagaaccttgaccgaaataactcttcaaatctgtcattttacaaaacacataatatgtattagataattagaaggtattacaacaatgagtgttaacataatcattttcatttacgcataataaagagatactttttggacaatcttcttttcctttttccatccaaatatgaactaaattaccaaaataaatctgcacattgacaaataaattagattaaatatatttatcgcagcagatcctagttaaatcctcacagtctcacccaacacatgaactgatattattgatgaacacaaattcagagttcagaaaacttcaccacacctcaagcagaccagcggagtgcggagccgcggagcacgctgctgcttgctactacctcctagtctcctacagtcctactcagggtctcaggcgggcacgcagcgctacgggcatcaggccagaccagacgaccagaactgcgcgaccgcgcgggactgctgcggcggccggcggcgcggcgctgcagcctgcgggcggtccggcggggcctgtgaccggagccgaaggcgctaggtgcggcggacgacgggctctatggcctgcggtggaggcgatggagggcggatggaggcgtagggcgcaggatgattatttaatagagtttgaagaactcgcccttgatggcatcaagtatcatgcttggacatcatttggcaaatttaaaaggaagtatcataattaa

SEQ ID NO: 98780 - DNA, 1246 bp, Zea Mays
accaaatcagccctcgcgtttctcccttcccccggctcccggcgtctctgcgctgcggccgtacggcgatgcggtggctatcgaggctgctctctcaagccgtcgccgccaggagggcctccgcggcggcgaggtccaacactagtctcgtcaagggaggatcccacgggttcgctagtggcggcagggatgggtcaccggaggtgcctcgggagtggttgcggaagctgtgggtagacgagctgaagaagcagaaggaagccgcgaggagatggggcgtcggctcatcattagaggttgcaggagcgaccgaggaggcaccgtcaaggagctatcagtacgaatacagcggctctaaccccgtggaggccaaactggctccgcttcttgcaagagctaacctcgtcattgccagggatattgagtgggcaaacatcatgtttgcttttgagcaggagagcaggtatatcataatggacccactctttccacaatctccagtaggttttattcgagagaaaagcaacatcatctttagacagctactcagaacaagacggccatttgttgcagaaataactgatgctatgggtaacgagatatttaaggttcgccggccattttggtggatcaacagctcaatttatgtagaagtgaatgataaggagataggtgtagtccacaggcgttggcacctttggcggagaatttatgacttgtacttagggaatatgcaatttgcagttgttgagaatccaggattctggaactggacctttaacctggtggatgaagatgataaaatgttggctcagattgatcgtaattggaggggcctcggctttgagctcttcacggatgctggccagtatgctatccggtttggtgatgaggggcaaagccacaagtttgctcccgcagaagatgtcgaagaactgcatgttgttcgccagctgactttgcctgaaagggcagtggctcttgctctcgcgatttccttggacagtgattacttctctagaagaggtggctggggacttccgtttctgatagccacagagtagacaaatgaaccaccctcgcccacactcaaggaaaaaactttttttggggctctcaatttcccaagagtgcaagtgtatgatatgagtggcttttagaattgctaaaactcaatcattactacgccattgtcacattagttggtaaacaggatgttgttgatgaaagggatgacttttgcttc

SEQ ID NO: 98781 - DNA, 1600 bp, Zea Mays
ctccctctgtggcttgcttcttcttggccatgcgtatataacaactcccaccactcgtgatctcctcttatcgctccctcccaattcctcccctcgattctccgggtcgatccggtcgctgtccggcccggttccagtggaggagaatcgcccggtttgaaggaaaggcttggaaaggaaggataggaataatttcagacaggaaggggaaaaggttgctagtacagcaaattcgtttgggcgctttggttgtgctatgagcaggcacatatatatctagactgattataataggcagttatctgacatggaggagcacatgggaagacgaacagtcggcggcctgctattaaccaagggaggatcaattcttctcttcagagaggacggttcgcgccccagggccaagaactgctgctcgcgccatggctgcagtggtcatcattctgttggcaaagccaaaggcaaggaggtgcacagggcagcggtggccaatgaatcaacaccggctaccccacggagaccaaagatttgtaggaatcccgacagaatgccaccacatggaaccagtgctccaggcagcatcagcaaggatgcaggaggctcttgtagcgaaaccggcaacaggtcaagagacactcccggtcccgggcgtgatctactggctcggctcaaggagagggtcaacacatcaaggaaacggtcattgaacagggagaacagcccacagtcaccgagtggattcactgctagttccccgagcaacagtcgatcagtctcgctctcaaggccgtcgcaccgggcagcttcgagggtaagaagagctgatgaaggtgcaaatgcaggagctgacagtgtgcacagaaatggtgctgggggtgctaggaggagttcacagaggggtgacgcaggcttgctgctagttgagcagcaggtagcaagaaaccatgtgccttctgaagggtttctttctgggttcatggcgagatacagaagcgggcttcaggaagggctttcgtccctggacgacagcgtggaggattcaaatgggtacttgcgctttgatacgggtggaattgaagagctccagaactatttaatattcagcgatcggcacagaggaatgaggatggatatcgacggcatgtcctacgaagagttgcttgctttgggagagcggattggtactgtaaaaacaggtctttcagacgatgcattgtccacgtgcctaaataggagcctctacatgcccacagctccagggtctcatgaagattgtgaaacaaaatgcagcatatgccaggaggagtatttatcgggtgaggatgtgggcaagatggcgtgtaaacactactaccacctttcctgcatagagcactggcttcggcagaagaaccggtgtcctatatgcaaatctgttgccctgaaaaccaagtagcaacgtgtttcatgtttctttatagattcttcatatcctttatcccctccgcacctctcacattttcccttttggaattcttttccttcctttttcttactcaaagcactcatttttgtatcaatttaaatcagaaaaggaaatcttgtgttgtgttagcaa

SEQ ID NO: 98782 - DNA, 1487 bp, Zea Mays
ctccctctgtggcttgcttcttcttggccatgcgtatataacaactcccaccactcgtgatctcctcttatcgctccctcccaattcctcccctcgattctccgggtcgatccggtcgctgtccggcccggttccagtggaggagaatcgcccggtttgaaggaaaggcttggaaaggaaggcagttatctgacatggaggagcacatgggaagacgaacagtcggcggcctgctattaaccaagggaggatcaattcttctcttcagagaggacggttcgcgccccagggccaagaactgctgctcgcgccatggctgcagtggtcatcattctgttggcaaagccaaaggcaaggaggtgcacagggcagcggtggccaatgaatcaacaccggctaccccacggagaccaaagatttgtaggaatcccgacagaatgccaccacatggaaccagtgctccaggcagcatcagcaaggatgcaggaggctcttgtagcgaaaccggcaacaggtcaagagacactcccggtcccgggcgtgatctactggctcggctcaaggagagggtcaacacatcaaggaaacggtcattgaacagggagaacagcccacagtcaccgagtggattcactgctagttccccgagcaacagtcgatcagtctcgctctcaaggccgtcgcaccgggcagcttcgagggtaagaagagctgatgaaggtgcaaatgcaggagctgacagtgtgcacagaaatggtgctgggggtgctaggaggagttcacagaggggtgacgcaggcttgctgctagttgagcagcaggtagcaagaaaccatgtgccttctgaagggtttctttctgggttcatggcgagatacagaagcgggcttcaggaagggctttcgtccctggacgacagcgtggaggattcaaatgggtacttgcgctttgatacgggtggaattgaagagctccagaactatttaatattcagcgatcggcacagaggaatgaggatggatatcgacggcatgtcctacgaagagttgcttgctttgggagagcggattggtactgtaaaaacaggtctttcagacgatgcattgtccacgtgcctaaataggagcctctacatgcccacagctccagggtctcatgaagattgtgaaacaaaatgcagcatatgccaggaggagtatttatcgggtgaggatgtgggcaagatggcgtgtaaacactactaccacctttcctgcatagagcactggcttcggcagaagaaccggtgtcctatatgcaaatctgttgccctgaaaaccaagtagcaacgtgtttcatgtttctttatagattcttcatatcctttatcccctccgcacctctcacattttcccttttggaattcttttccttcctttttcttactcaaagcactcatttttgtatcaatttaaatcagaaaaggaaatcttgtgttgtgttagcaa

SEQ ID NO: 98783 - DNA, 1328 bp, Zea Mays
cacacctctgatctctccacagtgcgtgggagctagctagctagcgctagaagtctagaagcagctagtagccacgccagttagtttccaattaagctagccatggcggcattgctcagcatgcttctcgtcggcgtagcgctggtgcagctagggatgcacccgagcgcggcgaccatggacgaggacatcgagctcatctggggcgcgagccacacctacttcttcatggacggcgaaaccgagtcgctggcgctgtccctggacgaccagcagggctcttgcttccggtccaaggccatgttcctctacggcaccatcagcatggagatcaagctcgtcgagggcaactccgccggcgtcgtcgccaccgcctacaccatctccgaaggcccgtggtcgtaccacgacgagatcgacctggagttcctcggcaacgaaaccggccagccaatcacgctccacaccaacatcttcgtcaacggcgtcggcggccgggagcagcagttctacctgccgttcgaccccaccgccgactaccacacctacaccatcgagtggaaccctaagtacatcttgatcagagtggacgggaaggcggtccgcgcgttcaagaactacgaggagtacggcgtggcgttcccgacgtggcagcagcagcgcctgtacggcagcctgtgggacgcggacgagtgggccacgcagggcggccgcgtcaagaccgactggtcggaggcgcccttcgtcgcctactaccggaactacaccttcgcctggtgccagccgtcgcccggcgtgtcgtggtgcggcgccgagcccaggaactcctcgcgcttcgacctggaccagcggacgctggacgagctgcggtcggcgagcgaccagcacaaggtctacgactactgcaccgaccacaaaaggtacgacggctccgagttccccaaggagtgctcgctgcaacggcaagggctgtgatcggtcgatcaatcgatcgcgcgggcgtttgcgttctgttggttttccaattgtttgttgaaggcgatcgaccggtttgagagctcgatccgctgattattgcttgatcattttgtacatctgattgatgaggggcacgggtatgagtacaattttgattcttttttttctacaaaagattggtgatgagttggtcttctccggggcgcgcggttgcttcactttcttctcgatcgggccattcagatgtatcaattaatatttctctgacaagagttgtgccttttgttttagcattggttcgtcatcatatgtaataaacacatgaatagcatccacatttattgttacga

SEQ ID NO: 98784 - DNA, 1249 bp, Zea Mays
gcacccattgactcgcatcttcctcccccctcccctgctcagctctccccaccatttccacctataaagccggtccgcggcatcccttccgacctccacctcctcccttcccgacccaattctcctcaatcaaagaaagtccccacgcagagcaagccaagatctgcgccgcggcgaagcaaatcaaagcaaagcaaagcaaagcaccggctggctcccatggccgtggacctgatggggtgctacgccccgcgccgcgccaacgaccagctcgccatccaggaggcggcggcggcggggctccgcagcctggagctcctcgtgtcgtcgctgtccacgcaggccgccgcgccgcacagggccgcggctcaccagctgcagaagccgccttcgcagccgccgatcggcgagatcgccgaccaggccgtctccaggttccgcaaggtcatctccatcctggaccgcaccggccacgcccgcttccggcgcgggcccgtggtcgaggcgccgccaccggtgcctcctccggccgtctccgctcccgctctccccgtggcgcacgtggtggctcccgtcggcgcggcgcagccccagagcctgaccctggacttcacgaagccgaacctggccgtgtcgggcggcgccacgtccgtcacctccacgtccttcttctcctcggtcacggccggcgagggcagcgtgtccaagggccgcagcctggtgtcctccggcaagccgccgctgtccggccacaagcggaagccctgcgccggcgcgcactccgaggccaccaccaacggcagccgctgccactgctccaagagaaggaaaaaccgcgtgaagaggaccatcagagtgccggcgatcagcgccaagatcgcggacatcccgccggacgagtactcgtggaggaagtacggccagaagcccatcaagggctccccctacccacggtaagtcgtctgtaaaatccaatctcctcctacggacctgtcggcatcgctcgcccgctcggcgctcggctcttctttaccgtcgtctccgactatccgcgccgacgaatctgactcttctctcgccgccatctggtttccaatccaggggctactacaagtgcagcaccgtgcgcgggtgcccggcgaggaagcacgtggagcgcgccaccgacgacccggccatgctggtggtgacgtacgagggcgagcaccgccacacgccgggcgcgcccgcgcccgcgcccagccccctg

SEQ ID NO: 98785 - DNA, 1378 bp, Zea Mays
gcacccattgactcgcatcttcctcccccctcccctgctcagctctccccaccatttccacctataaagccggtccgcggcatcccttccgacctccacctcctcccttcccgacccaattctcctcaatcaaagaaagtccccacgcagagcaagccaagatctgcgccgcggcgaagcaaatcaaagcaaagcaaagcaaagcaccggctggctcccatggccgtggacctgatggggtgctacgccccgcgccgcgccaacgaccagctcgccatccaggaggcggcggcggcggggctccgcagcctggagctcctcgtgtcgtcgctgtccacgcaggccgccgcgccgcacagggccgcggctcaccagctgcagaagccgccttcgcagccgccgatcggcgagatcgccgaccaggccgtctccaggttccgcaaggtcatctccatcctggaccgcaccggccacgcccgcttccggcgcgggcccgtggtcgaggcgccgccaccggtgcctcctccggccgtctccgctcccgctctccccgtggcgcacgtggtggctcccgtcggcgcggcgcagccccagagcctgaccctggacttcacgaagccgaacctggccgtgtcgggcggcgccacgtccgtcacctccacgtccttcttctcctcggtcacggccggcgagggcagcgtgtccaagggccgcagcctggtgtcctccggcaagccgccgctgtccggccacaagcggaagccctgcgccggcgcgcactccgaggccaccaccaacggcagccgctgccactgctccaagagaaggtaaaataacgccgatgtctccaagctaattaaaggcttgctcacaaacaacaacaacaccaacaaaaggaagacaccacttgtcatcttctaaccctggccgctgccttaattgttttcgattgacaggaaaaaccgcgtgaagaggaccatcagagtgccggcgatcagcgccaagatcgcggacatcccgccggacgagtactcgtggaggaagtacggccagaagcccatcaagggctccccctacccacggtaagtcgtctgtaaaatccaatctcctcctacggacctgtcggcatcgctcgcccgctcggcgctcggctcttctttaccgtcgtctccgactatccgcgccgacgaatctgactcttctctcgccgccatctggtttccaatccaggggctactacaagtgcagcaccgtgcgcgggtgcccggcgaggaagcacgtggagcgcgccaccgacgacccggccatgctggtggtgacgtacgagggcgagcaccgccacacgccgggcgcgcccgcgcccgcgcccagccccctg

SEQ ID NO: 98786 - DNA, 1327 bp, Zea Mays
gcacccattgactcgcatcttcctcccccctcccctgctcagctctccccaccatttccacctataaagccggtccgcggcatcccttccgacctccacctcctcccttcccgacccaattctcctcaatcaaagaaagtccccacgcagagcaagccaagatctgcgccgcggcgaagcaaatcaaagcaaagcaaagcaaagcaccggctggctcccatggccgtggacctgatggggtgctacgccccgcgccgcgccaacgaccagctcgccatccaggaggcggcggcggcggggctccgcagcctggagctcctcgtgtcgtcgctgtccacgcaggccgccgcgccgcacagggccgcggctcaccagctgcagaagccgccttcgcagccgccgatcggcgagatcgccgaccaggccgtctccaggttccgcaaggtcatctccatcctggaccgcaccggccacgcccgcttccggcgcgggcccgtggtcgaggcgccgccaccggtgcctcctccggccgtctccgctcccgctctccccgtggcgcacgtggtggctcccgtcggcgcggcgcagccccagagcctgaccctggacttcacgaagccgaacctggccgtgtcgggcggcgccacgtccgtcacctccacgtccttcttctcctcggtcacggccggcgagggcagcgtgtccaagggccgcagcctggtgtcctccggcaagccgccgctgtccggccacaagcggaagccctgcgccggcgcgcactccgaggccaccaccaacggcagccgctgccactgctccaagagaaggaaaaaccgcgtgaagaggaccatcagagtgccggcgatcagcgccaagatcgcggacatcccgccggacgagtactcgtggaggaagtacggccagaagcccatcaagggctccccctacccacggggctactacaagtgcagcaccgtgcgcgggtgcccggcgaggaagcacgtggagcgcgccaccgacgacccggccatgctggtggtgacgtacgagggcgagcaccgccacacgccgggcgcgcccgcgcccgcgcccagccccctggcggccgcgtcgccggtgcccgcctccgccgccgccgccgtctccgccggcaacaacgggcttgtctagtctagagcctaggattagcttcttcgttcttcattttgagctgatccccaccgctcgatctgacgcccgtgtaaaaaaaaaaacaaacgaacaaggttgttgtagaaagaagagggagaggacaccttcgacgaaacgacttggttctctcgtaacc

SEQ ID NO: 98787 - DNA, 746 bp, Zea Mays
tccaccagcccaccaacacacgccacgccgtgggcccaaacaatccccatccgtcggatcacctccacaaaccctagccaccgaacccctcctacataaaccgctcttcccatttccctcgccctgcgccgcctgcgtccacctccgctcgccgctctccccgcgtatccctctcatacgcagctcgcccaggtaagatgtcgtccgtggcgtcgaaggtggcggtgccggagtctgtgctccgcaagcggaagcgcgaggaacagtgggccaccgagaagaaggagaaggccctagtcgagaagaagaagtccatcgagagccgcaagctcatcttcacccgcgcaaagcagtacgccgaggaatacgatgcccaggtcagatcgccgctcctaacctgcctgtagactattcgtgcggggtggttggtagggcttatgtgcggcatgccgttttcatcctcatggcctgtggaatctgtgtttgattgggttgggccgtggccttacgctgatacggagcgagttatgcgaatgctactacgtaacatgatcggttgctgtcaatggttgtagtagtaagaaatgtgttggccaaagtagcagcagtaggaccggttagctgctctgcttagtgtacaacaaactgttatattgcttagtgcatttggaacgcatgtggttaatgcttttgttgcaagatgtccgagcacaatcattttagaatctattcgttggacaagtacg

SEQ ID NO: 98788 - DNA, 1236 bp, Zea Mays
tccaccagcccaccaacacacgccacgccgtgggcccaaacaatccccatccgtcggatcacctccacaaaccctagccaccgaacccctcctacataaaccgctcttcccatttccctcgccctgcgccgcctgcgtccacctccgctcgccgctctccccgcgtatccctctcatacgcagctcgcccaggtaagatgtcgtccgtggcgtcgaaggtggcggtgccggagtctgtgctccgcaagcggaagcgcgaggaacagtgggccaccgagaagaaggagaaggccctagtcgagaagaagaagtccatcgagagccgcaagctcatcttcacccgcgcaaagcagtacgccgaggaatacgatgcccaggagaaggaactggtgcagcttaagcgtgaggcccgtttgaagggtggtttctatgtcagtcctgaagcaaagctgctctttgtggtccgcatccggggtattaacgccatgcaccctaagaccaggaagatcttgcagcttctgcgattgaggcagatcttcaatggtgtgttcctcaaagtcaacaaggcgactattaacatgctacgcagggttgagccatatgttgcatatgggtacccaaacttgaagagtgtcagggagttgatctacaagaggggctatggaaagctgaacaagcagaggatccctctgtccaacaaccaagtcatcgaggagggcttgggcaagcacaacatcatctgcattgaggatcttgttcacgagatcatgactgttggcccacacttcaaggaggccaacaacttcctgtggccattcaagttgaaggcgccgctgggaggcctgaagaagaagaggaaccactatgtggagggcggtgatgccggtaaccgcgagaactacatcaatgagctcatcaaaaggatgaattaggttcacgatcaagctcattgatagtaccctgtgctctaagtgacttcttgtgctatccttattttatattagaaagttggatcgtggatgaatattcatgcagttttgatgtttcgaactagacgtgtatggaagaaatctgatcttctttccggaggtttgggattaattatttaaagcgttttgtatccgaaggtgttagcaccagtctgtgtccaagacgcctttcgtaagaactacggtctgttagcactcgcttgctcatcgaacttaggaatataccgaggcgatcataacaccgcga

SEQ ID NO: 98789 - DNA, 1544 bp, Zea Mays
ggcccaaacaatccccatccgtcggatcacctccacaaaccctagccaccgaacccctcctacataaaccgctcttcccatttccctcgccctgcgccgcctgcgtccacctccgctcgccgctctccccgcgtatccctctcatacgcagctcgcccagatgtcgtccgtggcgtcgaaggtggcggtgccggagtctgtgctccgcaagcggaagcgcgaggaacagtgggccaccgagaagaaggagaaggccctagtcgagaagaagaagtccatcgagagccgcaagctcatcttcacccgcgcaaagcagtacgccgaggaatacgatgcccaggagaaggaactggtgcagcttaagcgtgaggcccgtttgaagggtggtttctatgtcagtcctgaagcaaagctgctctttgtggtccgcatccggggtattaacgccatgcaccctaagaccaggaagatcttgcagcttctgcgattgaggcagatcttcaatggtgtgttcctcaaagtcaacaaggcgactattaacatgctacgcagggttgagccatatgttgcatatgggtaagttttctagctgatttaattcttccgttgccgcttattttgatatatcctccattgaaaatacagagttgaaagcagatcatactgttgcacttgttgcttgagtgaatttttacaatagaatagtgtgttaaaatactaaatgtggacttagattgcaatcttaatcaaggctgtgagtttctatgttcagtacttcagttcttgttcaaaattgttaggttacattagcacttcccatcagtgattttggtgatagtatttgcttttactaaagtgaaaatgcacagtgatgcatgcatattcaaatagttcctgctaaacaatactacaatagataaaatttgaaaaaaacataaagcagacagtgcctggagtagttcctgcatcttagcttggtgactcatctgcttctgatgaccttactaaagtggcaaatcttgtttaggtacccaaacttgaagagtgtcagggagttgatctacaagaggggctatggaaagctgaacaagcagaggatccctctgtccaacaaccaagtcatcgaggaggtttgtaaacttggaactctacatctggttcctgtgttctgtttatatatgacaatttacatgatgatctccaccttttggtgttctatcagggcttgggcaagcacaacatcatctgcattgaggatcttgttcacgagatcatgactgttggcccacacttcaaggaggccaacaacttcctgtggccattcaagttgaaggcgccgctgggaggcctgaagaagaagaggaaccactatgtggagggcggtgatgccggtaaccgcgagaactacatcaatgagctcatcaaaaggatgaattaggttcacgatcaagctcattgatagtaccctgtgctctaagtgacttcttgtgctatccttattttatattagaaagttggatcgtggatgaatattcatgcagttt

SEQ ID NO: 98790 - DNA, 1112 bp, Zea Mays
ggcccaaacaatccccatccgtcggatcacctccacaaaccctagccaccgaacccctcctacataaaccgctcttcccatttccctcgccctgcgccgcctgcgtccacctccgctcgccgctctccccgcgtatccctctcatacgcagctcgcccaggtaagatgtcgtccgtggcgtcgaaggtggcggtgccggagtctgtgctccgcaagcggaagcgcgaggaacagtgggccaccgagaagaaggagaaggccctagtcgagaagaagaagtccatcgagagccgcaagctcatcttcacccgcgcaaagcagtacgccgaggaatacgatgcccaggagaaggaactggtgcagcttaagcgtgaggcccgtttgaagggtggtttctatgtcagtcctgaagcaaagctgctctttgtggtccgcatccggggtattaacgccatgcaccctaagaccaggaagatcttgcagcttctgcgattgaggcagatcttcaatggtgtgttcctcaaagtcaacaaggcgactattaacatgctacgcagggttgagccatatgttgcatatgggtacccaaacttgaagagtgtcagggagttgatctacaagaggggctatggaaagctgaacaagcagaggatccctctgtccaacaaccaagtcatcgaggagggcttgggcaagcacaacatcatctgcattgaggatcttgttcacgagatcatgactgttggcccacacttcaaggaggccaacaacttcctgtggccattcaagttgaaggcgccgctgggaggcctgaagaagaagaggaaccactatgtggagggcggtgatgccggtaaccgcgagaactacatcaatgagctcatcaaaaggatgaattaggttcacgatcaagctcattgatagtaccctgtgctctaagtgacttcttgtgctatccttattttatattagaaagttggatcgtggatgaatattcatgcagttttgatgtttcgaactagacgtgtatggaagaaatctgatcttctttccggaggtttgggattaattatttaaagcgttttggaaatataataataaaaaaaagaaac

SEQ ID NO: 98791 - DNA, 1107 bp, Zea Mays
ggcccaaacaatccccatccgtcggatcacctccacaaaccctagccaccgaacccctcctacataaaccgctcttcccatttccctcgccctgcgccgcctgcgtccacctccgctcgccgctctccccgcgtatccctctcatacgcagctcgcccagatgtcgtccgtggcgtcgaaggtggcggtgccggagtctgtgctccgcaagcggaagcgcgaggaacagtgggccaccgagaagaaggagaaggccctagtcgagaagaagaagtccatcgagagccgcaagctcatcttcacccgcgcaaagcagtacgccgaggaatacgatgcccaggagaaggaactggtgcagcttaagcgtgaggcccgtttgaagggtggtttctatgtcagtcctgaagcaaagctgctctttgtggtccgcatccggggtattaacgccatgcaccctaagaccaggaagatcttgcagcttctgcgattgaggcagatcttcaatggtgtgttcctcaaagtcaacaaggcgactattaacatgctacgcagggttgagccatatgttgcatatgggtacccaaacttgaagagtgtcagggagttgatctacaagaggggctatggaaagctgaacaagcagaggatccctctgtccaacaaccaagtcatcgaggagggcttgggcaagcacaacatcatctgcattgaggatcttgttcacgagatcatgactgttggcccacacttcaaggaggccaacaacttcctgtggccattcaagttgaaggcgccgctgggaggcctgaagaagaagaggaaccactatgtggagggcggtgatgccggtaaccgcgagaactacatcaatgagctcatcaaaaggatgaattaggttcacgatcaagctcattgatagtaccctgtgctctaagtgacttcttgtgctatccttattttatattagaaagttggatcgtggatgaatattcatgcagttttgatgtttcgaactagacgtgtatggaagaaatctgatcttctttccggaggtttgggattaattatttaaagcgttttggaaatataataataaaaaaaagaaac

SEQ ID NO: 98792 - DNA, 1558 bp, Zea Mays
ggcccaaacaatccccatccgtcggatcacctccacaaaccctagccaccgaacccctcctacataaaccgctcttcccatttccctcgccctgcgccgcctgcgtccacctccgctcgccgctctccccgcgtatccctctcatacgcagctcgcccagatgtcgtccgtggcgtcgaaggtggcggtgccggagtctgtgctccgcaagcggaagcgcgaggaacagtgggccaccgagaagaaggagaaggccctagtcgagaagaagaagtccatcgagagccgcaagctcatcttcacccgcgcaaagcagtacgccgaggaatacgatgcccaggagaaggaactggtgcagcttaagcgtgaggcccgtttgaagggtggtttctatgtcagtcctgaagcaaagctgctctttgtggtccgcatccggggtattaacgccatgcaccctaagaccaggaagatcttgcagcttctgcgattgaggcagatcttcaatggtgtgttcctcaaagtcaacaaggcgactattaacatgctacgcagggttgagccatatgttgcatatgggtaagttttctagctgatttaattcttccgttgccgcttattttgatatatcctccattgaaaatacagagttgaaagcagatcatactgttgcacttgttgcttgagtgaatttttacaatagaatagtgtgttaaaatactaaatgtggacttagattgcaatcttaatcaaggctgtgagtttctatgttcagtacttcagttcttgttcaaaattgttaggttacattagcacttcccatcagtgattttggtgatagtatttgcttttactaaagtgaaaatgcacagtgatgcatgcatattcaaatagttcctgctaaacaatactacaatagataaaatttgaaaaaaacataaagcagacagtgcctggagtagttcctgcatcttagcttggtgactcatctgcttctgatgaccttactaaagtggcaaatcttgtttaggtacccaaacttgaagagtgtcagggagttgatctacaagaggggctatggaaagctgaacaagcagaggatccctctgtccaacaaccaagtcatcgaggagggcttgggcaagcacaacatcatctgcattgaggatcttgttcacgagatcatgactgttggcccacacttcaaggaggccaacaacttcctgtggccattcaagttgaaggcgccgctgggaggcctgaagaagaagaggaaccactatgtggagggcggtgatgccggtaaccgcgagaactacatcaatgagctcatcaaaaggatgaattaggttcacgatcaagctcattgatagtaccctgtgctctaagtgacttcttgtgctatccttattttatattagaaagttggatcgtggatgaatattcatgcagttttgatgtttcgaactagacgtgtatggaagaaatctgatcttctttccggaggtttgggattaattatttaaagcgttttggaaatataataataaaaaaaagaaac

SEQ ID NO: 98793 - DNA, 318 bp, Zea Mays
acccatactctgaaccaggagatcaactgtatctcaagttttcaccccccgtgctgtgtaatcaagagaagctatgtatgggtcttaacatgcacagctgcccttcttgcagtaagacttacaccttgcatgagctcctgaaaagaatagcaagcacgtcgcgttgctgtcccacctggtttgcctccttcgctctccctttcttttctcctcttggtgagggaggtcggcttgtgcggtggcggaatgggggaggtggagaaggtaaggggagacgggagagggagagcgccacagcagtggatgtggaggggagca

SEQ ID NO: 98794 - DNA, 1161 bp, Zea Mays
gacttggcagctttttttttttctgcctctgcgtgcggtctccctgtgtctgtgacccttccctctcgcgtgggctctcggcctctccctatcgcgtgcctatcgctctctctcggcgtgcgtcagccaggcaaaccgccggcgccctagctagccaggtctttgtcccttcgccaggccttcatcggggactagcacactgcacacgcacccactagatgtctgcgccgaacggtccagcggcttgtccgatggtgtaccctgtctaccttaccggggcattcccccagcaagcaggggatgaccaggctcaaggtccggggatatatgccatacaacagaaccagttagcggctgcgatgggaatggggtgctatgctccaaccacactcattccactcgcttacaatatcccaacggaaagcgtcggagcttctgctggtgaagagaatgtacaggatgctaggcagcaaaatggacctcaaagacaagttgttgtgaggaggtttcactttgcttttcagcttgacttggccctgatcatcaaactagccgctgttgtgtttctctttagccaggaaggctcaaaacaaaggctgtttcttctgatactgtttgcctcatttatttacttatatcaaaccggagctattacaccttttctaagacggcttcagcgggcaggaggtgcagctgctcatccaccacaggctcctgctcgggtcgagaaccgtgctcctctgcctgcccagaatgatggcaatgagcagcccaatggtagcttccatatactgctctctgtattgcctgtgctctgtgcatagttgttcattatattgcaataccaatttcactttttagtctggaaattgggttgcaccatcaagttcctaatatcaaagacacattggaaaatatttggtagcaactttggagcacaaaacaagaaaggagatgacgccttgcccctaacaaaccggcgtggccggtttccctgcctagaactaccatgctggatcaccaaccggccaggctgtcttccctgttttagcctggccaccccctttattggtcctataccagctcgagaaaactggctcctgctgactctgaaacaatctggttttcaaaatgattttggatctattttgatgtgaaaaa

SEQ ID NO: 98795 - DNA, 1307 bp, Zea Mays
gacttggcagctttttttttttctgcctctgcgtgcggtctccctgtgtctgtgacccttccctctcgcgtgggctctcggcctctccctatcgcgtgcctatcgctctctctcggcgtgcgtcagccaggcaaaccgccggcgccctagctagccaggtctttgtcccttcgccaggccttcatcggggactagcacactgcacacgcacccactagatgtctgcgccgaacggtccagcggcttgtccgatggtgtaccctgtctaccttaccggggcattcccccagcaagcaggggatgaccaggctcaaggtccggggatatatgccatacaacagaaccagttagcggctgcgatgggaatggggtgctatgctccaaccacactcattccactcgcttacaatatcccaacggaaagcgtcggagcttctgctggtgaagagaatgtacaggatgctaggcagcaaaatggacctcaaagacaagttgttgtgaggaggtttcactttgcttttcagcttgacttggccctgatcatcaaactagccgctgttgtgtttctctttagccaggaaggctcaaaacaaaggctgtttcttctgatactgtttgcctcatttatttacttatatcaaaccggagctattacaccttttctaagacggcttcagcgggcaggaggtgcagctgctcatccaccacaggctcctgctcgggtcgagaaccgtgctcctctgcctgcccagaatgatggcaatgagcagcccaatggccctgcaaaccctgaccaagctgcggagaaccacgaacaagatgctgcagctggtaacgagaatccgcaagaggcagaggtagaaggcaatcggcgcaactggcttggaggtgtcttgaaagaggtccagctggttgttgtagggtttgtcgcatcgcttcttcctggttttcagcacaatgactagccctcgtgtcgtcaccgtggaataagctaccagcagtgaaatagttatggtgacatactgacataggggaaataattatatgaagcagctgaaaggtttctattatgcatctttgctgttaatattgttttgtttcatgttcaaatactttttgaaccaatcctgtccttcttccagcaatacttgcagctcacatgtaaatgtaaagactagcctgacacccccatcaattgaactattgtttcgttgcagaaatatttgatgcttgcacctgaatacagtatcagtattcagaacctgttgtaaaatgtctgaaatgtgatgtgaaagtttttcagggct

SEQ ID NO: 98796 - DNA, 900 bp, Zea Mays
ttaaaatcccctcgatgagcgccgcagagctccaccacacgccccatcgacacaaactcgttgagagcgcctcaaaaccaccagaaaaattccccagatcgtccccagcacgaaaaagcgcagatggagcattccggcgccaagaagtcgaacaagatcaccgaggtcgtgcggatgcagcagatgctgaagaagtggcgcaagctctcggtcacccccaaggagccaagctcgcccacctccggcggcggcggaggcaatgccggcgagagcaagaccaggaagttcctgaagcgtacgctctccttcacggacgggccgccctcggggtcccctccgccgccgcccaagggccacctcgccgtgtgcgtgggccccgcgatgcagaggttcgtgatcccgatggagtacctgaagcaccgcgccttcgcggccctgctgcgggaggccgaggaggagttcgggttccagcaggagggcgtgctccgcatcccctgcgaggtccccgtcttcgagtccatcctcaaggccgtcgagaagaacaagaaggacgccgccttctgttactgcggcgtcgagtacgccgccgacgaggtcgggcgcggcacgcctaacaacccgctctgcagataggtggagctcaagaaccaaacggaaatgctttcttatatttccccccattgtaacgtgttgcggtgagggatgagtcgatagtatctccccccgcggattagaattactgctccgatttttatctctgctgaactgagctgatctggactgggtaatgtaacagccatggatgcaacgaatcatggaaaaattgatgtggaaacgaagggttttctgtgttctattgaaaggcaatgaggaggagctacctccaactgaaatattcga

SEQ ID NO: 98797 - DNA, 132 bp, Zea Mays
atgtcaaacatagtctcagtgcataataataaaacatatagtttcaacatacacgacctaaaagcaaacgccatcttgatgtttcagttcttctggcgaccacttgttgatgaaaatcccttgtgtatcacc

SEQ ID NO: 98798 - DNA, 798 bp, Zea Mays
cgtcgatgtcgaaaactccttccagaccaagcttcgtctgctgtcggcttgcaccagtcctcacggcccacgtcgagggagacgaagggataggaggcggaggcggaggttgcaaaaaatggccgggagcatgcaggcggtggacccagcgggccggataagcgcgttgctcgcattgcgccagctcctcgccatgctctagccgctggccctgctccgccctttcattggcgcgcgtggccggggcgtccgatgttgcggcctccgtgttggggctagcgggaaaaggggaaggcggcggcgtcagcggttctacgggtgccggccgtctcgcccatggtcgccacacgaaggaagatagccacgcgccggacgcaggaggccaggcgggtgtacgatctgatccccaggatgcagacctggacatgccatgcgcccatgccttcttggtggttggtttgttcttcagatgtagaaagctacccgaaatccattgaactttggcagtctttttcatggtttcctgctcctatttctatggcggcctcgtcttgtttgtcagtcaagcaacaaccatgtggcacagattaataattcaattcaaggaaatataagtactgttgtatgccattctccagtcaattctatagcacggagggtgcttggttcgtttatccgaaatttgtcaggctcagctcaggctccgctcgaagcactgatgacctacatgatgattggtgccacacgccatgccacaacctttgtgtttgtccttcctgcttccttatttgttacatt

SEQ ID NO: 98799 - DNA, 607 bp, Zea Mays
caacagaacccaatcaattagtaacttagtactaacagctacttttttattctttgtcaaatctaatttatctcagcctcatatatggatagatcatattatggatcactaaatcaagaatggctgcattgtcatgccatattctggtacgaagagagagttcgtagcaaccatcatgtcagatccattgtttagaacaaatgttgcaaaggtactaaagtatctttacccatctataaatctagaccggaatcactggctacacttgcaaaatttaatggtgattctagaaaatttattcaaaatataagacaatacaattgtatcttcgcttttacctcattgggagcacacactgatggtcgaggtcctccattgtttaagatttgtggctaccagttatactctgtttttccaatgtaactaccttcttcatttaaaaattgatatgtgacatctatctataaatgtatgctttgagcgcagaacctaaacttattttgtcgtgttgttttgagcataaaaaaataatataatttataaaattaaatagagctaacttaaatgtgtgacaaagtgcgcccaagggcgcgccccatctactagt

SEQ ID NO: 98800 - DNA, 3232 bp, Zea Mays
cccacgaccgctccactgcactcctcgtcctcgccgtcgccgccaccgccaccgccgatgacgcgcatcaccgcgccgccgccaccttcctcgccgccggggtccccgccacccatccgccactccccagcgccggcaacgccgccctctcgccgccgcggacgccactcgccgtccccgtctctcgcgctcaccccttcctccgcctccacctcctcgaggccgaagccgcggcccgctccgaagcgggcctactctccggcgcagtgggtgcctctgaactcccaccccgtgttctcccgacgcgacggcgacggcggcggcggggacgccgcgtgggacgccgcggcgtcgcggctgtacgcgtgggacccttcagcgtgcagcgtccaccgcattggcgtgcggactagggacccggacgcggagaatggtgaggtggatgtgaccgtggaatctgccgtgccttccgagctgttgacgccagagtccgatcttggttatatggtcactcacatatcacttaacactgatggttcatcactgctgcttgttggatcacataacttaaatatcatgtatgtacatgagaggatatctgaagatggggatacaatcatatgcaggactgcaccgattgcttctcagatcctacccagtgacagtgatggcataaaagttctccaggcatcttggcatccctttagcaataaccattttgcagttttgacatcagatgctgttttcaggttatttgatctttcatccgatttagaacagccagagcagggattttatttgcagccaattgtacctgggaaatgtcaaaatgcttcagcgatttgtccagtgggtttctcttatgggagcgatcatctatgggatagattttcggttttcatcttattcagtgatggttcaatttttgtcctctgcccagttgttccatttggaagtgactatagcaagaagcatattcaggaaatatatgaagatgttaatgcatttggattgaaatcttcaaatccaaatgttgtcactaattcacatttggccatagcttggttggaggcaacatttcctgacctgttacatcaatcaacagataccagttttctgatgtcaaaagctcatgcatatgcgccattagatgattctctaacattacaggggcctctttgtacagtttgtgaggaaagtaatgaatctgaaagcaagagcagcagttgtgaaggaaaagctgtaggttttatgtacagttctgctggcaaagattcagttcttgtgactgcctggggtagtgggctgcttcaggttgatgctcttgcagatgaaattcaaccgcggtggaacattggggttccttcgcgtcttaatgtcgattcacatggacaaataaataatgttgccatgatatgtgactccaattcgcaagatccattggcgttgagatcgcatcgaccatctagtacaggatcaaacgtgaagagcaacatagaagctgtttggatgggacactctcctcctttgctaaggctcgcaattgtggatttggcattaccaaaaactcctaatgataactctctgtcattgtttgctgatccccttgttccagagagattttattgtgcgcatggtggggggcttgacatggtcacactgcacttcctaccattttcataccctgaaatgtcttcgacaccaccctctgtgcatcctgtcctcactacagggaacagcgaaacaagctcaccttttctttctggatttgttaccatagctgatgcatatggtcatgtacagttagctggcatcacatgcttgggtgagtgctttgtggtggagatgaagggttggaaggaaccggcacctcttcagcttgacttagaaagcaaaatcgtcaaggatgtggagcctcctgcaactggaatgatcagcaaagaacttattgctggtccagacccacccatacttccatcatcttcaagcctgaaatcgttgaccccagactctattgaaggaaaatctacacttcaccactatattaaggtcttccatgagtactatgtggagtacggacacaaggtgttcattgaactcaaggagcatgcggactatttgaagacagaaatggaagataaacagaaacgcttggaagcagtgaagaaatcacttatatccgtagaagccaaagatggagacatcaacaagaggatagatcgggccttcaaggtgtatgaactgttggagaagcgaatagatagcttcaagatgcttcctgctgcaaacaagaaaccattaacccaggcagagcaggagttcaaatcacagcttgatcggttcgcagatgtggagctggatgctttgcgttcctccattgccgccctgagtgctaggatgaaacgttttgctcagcaatccacgggcagtgcggctagcacaggaatggtgccatggcaggcacaaagggctggacggagccatatctcagaatcccagatgtcacttctgaaatcttcgcttgagaagctctccctcctcaacgaagagaacagtctgaagctccggcttattgatcatgaactcaagaaccaggaacgataggttggcaggtccatgtgcgacttattgccatattggtattttgttgttcggacactaagtacaggatccataggagcctgtttgctgtcactttctgtggggggctcgcgaactgcatttgcatgtcagcgtgttgtaagttgtaactagcaatacagaaccaagtgcaaaccgctacaccttttcctcctgcagatcgggaccggtagggaaggtttaaggcgtgtttggtgtgtggcgtatggcgccacgccacgcctaagttgcggcggccgaattggccgccacaactgcggcacgaaaagtgcggcggatggcggtggcgtaggcaaggtaccaaacacgcctttagtgctctgtgttttgtactgcatggtctgaagctgcagagtgcagactaccattggagggtaacgagtagtcccagcaagtggtacagccatacaggcgagatggcatgtgcctgggaaatgagaatagagtgatcgaacctgcttcgaattatttaggggactgactgctcttatttcattgttttgctttttcttttgcgtgtactagggtttagtggccacgcttttgtttattttaccatcaggaatacatctttaatcagttaccctatcgt

SEQ ID NO: 98801 - DNA, 141 bp, Zea Mays
atggcgctgtcgagctcggctggggaggagaactgtggcggcgttgaggcgctttgcttcggcggcatggatgcgctctgcttccgcgacaaggagcaccacacgaacaagagaaatcctattttcccacgcggctggtga

SEQ ID NO: 98802 - DNA, 1649 bp, Zea Mays
attagaaaacctgaaaacctatcctacaagatacactcttcatccaccccttacgctcagacgtcactagctagccatcatcacacaggcagcatggtgatgaaagaagcagccgaagagcacgatggccgccgcgacgtgaccgtcacggtggagccggcgctgccggtgcagcaacaccgcctgccgctgtccaacctggacctcctcctgccgccgctcgacgtcagcctcttcttctgctacctccacccggcgcccaccgcgatcgctctcaaggaggcactggccaagacgctggtggcgtactacccgttggccggggaggtggtggccaacggcgatggggagccggagctgctctgcagcggccgcggcgtggacttcacggagacggccgcggccggagtcgagctgcgggaggtccggctgggcgccgtggacgaaggcgttgagaagctggtccctgtcaagaagaccggcgtgacgatggcggtcaagctgagcaagttcacgtgcggcggcgccgtcgtcggctgcaccttcgaccaccgcgtctgcgacgcctactccttcaacatgttcctcgtcgcgtgggccgcagccgcccgtggcagctctgcgccaccaccgccggacccgtgcttccgccgctccctagtcgccccacgcgacacaccacatcggcgcgcgccgtccaccgacgccctcatcaaccgcctcttctctcctcgaagcgccgcgccaccgcctccacccgccgccgcaggctccgtcaaccggatctaccgcatagccgccgaggacatcgccgcgctgaaggcctcggcggggccggggcgcacgaagatggaggcgttcacggcgctcctgtggcagctctgcgcaagggcggcctccccgcgccagagccagtgctgcatgggcgtggtcgtggacgggcgcacccggatgttcccggacggcgccatgaaggcctacttcggaaacgtgctcaccatcccgtacggcgtcatcggctccgaagacctgcgctgcatggccctcgctgacgtggccgacgacgtgcaccggtgggtggcggaggccgccaccggcgaccatttccgcgggctcgtggactgggtggaggcgctgcggcctaagccggccgcggcgagggcgtacctgggagggaccggcggcaacgaggcgatggcgtgcatcgtgtcgtccggtatgagcttcccggtgggcaaggccgacttcgggactggcctccccgcgttcgcgtcgtaccatttcccgtggcccgccggcgccgggtacgtgatgccgatgccgagcgcgcgcgggaacggcgattgggtggtgtacgtgcacgtggcgccggaggtggcgaaggtgatggaggagtccaccgtgttccaagccctggtgaacagctatgcgtttgaatgatgatggagatgggccggcatattcgtggatgcgcgcgcgttgccgtccacgcgtgtgtctagagctagtgttgatgtgcatacggcatggagttctcactactcagcagtgctaccaatttgcctcgttggttactatgtttgccagaaaataataatagtaactccatgcatatatgtcacgtgacatatgtgtaattaacaaaccaa

SEQ ID NO: 98803 - DNA, 193 bp, Zea Mays
gatggatctcaaggaaagcctctccaaagttaagcagcagcaggcgagatgccagccatctttggcgagcatagctacttccacctcaaagccaaagcacatggcccaaccagtgcatgttcccaatgttcttgcaagaccatcacaacatattcagttttcaaatgatacagaaaggctacaacatattaat

SEQ ID NO: 98804 - DNA, 198 bp, Zea Mays
gttgctccagtttctgaattatgggtgttcaatgaagtgccggaagagataaaactgactggtattgggctggatataggtgggttattaaacattaaacttgtacataaagaaggcaatgctattatcaggcgacacttggaaagcttgcctctggagacatttgactctgtgagtacaaattgctctcttttagag

SEQ ID NO: 98805 - DNA, 1672 bp, Zea Mays
gggggttagatggtgttggaaggcagttgagattaacgattttgtctctcgaacgaatccaccattttctatgcacatgttatgtattagtaatatataatgatagagagccgaccgtctgtcttttccacacactagattttagggttttcctgttaggctgtcaaaaaaccctttatgtgagaaaaaaatatttcatgagtaagcatgtcatgtcaactaaatcgagtggatattgtgaattgtgaactttgagtatgtgaacttgtgatctttatgaacttgttataatgtcaacttgttatattatgaacttgtgatctttgtaaactttttatattataaatttgtgatccttgtgaacttgttatattgtgaacttgttatatcatgaattgtgaacttgtggtatttgtgatgttttatcaattttgctttattgtgaagtttgatatgtttaccgatcgtattttagatttcgaccgttaccggtgtattttccgcaccgaactttcgtttccgatgtttccgaaataccgatatcgtttccgtttccggaattaccgttttcgattttgtttccgataaaaaaaaaatgaaaacggtaatggttttggtgtttaccgaccgttttcatccctactgcctcctcctcacctcccgcctcccctattaataccgcgcacccacctccctttcctccccgcactcaagccctgcccatcagcacaaccaccaccaccaccgcctggccgtaacgtcacacgctcgcctccttccatggcgcccaggaacgctctccccgccgccagcgccgtggccaacggcatggtgatggagccgaggttccgcggcgtccggaagcgcccgtggggcaggttcgcggcggagatccgggacccggccaggaaggcgcgcgtgtggctcggcaccttcgacaccgccgaggccgcggcgcgcgcctacgacgccgccgcgctccacttccgcgggcccaaggccaagaccaacttccccgtcgcgttcgccgcgcttccgccgccgccgccgcccaagaagccggccgccgtgaccgtgagccccagcagcagcagcaccgtggagtcctcctcctcctcctcccgggactcgcccgccacgccgcccaggcccgcgtctccgtcccagcaggccccgtcgctcgacctcagcctaggcggcacaccggccatggtggccgcccagccgttcctcttcctggacccgaggctcgcggtgaccgtggccgtgccggcgcccgtgccctaccggccgaccgcggtcgccgccggtgccaacaagcatgctgcggcatcctgccgtgaagaggagcagagcgacaccgggtcgtcgtcatccgtggtggacgcctccccagcggtcggcgtggggttcgacctcaacatgccgccgccggccgaggtggcgtaggtggaccgaccgccgcagcgcccggtgacacgagacgagacggctccgagaggtcgcgtagatgattagaaacaagctgtattagtacgaggttgggttcaatttgccgcgatgggttactgctagccaggtgtacatagacctttttgcatcggcagctaatacctatttgccgatgttacaaaaaaaaaagagcgaaacgttttgtagttcgttgtaatat

SEQ ID NO: 98806 - DNA, 1718 bp, Zea Mays
ataaatataggctgagtcagctgtaaaaggcatcaaacaacgaaatacaaaataccaatttacttagaccccgtctagctctcgtcttccttccgtcttcctagctctaatctctgatctcctttcttctaccttctgtggtgctaacatttggtatcagaggaggaatccatggatactgtgctgcaacgacttctggacgaactgacgcacatggaggcgcgcttgacatgtgtgttggctggccgttgtggcgagcagtctgcacgcgcgcgcactccctcctccgacgatggatccacaccgtcctacctcgcccccaccagcgaggccgtcgacaagctccgtcaggacctcaacccttgctgcgtctaccgagacagcatccagcaccaccgagtcgaagatccctctgcagaggaggacctgcaaccgcaagcggaggtggtggagtcgttcgagtcggagtccgctcctcctcccatcgtctacgactgctacgacgagccgaaccacgacgagattgccgaggtgctcgcgctactagagtacaacgaggggacttcgtcggccacagtcctcgtcgactataccaccaccagcatgtcgcctaccaagtgttcgacgatggatttctccgacgccgacagcgccaggacttgcgatgtcaccgacgtccccatcgtgcactccgcactcaaggcgttcgtcaaaatgctcaacggcgggagtgagcatccgcaggaggtgacgcaaacctccatcgcgcggtgcgccaggatctccgcctgtgacacccaccagccgaccacctccatgtcgtggctgcacacacgcgtccatcgctccgtgcagacgccgtccttgcggggcgtcatcggaatcgcctagacgagcggcggacctgacgcacacagcctgatggacagctcacggagctggatcttcaccgagctcggccaaccaacatactgcccagagactttcccggaggtgccatttgagagaccaactccacccataattttcttcgacgaggaacatatcttcgaggaagagtcgtcttcttccaccacggcgacaccaagaaatccgtccgatccgaagcaggcgggtggcgacctcgattccatcgctactgcggcgctgtcggcgtcggaggagatcccccagtccctgctcgtcatcgacctcgagcgcgccacctccaagtgcatcaggacccacgctgtcaacgatgtcccagctgtgcactccattatcaagggcctgcaactggagcggatcggtctggcggggagcgcgcccgacctggacaccctcaccaccgcccgccattgtggcagtgagctcagctgccagctcggcagcaacaagcgggatgtcagcctccgagttgggtgcgaccaaagctatgagtgggtcgacccggagaccctggacaggagcttcgtcgtgctagataatgcttgtgctacccatgaggtgttcgaggtattgcctctaagcttccctgctgcttgggttaatgttggcaagctcccaaccactttatgttggaaaattccatggccacctcccgttttgtgggtgaatttgcatgctggcggtcgttatataacttcattgttggaagaatgtcagctagtgttcaccatattcttcggtggtgtttgctcacttgccaagattcagtggccttatatggtgttggaata

SEQ ID NO: 98807 - DNA, 2594 bp, Zea Mays
atggaggcgcgcttgacatgtgtgttggctggccgttgtggcgagcagtctgcacgcgcgcgcactccctcctccgacgatggatccacaccgtcctacctcgcccccaccagcgaggccgtcgacaagctccgtcaggacctcaacccttgctgcgtctaccgagacagcatccagcaccaccgagtcgaagatccctctgcagaggaggacctgcaaccgcaagcggaggtggtggagtcgttcgagtcggagtccgctcctcctcccatcgtctacgactgctacgacgagccgaaccacgacgagattgccgaggtgctcgcgctactagagtacaacgaggggacttcgtcggccacagtcctcgtcgactataccaccaccagcatgtcgcctaccaagtgttcgacgatggatttctccgacgccgacagcgccaggacttgcgatgtcaccgacgtccccatcgtgcactccgcactcaaggcgttcgtcaaaatgctcaacggcgggagtgagcatccgcaggaggtgacgcaaacctccatcgcgcgcctgatggacagctcacggagctggatcttcaccgagctcggccaaccaacatactgcccagagactttcccggaggtgccatttgagagaccaactccacccataattttcttcgacgaggaacatatcttcgaggaagagtcgtcttcttccaccacggcgacaccaagaaatccgtccgatccgaagcaggcgggtggcgacctcgattccatcgctactgcggcgctgtcggcgtcggaggagatcccccagtccctgctcgtcatcgacctcgagcgcgccacctccaagtgcatcaggacccacgctgtcaacgatgtcccagctgtgcactccattatcaagggcctgcaactggagcggatcggtctggcggggagcgcgcccgacctggacaccctcaccaccgcccgccattgtggcagtgagctcagctgccagctcggcagcaacaagcgggatgtcagcctccgagttgggtgcgaccaaagctatgagtgggtcgacccggagaccctggacaggagcttcgtcgtgctagataatgcttgtgctacccatgaggtgttcgagggtcttgtggcagagacgcacctccacttcatcggcacctacaggggcgtcgtcagcaccgccttctgtactgagattgttgagtctgcagatgcctatatctttgcaggctccattttcaaggactacagctccgtcggttactcattcctcctcaagaaggccaaggccatcattgtccagcctgagcgtgtgggagtgggaaatgggttgtcattcagatgtttgatgatgaaggagtactggactgaaattgctaagaaggttaaaaagaacaccactacgtatgagaactacaagaggaactttgtacctgaagggcaggcgctggagagcgagccgaatgagccactgcgagtcaatgtgctcttcaaatacatccagaagatgatgacagttaatagtgtcgtgatggctgagaccgatgattcttggttcaactgccataagctcaagctgccagaaagctgtggatatcaattccaaatgcagtatggtttaattggatggtcaatgggtgcactgcttggctatgctcaggtttgctatgaccatgatattataatggatgctgccggttttggtgatgagctggtggtcatcagcttgggtgctgactgccaaattattgcatcctaccacaggtggcctttcggacagactggaactggtcatttctccccaattggtggctaccaggttagacaagatatggtgctcatcttggatgttgctcgtttcattccattacaatttttttgggaagccatgaatacaactaatgactcaactctgagagggtccatgcttatatcaagaaaggttgcagagtcttcattgttgtacacagtgagttgcagagatgaaaactggaaaatcatgccaaagttttgtgttgaagatttaccaagtcttctgaaggcagggattggtgcttgcgtgggcttggttacctctggtctgagtgttgtcagcagtggccaaggcaatttttcagtatttgtttgggatcctggtgatagcggcttggttacctctagtctgagtgccgtcagcagtgaccaaggcaaattttcagtctttgtttgggatcctggtgatcgtggcttggttacctatggtctgagagttgtcagtattgcaagagttactgctattatgtcaggcacatatgcaagaggtgctgctacaacttcctctccgaagatgcgccagacccagttcagatggagggccgaggagaggcatgatgcattcaacaatgatgctaatccacagataaagttgatcctacaccgtcagcggcttgggggcaagccgtatttcaaggagtggggaatgttagatatattaggtgtagtagatgagctatgggttatgtgggcttgaggagatataaatataggctgagtcagctgtaaaaggcatcaaacaacgaaatacaaaataccaatttactt

SEQ ID NO: 98808 - DNA, 371 bp, Zea Mays
ccagccgcaaaaccgcaggccgcatcccgcccgccgcccgccgcccacctgtggcaaccgccgcctacataaacgaccaatcgaccactcgccgaaccaagccacccacccaaaacccaatggcgtccaacctcctatccgcggtggcaatcgagaaggagacgccggagagcgagctgcccccgacgttcctccgcgaggacgggcgcggcgccgggtccgtgcgggcgcggttcgagtccatgatacggcgggtgcagggggaggtctgcgccgcgctcgaggaggcagatggcggtggggcgcgcttcgtcgaggacgtctggtcgcgccccggcggcggcggcggcatcagccgggtcctgcaggac

SEQ ID NO: 98809 - DNA, 743 bp, Zea Mays
cacatgggcactccaaaggctgaagtagtcgcgtgcgttttaggccaggaatccaacgtgcttcaccccaaaaatccatttgctccaacattgcattttaactaccgttactttgagacagatgcacccaaagatgcacctggtgcaccaagacagtggtggtttggcggtggtactgacttgactccctcatacatcattgaagaggacgtgaagcattttcattctgttcaaaagcaagcatgtgataaatttgatccaagttttcacccaagattcaaaaaatggtgtgatgattatttctatattaagcaccgtaacgagcggcgtgggcttggtggaatattttttgatgaccttaatgattacgatcaagaaatgcttctcaacttcgctacaagtgaaaccatttgctagaatgattggatggaattatttgtattcagaaaccggaagaagggactgaagaatggaaacttctggacgcgtgcataaatccgaaggattggatctgattagccgaagtttctttattcttgagatcttttgttagttttcccttgtgtagcgctaagatatcagaccacgtgtagtttctttatttcttttgtatatctgtaggatcgtgaacaaatctgatataattctgcagctgtttgtatctaatctgctgctcccccccttccccccccccccatgtgaatgagagaatcattgccttgtgtatctacaaaggcttcagg

SEQ ID NO: 98810 - DNA, 1854 bp, Zea Mays
aaggccaaactactccgcctcttgtttcgccgaaccccaaaccctagcttcgctcgttgcggcggcgagccggcgatggcgaagtctctgcgatccaaacgcgagaagcggcttcggacgttgcgccgggagatagcggagccgttctacgacaagaaggaggccgccaagctcgccgcgcaggccgccgccctagctgctgccccgctcccggtccgcgggcccccgccatcccaggatgccggcagctcccgcgcagctagctcggcctcggctatgggtaagccctctaaaactttcctgattcaccagccgtggactgcctcctgttatttcaggagggaatcgtaattcctctacgctttgtgtgctagttgttcattcacagctcactttgttatctgttaaaacactatggttaattggttatactagtaaggagaagcagatgcctactgggtatttgcagaaattatcaacaaggtgtggtggctcagcaggttttgtataccaagctgcattactggttttgtatatctgaactgagggtgggaactgtggttttgatcccgatgtgacaatgatttatgcttcttgatcaaagcatgcagtaacaaccagaacgctcactcttttttaaaaaagggaacacattagctccgaaacgagtgtgttgttagcttaatcctggaacaagaacttaagatacctctgcgaattgcatgccctcaagcctaggtctttgttgattggagaggctttggaattctgctaccagttgccaccttattgacctgattgtagagatctatggataaggtggcatgtatgaatttgcatttaagccctgattgtacctatttgaaaaaaaatggctactaccaaattgatatttgtttcagtctcgtttagaaatttggtgaccttagcacatgtgcgaaaggaactaatcagttctatggtatttcgcatgaacagtgacagttaccataatcagcactttttcacttgggtatgccattcaatttaaaaacacgcaaactgttatttgactttggctcccaattatgaatgcctgtcaatgtatcctgaggcacctaatcgaggaaacttgtagtacatctaccagttgtggatcctgttttctcttcctgcaacctcagttgcgccttattttgttatccctcaactgatgtgttctgtgttcacatgaatgcagatgtggagatgtctgatgcagggaacaacaggtctaagaccttcttgaggccacttggcagcattagcaagaagaaggtgcagcttcatttgaagatcaagaaagacaagagaaaagctaggaagaagggaaagttttcttttaagaagtagaggagtgtatgataaatcatgcagttttgttcccagtttgtaaaacaaacgcactgcagtcatgtcatgtggtgcacctacctaagtccattcgtgggtgacctactattaaatatgttgaaatgggtacgaaaaaaggatagtgctgacctatcagctgtttctgttctgcgggtataaatgtcaagtactcaaattgctgagatttggtttcattttcacattgtatcgtggtgaaccatgtttggaaacaatggccttgtttggcacagctgctgcttgttgaaaaactggtaaaaagcagcttctgtttgttggctgtttttagtgtattttgagaagcagctgaactgataagctgctgcaaaagctagctgtttggtagaacttctgcttaaattatgaagaagctgaaaataagctgtgccaaacagggcctgatgtcgagcacttagggagcatatgaactgtcatttgttgtca

SEQ ID NO: 98811 - DNA, 1503 bp, Zea Mays
aaggccaaactactccgcctcttgtttcgccgaaccccaaaccctagcttcgctcgttgcggcggcgagccggcgatggcgaagtctctgcgatccaaacgcgagaagcggcttcggacgttgcgccgggagatagcggagccgttctacgacaagaaggaggccgccaagctcgccgcgcaggccgccgccctagctgctgccccgctcccggtccgcgggcccccgccatcccaggatgccggcagctcccgcgcagctagctcggcctcggctatggatgtggagatgtctgatgcagggaacaacaggtctaagaccttcttgaggccacttggcagcattagcaagaagaaggtgcagcttcatttgaagatcaagaaagacaagagaaaagctaggaagaagggaaagttttcttttaagaagtagaggagtgtatgataaatcatgcagttttgttcccagtttgtaaaacaaacgcactgcagtcatgtcatgtggtgcacctacctaagtccattcgtgggtgacctactattaaatatgttgaaatgggtacgaaaaaaggatagtgctgacctatcagctgtttctgttctgcgggtataaatgtcaagtactcaaattgctgagatttggtttcattttcacattgtatcgtggtgaaccatgtttggaaacaatggccttgtttggcacagctgctgcttgttgaaaaactggtaaaaagcagcttctgtttgttggctgtttttagtgtattttgagaagcagctgaactgataagctgctgcaaaagctagctgtttggtagaacttctgcttaaattatgaagaagctgaaaataagctgtgccaaacagggcctgatgtcgagcacttagggagcatatgaactgtcatttgttgtcactcataggcctgctaatggcaaaaaatccaatccactcccacccatacctaaatctaattactttgatatccatcccacacccaaccaaaaatactagaggaaagttaaactcaacccaaaccgacccgtaattgggtggaaacccatggaaaacccgtgggtttagcttattgtctcacatcaagccaactgcatacatattttaaaaatcacattttaaagcagtaaattaatttaaataaaaaagttttcaactacaaatttgtataactcatcatgatgtacattttatatttcgaacatttcttcatatgataaactaaaaataaatttgttcatacgacctatatctctctcatagtttatggaactacgagatatatgtatagaatttgtgcatattgttagaactatcatgtgagatgaataaatgatcaaacaaccaaaataaactttgtagatcttgaaaagttataaaagtttgtagttgacaactttttcatttgaagtcatattgtcaacgaaaattatgcctgaatttaaaaaatttaaaatttgaattttgaaaacaacctcgaaagaaaaaa

SEQ ID NO: 98812 - DNA, 1183 bp, Zea Mays
caaagcaacgacggcgatcgaagtcgatggaacgaacgccagccacaactgagatagacggtgagacatggcagcagctcggccattgccaaaagacactccaaggcctcacgccctcagcccctcaccctcacatatataggcgcctatataaaagcccgcccagcttcgctcaccactcgctcgcaccgctcaacgtctcaacctgagaagctagctagagctagctagctccgggcgcccgcagcatggccacgaacagccaccgcattattgcgcccggcctcctgctggtcgcggccacgacgctagtcgtcgtcgtcgtcgcgcagctcgcggcgccggctgccgcctgcccctactgcccgacgccgacgccgccccctccgccaccgcccccgcccccggtggtgaacccgccgccgtcgtccacgccgtgccctccgcctccctactcgccgtccacgccgacgggcaagtgccccgtggacacgctgaagctgctggcgtgcgtggacgcgctcaacggcctcgtgcacgccgtcgtcgggaccaacgccagcgacacctgctgcccgctgctgtccggcgtggccgacctcgacgccgcgctctgcctctgcaccaccatcaaggccaaggcgctcagcgtcagcctcgtgctccccgtcgccatctccgtgctcgtcaacgagtgcggcaagcacgtgccctccagcttccagtgcccgtaataactatattagggcgcgtacttactgatcgatcatcatctgcatatgtactgctactctactgtatatatatgatgtatcgtcactaaactatatacatcatatatgtacacgtacggtcaagttatatatacatccatatataacacaaacatatacataagcatgcatgtgcagcttcatatgcataagctctgccggcttgtgatatacatggagctgcgggggttgtgcatttttttgtaaccatgtaccagtattattgtatcataaaccagtgtgagagttgtggccttggtggggtcgatcgcttgtagtagtcattaaggaaacttatgaataaagtgcgtctgtaatatatatgatatgctgccggtggtgtaatgctgacaaaatctgtcaactattcctactatatgtgtaaaccaagcatgtcgactttttttttg

SEQ ID NO: 98813 - DNA, 865 bp, Zea Mays
cttttccgtcgtgtcgtggtaggctgtaggcaggcacctccgctcctgtcctcttctctcgtggtaggctgtaggcaggcacctccgctcctgtcctcttctctcgtcgcttcctccgtctctcggcgtcgaatctcctccaaccaccgcgcacactctactcgacgcccggtggaaggagttctccgggatttgagctgtttctgccctcacctccgctaggccggcgtcgagtggagatccaatcggaaatcgaactgacttcatcttctgttgcatccccgtcaggataagccatgccaggagtgatcacaaagttcgcggttacatccatggtgatgtggatggccccggttgcgatcgtttatgggttctactaccaggcgtttccaggtgtgagtcggatgtcatcctcggcgcagacactcgccagcgggttcctggctgtcatatcggttaatctggtgatcggcttgtacatattcatggcgatgaaggagactcgacaccaggagccacagccagacccgaccttcctggcaaacgccaaagcgagtatcaaccagccaacatcctctcaaccgagtgatgattccaaggggaagggaaaggttgagtaagccgtagcatgtcatgttgatttttggtcttgtgtatgttaagtgcgtgctgtttaggaggaatagttgtgcgtgcacgccataacacaacatcgcaatctttaaagttcatgattttgctgtaattcttgacagttatggtcatggagcaatgtgaagttgaaacttttgtccgtattcgatttggaaactctgttcattgttattttagttaggatgctcatcggaagcacgtctggttgtat

SEQ ID NO: 98814 - DNA, 899 bp, Zea Mays
cttttccgtcgtgtcgtggtaggctgtaggcaggcacctccgctcctgtcctcttctctcgtggtaggctgtaggcaggcacctccgctcctgtcctcttctctcgtcgcttcctccgtctctcggcgtcgaatctcctccaaccaccgcgcacactctactcgacgcccggtggaaggagttctccgggatttgagctgtttctgccctcacctccgctaggccggcgtcgagtggagatccaatcggaaatcgaactgacttcatcttctgttgcatccccgtcaggataagccatgccaggagtgatcacaaagttcgcggttacatccatggtgatgtggatggccccggttgcgatcgtttatgggttctactaccaggcgtttccaggttcggctgctgttcctgttttctttgctgcatggtgtgagtcggatgtcatcctcggcgcagacactcgccagcgggttcctggctgtcatatcggttaatctggtgatcggcttgtacatattcatggcgatgaaggagactcgacaccaggagccacagccagacccgaccttcctggcaaacgccaaagcgagtatcaaccagccaacatcctctcaaccgagtgatgattccaaggggaagggaaaggttgagtaagccgtagcatgtcatgttgatttttggtcttgtgtatgttaagtgcgtgctgtttaggaggaatagttgtgcgtgcacgccataacacaacatcgcaatctttaaagttcatgattttgctgtaattcttgacagttatggtcatggagcaatgtgaagttgaaacttttgtccgtattcgatttggaaactctgttcattgttattttagttaggatgctcatcggaagcacgtctggttgtat

SEQ ID NO: 98815 - DNA, 815 bp, Zea Mays
tggtccctagggttttcgccgccgcaccccacgacttccgtccgagtctgagctcatctccacgcgccgccgccgccgctcgacgcccaccgcgcagccatggcggaacagactgagaaggctttcctcaagcagcctaaggtgttcctcagctcaaagaaatctggcaagggtaagaagccaggcaagggtggcaatcgattttggaagagcattggccttggtttcaagactcccagggaagcaattgaagggacctacattgacaagaaatgtccattcactggaaccgtttctatcagaggcagaattattgctggaacatgccacagtgctaagatgaacagaaccatcattgttcgcaggaactatctccactttgttaagaaataccagaggtatgaaaagaggcactccaacattccagctcacatctccccatgcttccgtgtgaaggaaggcgaccatgtcatcattggccagtgcaggcccctatcaaaaactgtgaggttcaatgtcgtcaaagtcattccagctggatctgctgctgccggcaagaaggctttcaccgcagcctgagtttaagactatgttccatgagtagtttatatagtgatgtctttttttgttaaaaaaactgccttctaggcttgtgcctttcgactatggtttggagattgttcccatcttaatgaagtccaatcatctgaacatgttactgtttattgtaccttgtcgtgcaaagttttgcaagatctgtattgtttcctccctgcggtgaatgtggtctggcaagcatactttggtttctatca

SEQ ID NO: 98816 - DNA, 1423 bp, Zea Mays
caatatattctctattcttaaaaaaaactttagtcccaagctaacatgtacatatcctacccaaaaaagactagggatttatatgagaacagaagaagaagtacaagcccctcactatctcccatcagatagacattcagatgtagtatatctgcccgacattgagcaggctctcatgaggcacgttgaagatgacgctgttctccctgcacatcctcctcatgaaggcgtacatgtagtcgacggcgagcttcttcacgacgcccgagtcccgccgcgcgcgtacgatggtgttcccgaggatgtgcaccacgccggcgtccttgcaccggttcaggaactcgagctcgtcgcccaccgtgccgcagctgcccgcctgccccgccgacgccgacgccgacgccgagcactgcagcagccgtagccccctcggcgccggcgactgcgcggcgggcacgatcgagtcctgcgacgagaagctcagctcgccgttggagcacatggtcgagcacgtccgctcgccgccctgcaggaacgccgccgccgggccgccgcggccggagccggagccagagccaggcggcgcctgctccggcacgctgaactcgtccgagtcggagtagccctccatcatgctctccagccggacgaagaagaggacgcagtcgaacagcatcctctcgaagtcctcgtccctcttgtgcaggtccttgtacccgtacctcgccacgcaccggaacatgtggaagtccctgggcccgatcctccgcaccaggaaccgctcctccgtcggcaccgtgtacacggggaggtacttgacgcacacgaacaccaccaccgagtggatcgcgggcaggttggtgatgaagtgggagaagatgtgcggcacgccgctcgccagctccgtgtacacgaacccgatcccggggaccctcaccaggcccaggctcgggcccaggcccaggatccacgccatggacaccttgctgtgcatctcgaactcgtaccgcttcaccgtgcagaaatgccacacgtacatgatgaggaagaaggccgtcgccaccaccagcggcacccagccgccctggtcgatcttcagtatgcaggccacgaagtagggaacctccaccatcagcgacagcacgatgaaggtcaccacgaggatccagtggctcttccataccagcagcattattggcaccatgaggaatgtcgtgactagcatgactataaccaccgcagtacctgctcatgttgtttttttttcaatatgaaaaataaaaacagacggttaattgttgtctgataatgtacagtaatatcatgaaagtgttcagtaccatctagatgtttgttctcatttttgagagagaaaactatgtattttagttctcagaggaaaccttaccgtatgcgtttccta

SEQ ID NO: 98817 - DNA, 1663 bp, Zea Mays
aaggtaagaatgacgttttccgcagaaaacaatttggtccactcgtaggctttctttccttgaatgactcatgtgtgtcaaagacaaggccacgcaaactagcaaccggtgccacgcaaactgccaactgccatcttcttccccagccgctgtgcccgtccccctgccaccaaggtccaaggtctccggagcgcgacctggctgcaacgcaggcaatggagtcgccgttccgcgcggacctgctgagggggaaggcggcgctggtcacgggcgggggctccggcatcggcttcgagatcgccgcgcagctcgcgcgccacggcgcgcacgtcgcactcatgggccgccgccgcgaggtcctcgacaaggccgtcgccgcgctccggtccgagggcctcagggctgttggttttgacggggatgtccgaaagcaagaggatgctgccagagtgatcgcagcaacggttgagcattttggcaaactggacattcttgtcaatggtgctgccggcaacttccttgcctccccggaggatttgaagcccaagggattccggactgttcttgacattgacactgtgggtacatacacaatgtgttatgaagccctcaagtatctcaaaaagggtggaccagggagaggtccttcctctggtggcctcatcattaacataagcgcaacgctgcaatacactgccgcttggtaccaaattcatgtctctgctgccaaggctggcgttgacggtatcacaagatcattggctctggaatggggaacagattacgacattagagtaaatggaattgcacctggaccaattcaagacactccaggaatgaggaaacttgcacctgaagaaatgggcaataaggggaaacgagaaacgatgccattatttaagcttggggagaaatgggacatagcaatggccgcactctatctagcttctgatgcaggaaaatatgtaaatggggctataattattgttgacggaggtctttggttgagtcgccctcgccatattcccaaggaggaagtgaaggcactctctaaagttgtcgagaagaaggttagggcatctggtgttggggtgccatccagcaaattgtgatgacatctttgactacgtagctcttcgatgtgttctgtacaacatatgtctatattgttgtcccactaatgttgtcagtttggctatgccaccagtccatgcagatgacttgttagggcttgttcgcttatttttaatccatatggattggaggggattgatatggattgggggagattttcacttactagggattaaaaccctctcaatccatatggattggggtagaaccgaacatggccttaagcggctgagcagtccatttagttgaagaaattcaaatatttattactgttgtcgtccaatttgtattagaaatagttgagatcggtatgggatcccaaccaagaggtgcgtattgccaaatatttacatgctgtctattcaggttgtcgattaaaagggtcatattaaagatttaacagtttgcgtctccccactgttgcaactctatgcaaatggttcacctcaacatgtgtgcaaatcatgacaaattggatgccggcagttgcaactagcctgaagttcagagaaataagagaaactgcatg

SEQ ID NO: 98818 - DNA, 1810 bp, Zea Mays
aaggtaagaatgacgttttccgcagaaaacaatttggtccactcgtaggctttctttccttgaatgactcatgtgtgtcaaagacaaggccacgcaaactagcaaccggtgccacgcaaactgccaactgccatcttcttccccagccgctgtgcccgtccccctgccaccaaggtccaaggtctccggagcgcgacctggctgcaacgcaggcaatggagtcgccgttccgcgcggacctgctgagggggaaggcggcgctggtcacgggcgggggctccggcatcggcttcgagatcgccgcgcagctcgcgcgccacggcgcgcacgtcgcactcatgggccgccgccgcgaggtcctcgacaaggccgtcgccgcgctccggtccgagggcctcaggggctgcaggcaggcgaacactttgtagttgtaactttggagtttaatattgccaatgcctctacttatcaaatgaaattcacaatgctccataccatgcttcaggctagtaaacaattcagcaacccaagattgttgtgacttgcaggctgttggttttgacggggatgtccgaaagcaagaggatgctgccagagtgatcgcagcaacggttgagcattttggcaaactggacattcttgtcaatggtgctgccggcaacttccttgcctccccggaggatttgaagcccaagggattccggactgttcttgacattgacactgtgggtacatacacaatgtgttatgaagccctcaagtatctcaaaaagggtggaccagggagaggtccttcctctggtggcctcatcattaacataagcgcaacgctgcaatacactgccgcttggtaccaaattcatgtctctgctgccaaggctggcgttgacggtatcacaagatcattggctctggaatggggaacagattacgacattagagtaaatggaattgcacctggaccaattcaagacactccaggaatgaggaaacttgcacctgaagaaatgggcaataaggggaaacgagaaacgatgccattatttaagcttggggagaaatgggacatagcaatggccgcactctatctagcttctgatgcaggaaaatatgtaaatggggctataattattgttgacggaggtctttggttgagtcgccctcgccatattcccaaggaggaagtgaaggcactctctaaagttgtcgagaagaaggttagggcatctggtgttggggtgccatccagcaaattgtgatgacatctttgactacgtagctcttcgatgtgttctgtacaacatatgtctatattgttgtcccactaatgttgtcagtttggctatgccaccagtccatgcagatgacttgttagggcttgttcgcttatttttaatccatatggattggaggggattgatatggattgggggagattttcacttactagggattaaaaccctctcaatccatatggattggggtagaaccgaacatggccttaagcggctgagcagtccatttagttgaagaaattcaaatatttattactgttgtcgtccaatttgtattagaaatagttgagatcggtatgggatcccaaccaagaggtgcgtattgccaaatatttacatgctgtctattcaggttgtcgattaaaagggtcatattaaagatttaacagtttgcgtctccccactgttgcaactctatgcaaatggttcacctcaacatgtgtgcaaatcatgacaaattggatgccggcagttgcaactagcctgaagttcagagaaataagagaaactgcatg

SEQ ID NO: 98819 - DNA, 1922 bp, Zea Mays
acacgtcttcctccgcgaactgcgcccacctccgatctccccggcttgcctacaagtctccctgccccctcacttctcgcgctcttcctcttctccagcctccctctgccaacaactctcgcgagggcgccgtccgcctccgcctccgtctcggggagcgatgacgatcgcgcgacgcctgctccgatccaatgcctccgcccaggcaatcagcttactgaagcatgtaactggcactgcaagtttgcaaggccatgcacatagtccgttggatgcgtcagtcagacattttagttcagctccatctgcccagtctgacacaactgaagaaaatgggttcaagggccatggcatgttggcaccttttacagctggctggcagagcaatgatttgcatcctctaattattgagagatctgagggttcctatgtttatgacatcaatgggaataaatacctggattctcttgcagggttatggtgcacagctttaggtggtagcgagcctcgattagtcaaggcagcaactgagcaattaaacaatttgcccttctaccattccttttggaaccgcacaaccaaaccttcattggaccttgcacaggagatccttagcatgttcactgcaagggaaatgggaaaagttttcttcacaaacagtggttcagaagcaaatgactctcaggtcaaactagtatggtattataacaacgcattggggaggccagacaagaagaaatttattgcacgatcaaaagcataccatggatctacactgatatcagcgagcctaactggtcttcctgccctgcaccagaagtttgatctaccagcaccttttgttctgcacactgactgccctcactactggcgatatcatcttcctggtgagacggaagaagaatttgcgactagacttgccaccaatttagagaatcttattctcaaagaaggaccagaaacaatcgctgctttcattgctgaacctgtgatgggtgccggtggtgtcatccctcctccaaagacctattttgacaaggttcaagcagtggtcaagaagtatgacattcttttcatagcagatgaggtcatcactgcatttggaaggttgggaactatgtttggatgcgattattataacatcaagccagatctagtttccttggccaaggctctttcaaatgcctatgtacccatcggggcaactcttgttagcccagagatatcagaggtgattcactcccagagcaataagctcggctcatttgctcatgggtttacatactctggtcatccagttgcctgtgcagtggcaatagaagctttgaaactttaccgcgaaagggatattcctggtcatgtcaagcaaatcgctccaaagttccaggacggaattagggcgttggcagacagcccaatcatcggggaggggttggtgccatctttggagaggagtgccagaagcgcggcatgctggtcagggttgctggcgacgccatcatgatgtcgcccacgctgatcatgacgcccggcgaggtcgacgagctggtgagcatctacggggaagccctcagggccacggaggagagggtgtcagacctgaagatgaaatccgagaagaactaaccaaaagggcgaggacgacgacgataacgcctggcggcaacggtagcagctgatgtacaggtgaataaaatggtcgtgactgcgagatggcaataatgcgcgggaatggtcgacggtcgtctctgatcttggagtgcaaggtcaagctgctcggtcgctaaacaacggtggctgaacttttaaacgggacatagatgtttttttccctaagcaatggcagtatctcaaatgtttgctgccctgtagtttctgaacataaagggttagcagacgttataaaatttaaattttatcgt

SEQ ID NO: 98820 - DNA, 2072 bp, Zea Mays
acacgtcttcctccgcgaactgcgcccacctccgatctccccggcttgcctacaagtctccctgccccctcacttctcgcgctcttcctcttctccagcctccctctgccaacaactctcgcgagggcgccgtccgcctccgcctccgtctcggggagcgatgacgatcgcgcgacgcctgctccgatccaatgcctccgcccaggcaatcagcttactgaagcatgtaactggcactgcaagtttgcaaggccatgcacatagtccgttggatgcgtcagtcagacattttagttcagctccatctgcccagtctgacacaactgaagaaaatgggttcaagggccatggcatgttggcaccttttacagctggctggcagagcaatgatttgcatcctctaattattgagagatctgagggttcctatgtttatgacatcaatgggaataaatacctggattctcttgcagggttatggtgcacagctttaggtggtagcgagcctcgattagtcaaggcagcaactgagcaattaaacaatttgcccttctaccattccttttggaaccgcacaaccaaaccttcattggaccttgcacaggagatccttagcatgttcactgcaagggaaatgggaaaagttttcttcacaaacagtggttcagaagcaaatgactctcaggtcaaactagtatggtattataacaacgcattggggaggccagacaagaagaaatttattgcacgatcaaaagcataccatggatctacactgatatcagcgagcctaactggtcttcctgccctgcaccagaagtttgatctaccagcaccttttgttctgcacactgactgccctcactactggcgatatcatcttcctggtgagacggaagaagaatttgcgactagacttgccaccaatttagagaatcttattctcaaagaaggaccagaaacaatcgctgctttcattgctgaacctgtgatgggtgccggtggtgtcatccctcctccaaagacctattttgacaaggttcaagcagtggtcaagaagtatgacattcttttcatagcagatgaggtcatcactgcatttggaaggttgggaactatgtttggatgcgattattataacatcaagccagatctagtttccttggccaaggctctttcaaatgcctatgtacccatcggggcaactcttgttagcccagagatatcagaggtgattcactcccagagcaataagctcggctcatttgctcatgggtttacatactctggtcatccagttgcctgtgcagtggcaatagaagctttgaaactttaccgcgaaagggatattcctggtcatgtcaagcaaatcgctccaaagttccaggacggaattagggcgttggcagacagcccaatcatcggggagatacgtggcttagggatgattatgggaaccgaattcaccaacaacaaatcaccggctgatctattccctgccgaatggggggttggtgccatctttggagaggagtgccagaagcgcggcatgctggtcagggttgctggcgacgccatcatgatgtcgcccacgctgatcatgacgcccggcgaggtcgacgagctggtgagcatctacggggaagccctcagggccacggaggagagggtgtcagacctgaagatgaaatccgagaagaactaaccaaaagggcgaggacgacgacgataacgcctggcggcaacggtagcagctgatgtacaggtgaataaaatggtcgtgactgcgagatggcaataatgcgcgggaatggtcgacggtcgtctctgatcttggagtgcaaggtcaagctgctcggtcgctaaacaacggtggctgaacttttaaacgggacatagatgtttttttccctaagcaatggcagtatctcaaatgtttgctgccctgtagtttctgaacataaagggttagcagacgttataaaatttaaattttatcgtaaaacagttgttattctcattttctagtgtatcttcctctcccccctcccccaaaaaaacaattgcatgtc

SEQ ID NO: 98821 - DNA, 1758 bp, Zea Mays
tttcttagtccatttgggacctttttcctcttaatataatgacgcgcagttctcctgcgtgttcgagaaaaatcaataatgtcaaaaatgaagggaaaaaaaatacaacttatgtgcagatgttgtcgactgataattcattctaggtcatcactgcatttggaaggttgggaactatgtttggatgcgattattataacatcaagccagatctagtttccttggccaaggtgaattttgagtcccaccggcacatatttaatgtatagtgattaatgctagtttattctactctgacaggctctttcaaatgcctatgtacccatcggggcaactcttgttagcccagagatatcagaggtgattcactcccagagcaataagctcggctcatttgctcatgggtttacatactctggtcatccagttgcctgtgcagtggcaatagaagctttgaaactttaccggtatgctgcacttcttgtagcatgacagtatccctgctcatatgtcagtatttatctcttgttcctgattaatgctctgcggaaattggcatcagcgaaagggatattcctggtcatgtcaagcaaatcgctccaaagttccaggacggaattagggcgttggcagacagcccaatcatcggggaggtacgcatctgatctgaatttctgaatcgcgaaacctgccactcggtccaaacacgactacagtgctcccgaacttcagatacgtggcttagggatgattatgggaaccgaattcaccaacaacaaatcaccggctgatctattccctgccgaatggggtaagtaaatctagcagctaggacacaatggcgtggtatgtgacagagagttagggcttactaatcctgtttcaagatgtcggtggcatcttgggaccaaagcgcagcctgaatcccctggaaactaatagatgtcggtggtctgcatgatgtgggatgatactctattttttttcaggggttggtgccatctttggagaggagtgccagaagcgcggcatgctggtcagggttgctggcgacgccatcatgatgtcgcccacgctgatcatgacgcccggcgaggtcgacgaggtgtgccatcatcagtgattcaggccctgttccaatctcgcgagataaactttagcagcttttttttagctacttttagccatttataatctaaacaggagagctaatggtagtaattgaagctaaactttagcacttcaattcatatagctaaagtttagcaggaagctaaagtttatcccgtgagattgaaacggagcctcactgtatcaccattgtcctcgagcctcggtagtaacccagccgcatcaatggcttttgccttttcagctggtgagcatctacggggaagccctcagggccacggaggagagggtgtcagacctgaagatgaaatccgagaagaactaaccaaaagggcgaggacgacgacgataacgcctggcggcaacggtagcagctgatgtacaggtgaataaaatggtcgtgactgcgagatggcaataatgcgcgggaatggtcgacggtcgtctctgatcttggagtgcaaggtcaagctgctcggtcgctaaacaacggtggctgaacttttaaacgggacatagatgtttttttccctaagcaatggcagtatctcaaatgtttgctgccctgtagtttctgaacataaagggttagcagacgttataaaatttaaattttatcgtaaaaca

SEQ ID NO: 98822 - DNA, 4532 bp, Zea Mays
caatttgcagggacggacagctaaagtagctgtggttgtgggatatggaagccgaagtaagcgctccagccgatcttaaggcgcctgataagacgacggtacacggtgatgacaaagaaaatataccgaatggtaatgcaaatttgcaagtgaaggaagccgacaatgatgaagacgatggaacaagatctgatgggtttgagctgatagatgtgaagcaaaacttcgattcagcaagagtggaggaagagatggccgctccaagaagtactacagtcgatacatctcctgttacagaagaaagtgaaacacaagaagacaaaacaacagcacatgaagaacaatcagttgcaacaaacacaagacatctagagtcctcaatgttgaaccaacaaacagaacaattggaaaagctgacaatgcgtattgaggagcttgaatctgaaaatgacaaactggtaaaggacttgacagaagcagaaaataagcagagcctgcactacagttgtctacaagaagctcaatgctctcttgcaatgaaagataaggagctggctgaagtaacagagtcgctgaaagatctgggttctgagcttggaacctcaaaaaagaggattcaagaaattgaagctgaattggattcatcagcagataagctttgtaaacttgaagagttgaaggatgaaagaagcttgcatgctgcacaggaggcgaagagggcctcagaacttgataagatgctagaactggcacaatcaaacatgaaagaaatggaaaaacatattggcagtcttcaagaagaagtgaagggttatcaagacaaggccgctgaccatcagcaaatagaagaatcactgagaaacacaatctcagaactcaaggtggtacaagaggcattggagctgtcaaagtcacaagtggaaaatttgaaacagaagcttgcctcacaggacactgatttcagtaaactaactgaagagttgaatctccattgttcatctgaagaatcccttaaagagaagtctcttaaactagagactgaacttactactgtacttgaagaactacaagcaaagggtgggcttgacaaattgaaggatgaaaataaaactctccaagggtcacttgttgatcttaactcaaaactttctgagaaagattcaatactgcatcaggctgaagatgagctttcaaaagcacagttggtcctcttagaagcattgtcacaaaaagaagagttggagctgaatctgaactctctcagtgagcagcatggcaaatccaaagcttttggagaaaatgcaaaccagaagattctcgatcttgaagcacaaatacaggcaatgcatgcagctgaacaggcactcaagtttgagctaaaagaagccgaggcaagtgtccaagctgctgagaagaaaggctcagaccttgagcaacaactcagtgagattgagaataaatttgttaaatcaagtgaagaaatagagttgctgaaagagcgtattcaacaagaagctgctgtatcagcagaaagaggaatgcagcttcaagaaactgtgaccagtgtagagggatacaaagaaaaaattattgagctacaatcctccctaggttcctcagtgtctaaaaatcagctacttgaacaagaagtcatggagctgactgataaatgttcagagcatcaagaacaagcgcattcagttcggcaaagaagtctggagctggaagatttgcttcacacatcaaagactcatgctgaaggtgtatactcacggacacaggagctggagcaggagctgaataacacatatgaaatgttcaagggggttgaagaagaactcgagcagtacagaagcaaggcttcacagctctctgatgatctggaagcttatcagacaaaagcagctagtcttgaagccgtggtggaagcagcaagcgagaaagaaaaggaatttatggagtcattgagccaaataactgaagaaaagaagaaaactgaatcaaggaatgcggaaattgaagctcaattgcaggaagctcttgaggcagtaggacagaaagaggctgagtcgagaaacttgaatgaaaagctggttgcacttgagtccgaaattgaaagttcgatgcatgtaaatgaagcgttgaaacaggaaatcaatgctaagctggtaatggtggatgagctgcaggagaagtgtagttttataagttctgagaaagaagaagttgcagagaagctgtctattcatgaggagaagttagaacatttgacagaagaacactcaagaggcttggagctcctttctgtagctgaatctcggaataaagaaactgagagtcaactgcgtgaagttcttgaaaagctagcacaaaaagaagctgaagttacagacttgacagagaagctggctttgctcgaagctgagaatgaaaagatgacttgtttgaacgaggcgttaaaagaagtggatgctaagctggtcatgtttgatgagctacaggaacggtttagttctactcttgctgagaaggaagaagctgcagagaagctagctgttcatgagaggacaatctcacaactgacagaggtacacacaagaaccttggagctccattctgtagctgaatcaaagaatgaagaaattggagctcagttccttgaggctcttgaaacaatatcacagaaagaaggtgaagttaaagaatcgtcttcacagaagataaagatattggaggaacaacttgcagagacacatagcaaggtcgagcatttccttacagagaaggaaagcttggttcaagaaactagtagtctgaataaggagtttgaggtacatcagaacaagttgaacgacttacaacttgcacttgctgctgcactagcagaaaaggaggcggcatttgaagagattcattcactgtgtaaaacactcgatggaatgatcgagcacaaagcagaactagaaatacaggtatcttctactatacaagagcacgaagaactgaagagcaagtaccaaaatacaatggaagagaagcagatgttgagtgataaatatgaaacagcaaagaaagagcttgaggatgcaatagccaagttggaggaggaaatgaatgtagacaagtcagaaaaagagtctcacatctcaaagctggagcgacagattacattatcagagataaaatacatggaggagataaagactatgcaagtggaaacaactgaaaagaatgaagcactaacagccaagatgcaggaacacacagacttacaacatgagaaacacgaattggaacaacagttgctggaagttaggaaggaactggatggtgcttaccataccatagtaaatcaggaagaacaagcttctttgagagagataaagtgggacacttttaggatttattcagaggatcgtctggaagctgagcagcagcgtgctgaggagctggaactacaagtagcagctcttaaacaacagctccaagaagctgaggaagaacaagtttctttaagggaggttcaatgggaaggggatcaaaatcattcactgaatgagctgaaatctcagcgtcagtatgccacggacttggagaaacaaatcgaagatcttactcagaagttaagatcagccgatgcacactacaaacagaaggccacagaagagagagataaacttgccgagatcaccacagagttcagcaagttgacacataaagtaagcaagagtgtcgaattggagaagaaggtgcaggaccttgagcagaagctgcagctagcttattccaagtctgacgaacaggcaacggatgtcttggagtcgagatcccgtgagtttagcctggactcgttatcaagtttggtcaaacagcaggacagaactcaggctgccgacaaggcctcgccgagcccgaccctgcaagaagtacaagaaccttctggcaccatggctttcaagttcatcctgggagtcgccctgctgtccgtactcgccggcgtgtttctcgggaagcggtactagcgctcagtctgtggaactctgttggcgcccatcatcagctcatggaaaacccccgctgttaatattgctcccagcgaaattcggttatcagtttgtagctggaaggggggcgtagccagcagaagtttgagaggattgttggccttgatggtgatggttcgacgactttctgggaggaagttggagaccttggaagcccttttgttctcttgttgttgattttcgtcttcattttcagtttttgggtaaagtggggcaaggaatttgatttttgttcattcctaccctttgcgtgcaaaaggccaagtgcacgcaactggttctgcggacagctagttttccgtgtacatttcttctctgtaaagaccaggagtccatggacgcaaaacatgaagcctctgcttgctgtatatgctcgtgtggagagtgcatgtttcgttacctgtgccttttgatgtacacctgaattgcttgaacgagaaatgtcatattattatcagatggtttgaa

SEQ ID NO: 98823 - DNA, 2658 bp, Zea Mays
actcccacaaaagcctaacccgtcgcgagatgagaggacaccggaaggccatgtgccggcatcttccccgccgcccgatccgggtcgtccgtttgtcgaggggacatggacgactatgcagcccgagctccagaccaacacacggcggccgacacatgacacgggcgcaacagtattgactgctgttcgtctcatccctgacgcagtgaccatgatcacctatgacctagccgagctccgtgcctccgtccctccatctcccttttgcattccgcccccagattcccgaatcctccggctcgccccctctccgagactccgactgcctcccctgaagctagctagcctcctagcccctggtctggtcctcccgctgtgcctgtgaggcgctgctctaccaaggaggccgctggctgctccgctgcgctgcagtgaggctgcaaaagctggcggcttcttctcactgggcgtcgccataaacagtggagattcccatccccattttcccaattatggatagccagcggcaaccgggggagcaccgctgaggccgctcgcccgccatcccgcccgccattgctcccgtcgagggtcacagattatcctacatattgtagctccgcaacctgttcagcaaaatgaggccttcagatgacagggcacagctttcaggctttgcacaatcagatgaatcgacacttgatgtggaggggcattgctgccatcagccgtcattcccttgttcgccgtcaatgcaaccgattgtttctgggtgcacacacacagagaacagcgcggcatacttcttatggccaacatcaaacctacagcactgtgcagccgaggggcgtgcaaactactttgccaacctttcaaagggacttctgccaaagattggccgtcggctgcccaagggccagcaagcaaacagcttgcttgacttgatgactataagggctttccatagcaaggtactgcgttgctttggccttggaacggcagtgggcttccgcatcaggaaaggggttctaaccgatatccctgcaattctttgcttcgttgctcgcaaagttcacaagaagtggcttgatccggcccattgccttcctgccattcttgcgggtccaggaggtatttggtgtgatgttgatgttgttgagttttcgtactacggtgctccagctcaaactccaaaagtgcaaatattcacagagctcgtggataagttgtgtggcagtgatgaatgtattggctccggctctcaggttgcaagtcaggacacttttggaactttgggcgccattgtaaaacggagaactggcaacaagctggtaggtttcgtcaccaaccgacatgttgctgttgacttggactacccaaaccagaagatgtatcacccattgccacccaaccttgggcctggtgtttatcttggagctgtcgaaagggcaacatcttttatcacggatgatgtttggtatggaatctatgctggaacaaacccagagacatttgtacgtgctgatggggcattcatcccatttgctcatgactttgacatctccacagtcacaactacagttaggggtgttggtgatattggggatgttaaggttatagatctgcagtgtccacttaatagattaatagggaggcgagtatgcaaaatcggcagaagttctggccacacgactggaactgtgatggcttatgcccttgagtacaacgacgagaaaggaataagctttttcactgacctccttgtcgtcggtgagaaccgccaaacatttgatctagaaggtgacagtggaagcctcattatcctgactggccaggacagcgagaagccgcgtcccatcgggataatatggggtggcacagcaaaccgtgggaggctaaagcttaggtgtgaccatggccctcaaaattggaccagtggagttgatcttggccgccttctggatcgtcttgaacttgatcttatcataaccagcgaatcactcaaagatgccgtgcagcagcaaaggcgcgcgttggcggctgcagctaattctgctgctggggagtcgtcgacagcagcagctcccgtcctagaagagaaagtggaggagatcttcgagcctctggggatcaagattgagcagctgcgtcggcacgacgtttcggcctctgaagcggaggaggcagctgggatcaatgtggaagagcgccagttcatctcaaactttgtgggcaggtcccctgtgcgtgatgaccagggtgctccaaggcaaattgcgaacctgaacaatccgtcagaggaagagctcgccatgttgctgcacctaggcgaccagtagcccaagcggcttcgcagacagaatccgacctcgacgggaaacggcgaagcgctcatttcagtgtctctacatcgaagagtcgcaagtagtccgaagaaggtcacctggagttcagcaaactgaacctgcatcagtagcttagaccagcagcttcctggcacaaacattataatgaactatgctgaaacttgattcagcacttacatgatttgggtggtattcccttcagttttgctgtgctcgtgaagactttaatatgtacaatgctgagtccctgtatcaaaacaatgcaggtagtgataaaatcgtattgatcacc

SEQ ID NO: 98824 - DNA, 2499 bp, Zea Mays
aaagcctaacccgtcgcgagatgagaggacaccggaaggccatgtgccggcatcttccccgccgcccgatccgggtcgtccgtttgtcgaggggacatggacgactatgcagcccgagctccagaccaacacacggcggccgacacatgacacgggcgcaacagtattgactgctgttcgtctcatccctgacgcagtgaccatgatcacctatgacctagccgagctccgtgcctccgtccctccatctcccttttgcattccgcccccagattcccgaatcctccggctcgccccctctccgagactccgactgcctcccctgaagctagctagcctcctagcccctggtctggtcctcccgctgtgcctgtgaggcgctgctctaccaaggaggccgctggctgctccgctgcgctgcagtgaggctgcaaaagctggcggcttcttctcactgggcgtcgccataaacagtggagattcccatccccattttcccaattatggatagccagcggcaaccgggggagcaccgctgaggccgctcgcccgccatcccgcccgccattgctcccgtcgagggtcacagattatcctacatattgtagctccgcaacctgttcagcaaaatgaggccttcagatgacagggcacagctttcaggctttgcacaatcagatgaatcgacacttgatgtggaggggcattgctgccatcagccgtcattcccttgttcgccgtcaatgcaaccgattgtttctgggtgcacacacacagagaacagcgcggcatacttcttatggccaacatcaaacctacagcactgtgcagccgaggggcgtgcaaactactttgccaacctttcaaagggacttctgccaaagattggccgtcggctgcccaagggccagcaagcaaacagcttgcttgacttgatgactataagggctttccatagcaagggtccaggaggtatttggtgtgatgttgatgttgttgagttttcgtactacggtgctccagctcaaactccaaaagtgcaaatattcacagagctcgtggataagttgtgtggcagtgatgaatgtattggctccggctctcaggttgcaagtcaggacacttttggaactttgggcgccattgtaaaacggagaactggcaacaagctggtaggtttcgtcaccaaccgacatgttgctgttgacttggactacccaaaccagaagatgtatcacccattgccacccaaccttgggcctggtgtttatcttggagctgtcgaaagggcaacatcttttatcacggatgatgtttggtatggaatctatgctggaacaaacccagagacatttgtacgtgctgatggggcattcatcccatttgctcatgactttgacatctccacagtcacaactacagttaggggtgttggtgatattggggatgttaaggttatagatctgcagtgtccacttaatagattaatagggaggcgagtatgcaaaatcggcagaagttctggccacacgactggaactgtgatggcttatgcccttgagtacaacgacgagaaaggaataagctttttcactgacctccttgtcgtcggtgagaaccgccaaacatttgatctagaaggtgacagtggaagcctcattatcctgactggccaggacagcgagaagccgcgtcccatcgggataatatggggtggcacagcaaaccgtgggaggctaaagcttaggtgtgaccatggccctcaaaattggaccagtggagttgatcttggccgccttctggatcgtcttgaacttgatcttatcataaccagcgaatcactcaaagatgccgtgcagcagcaaaggcgcgcgttggcggctgcagctaattctgctgctggggagtcgtcgacagcagcagctcccgtcctagaagagaaagtggaggagatcttcgagcctctggggatcaagattgagcagctgcgtcggcacgacgtttcggcctctgaagcggaggaggcagctgggatcaatgtggaagagcgccagttcatctcaaactttgtgggcaggtcccctgtgcgtgatgaccagggtgctccaaggcaaattgcgaacctgaacaatccgtcagaggaagagctcgccatgttgctgcacctaggcgaccagtagcccaagcggcttcgcagacagaatccgacctcgacgggaaacggcgaagcgctcatttcagtgtctctacatcgaagagtcgcaagtagtccgaagaaggtcacctggagttcagcaaactgaacctgcatcagtagcttagaccagcagcttcctggcacaaacattataatgaactatgctgaaacttgattcagcacttacatgatttgggtggtattcccttcagttttgctgtgctcgtgaagactttaatatgtacaatgctgagtccctgtatcaaaacaatgcaggtagtgataaaatcgtattgatcacc

SEQ ID NO: 98825 - DNA, 2046 bp, Zea Mays
cgaggggacatggacgactatgcagcccgagctccagaccaacacacggcggccgacacatgacacgggcgcaacagtattgactgctgttcgtctcatccctgacgcagtgaccatgatcacctatgacctagccgagctccgtgcctccgtccctccatctcccttttgcattccgcccccagattcccgaatcctccggctcgccccctctccgagactccgactgcctcccctgaagctagctagcctcctagcccctggtctggtcctcccgctgtgcctgtgaggcgctgctctaccaaggaggccgctggctgctccgctgcgctgcagtgaggctgcaaaagctggcggcttcttctcactgggcgtcgccataaacagtggagattcccatccccattttcccaattatggatagccagcggcaaccgggggagcaccgctgaggccgctcgcccgccatcccgcccgccattgctcccgtcgagggtccaggaggtatttggtgtgatgttgatgttgttgagttttcgtactacggtgctccagctcaaactccaaaagtgcaaatattcacagagctcgtggataagttgtgtggcagtgatgaatgtattggctccggctctcaggttgcaagtcaggacacttttggaactttgggcgccattgtaaaacggagaactggcaacaagctggtaggtttcgtcaccaaccgacatgttgctgttgacttggactacccaaaccagaagatgtatcacccattgccacccaaccttgggcctggtgtttatcttggagctgtcgaaagggcaacatcttttatcacggatgatgtttggtatggaatctatgctggaacaaacccagagacatttgtacgtgctgatggggcattcatcccatttgctcatgactttgacatctccacagtcacaactacagttaggggtgttggtgatattggggatgttaaggttatagatctgcagtgtccacttaatagattaatagggaggcgagtatgcaaaatcggcagaagttctggccacacgactggaactgtgatggcttatgcccttgagtacaacgacgagaaaggaataagctttttcactgacctccttgtcgtcggtgagaaccgccaaacatttgatctagaaggtgacagtggaagcctcattatcctgactggccaggacagcgagaagccgcgtcccatcgggataatatggggtggcacagcaaaccgtgggaggctaaagcttaggtgtgaccatggccctcaaaattggaccagtggagttgatcttggccgccttctggatcgtcttgaacttgatcttatcataaccagcgaatcactcaaagatgccgtgcagcagcaaaggcgcgcgttggcggctgcagctaattctgctgctggggagtcgtcgacagcagcagctcccgtcctagaagagaaagtggaggagatcttcgagcctctggggatcaagattgagcagctgcgtcggcacgacgtttcggcctctgaagcggaggaggcagctgggatcaatgtggaagagcgccagttcatctcaaactttgtgggcaggtcccctgtgcgtgatgaccagggtgctccaaggcaaattgcgaacctgaacaatccgtcagaggaagagctcgccatgttgctgcacctaggcgaccagtagcccaagcggcttcgcagacagaatccgacctcgacgggaaacggcgaagcgctcatttcagtgtctctacatcgaagagtcgcaagtagtccgaagaaggtcacctggagttcagcaaactgaacctgcatcagtagcttagaccagcagcttcctggcacaaacattataatgaactatgctgaaacttgattcagcacttacatgatttgggtggtattcccttcagttttgctgtgctcgtgaagactttaatatgtacaatgctgagtccctgtatcaaaacaatgcaggtagtgataaaatcgtattgatcaccttctcttttctacca

SEQ ID NO: 98826 - DNA, 3149 bp, Zea Mays
gacacatgacacgggcgcaacagtattgactgctgttcgtctcatccctgacgcagtgaccatgatcacctatgacctagccgagctccgtgcctccgtccctccatctcccttttgcattccgcccccagattcccgaatcctccggctcgccccctctccgagactccgactgcctcccctgaagctagctagcctcctagcccctggtctggtcctcccgctgtgcctgtgaggcgctgctctaccaaggaggccgctggctgctccgctgcgctgcagtgaggctgcaaaagctggcggcttcttctcactgggcgtcgccataaacagtggagattcccatccccattttcccaattatggatagccagcggcaaccgggggagcaccgctgaggccgctcgcccgccatcccgcccgccattgctcccgtcgagggtcacagattatcctacatattgtagctccgcaacctgttcagcaaaatgaggccttcagatgacagggcacagctttcaggctttgcacaatcagatgaatcgacacttgatgtggaggggcattgctgccatcagccgtcattcccttgttcgccgtcaatgcaaccgattgtttctgggtgcacacacacagagaacagcgcggcatacttcttatggccaacatcaaacctacagcactgtgcagccgaggggcgtgcaaactactttgccaacctttcaaagggacttctgccaaagattggccgtcggctgcccaagggccagcaagcaaacagcttgcttgacttgatgactataagggctttccatagcaaggtactgcgttgctttggccttggaacggcagtgggcttccgcatcaggaaaggggttctaaccgatatccctgcaattctttgcttcgttgctcgcaaagttcacaagaagtggcttgatccggcccattgccttcctgccattcttgcgggtccaggaggtatttggtgtgatgttgatgttgttgagttttcgtactacggtgctccagctcaaactccaaaagtgcaaatattcacagagctcgtggataagttgtgtggcagtgatgaatgtattggctccggctctcaggttgcaagtcaggacacttttggaactttgggcgccattgtaaaacggagaactggcaacaagctggtaggtttcgtcaccaaccgacatgttgctgttgacttggactacccaaaccagaagatgtatcacccattgccacccaaccttgggcctggtgtttatcttggagctgtcgaaagggcaacatcttttatcacggatgatgtttggtatggaatctatgctggaacaaacccaggtagaggagttataagttatgtggttaatataggaaattaagtattacctgcagctttagttgcttggataattttctgtatatttaatttctcaggtgacattattgcttgatcttttcatatcatgcaaggtttgacatttgtgaatactatattaaaataatcaaattaacactaacttgcctttcagttcaccacttgcaaataaagcaacatcattttttttgagaaaataaaatataagttaggactttctctaaacaaataaaaggctccctcaggtcatagatactgtcatttaggacaagatctggtgaaacatcaataacatatttatttggattagaaacatgttacttatatgtttagttttttataattttgtttgaaaatgcttgcaaaatctcatgatttgaagaatttttggaatatattctagaagaaattagtggtcaaaggtaaacattgaaaccgtggaaaggcaaatgtggcaaactatttttcaccagagggagtaaatccttagttttgatcactctaaccatgcagtacatatactatctcttcttctgctgatgattccaaatgatttacacaatgttctaattcccaaacatacatgccatgttctaattcccaaacatacgtgctatgttctaatgaatctgcagagacatttgtacgtgctgatggggcattcatcccatttgctcatgactttgacatctccacagtcacaactacagttaggggtgttggtgatattggggatgttaaggttatagatctgcagtgtccacttaatagattaatagggaggcgagtatgcaaaatcggcagaagttctggccacacgactggaactgtgatggcttatgcccttgagtacaacgacgagaaaggaataagctttttcactgacctccttgtcgtcggtgagaaccgccaaacatttgatctagaaggtgacagtggaagcctcattatcctgactggccaggacagcgagaagccgcgtcccatcgggataatatggggtggcacagcaaaccgtgggaggctaaagcttaggtgtgaccatggccctcaaaattggaccagtggagttgatcttggccgccttctggatcgtcttgaacttgatcttatcataaccagcgaatcactcaaagatgccgtgcagcagcaaaggcgcgcgttggcggctgcagctaattctgctgctggggagtcgtcgacagcagcagctcccgtcctagaagagaaagtggaggagatcttcgagcctctggggatcaagattgagcagctgcgtcggcacgacgtttcggcctctgaagcggaggaggcagctgggatcaatgtggaagagcgccagttcatctcaaactttgtgggcaggtcccctgtgcgtgatgaccagggtgctccaaggcaaattgcgaacctgaacaatccgtcagaggaagagctcgccatgttgctgcacctaggcgaccagtagcccaagcggcttcgcagacagaatccgacctcgacgggaaacggcgaagcgctcatttcagtgtctctacatcgaagagtcgcaagtagtccgaagaaggtcacctggagttcagcaaactgaacctgcatcagtagcttagaccagcagcttcctggcacaaacattataatgaactatgctgaaacttgattcagcacttacatgatttgggtggtattcccttcagttttgctgtgctcgtgaagactttaatatgtacaatgctgagtccctgtatcaaaacaa

SEQ ID NO: 98827 - DNA, 410 bp, Zea Mays
cgaccttacttgaacaggatctgttctataggatcgtaccgttgcatccttgattaataaggaggcaagcactttagcctggttgatgagtcatgacctgtgggccagagcgtgattaacggccaggagttcagctgtactgcttgctctggttgctgtagaggatcgttccttgatcaggcttgcctggttgggatggcctacaggttgtctgacaggctctctttttttttttctgtactgcatgtatttttcgacgttgctcgttctgcaattgaaggggagagcacaatgcagaccgacaacgcttctctcaattttaaaggagcagatctcttgcttgtttcgtcattagcagtgcgaaacattttaagtacacagtttgcttgtttaaagttgctagtgtcgag

SEQ ID NO: 98828 - DNA, 1324 bp, Zea Mays
caaagaacacatcatcacataacaacctacgaatccatgatgctggcgcaagcagagagaggttgcaaccacaactgcaagtcttcgagtacacgagtttgagttgtcccactatatacacactcagcagcagcagtcagctggtcagcagccagcagccagctcccacgcagagccagtctctccggcgagctccagcgccgtagccatcatcgccatggctagggaagaagagctcaagaggattgacctgaaggtgaacgtgagctgctgcgacggctgcaggaggaaggtgatgaaggcgatgagcctcaaaggcgtgctgcggacggagatccagccgtcgcacgaccgggtgaccgtcgttggcgacgtggacgtcaaggtcctcgtgaagaagctggccagggtcggcaagatcgccgagccgctgcctccggcgccggcggctttcgaacaatgcaagaagcgggacgacggcgacagggcggcgcaggcgcaggtggaggagaagcgcaagggcaagggcgacgccggtgacaaggcggcggcggcggcggcgccgagcgagcaggagggatgcaagaagtgcgccggcgaggcggcctcgcgcgccgagggcggtggcggtgtcgatggcgaccgcggcagcgggaagaaggcgccgtcgcccaaggacggcaccgccggctggacaggcgaggaaggcggcgacgccgacgagttcgacaccaagccgcccgtggcggtggccgccgatcaccgccacgcgcaggcgcaggtgcagcagcactaccaccgcgcggagccgccgacggtggtgccggtgcacgtgccggcgtactacgcgccgccggccgcggcggtgccgtactacggctactacggcatgccgccgccggtgcccgtggcgatggcgatgggggtgggggtggcccagcggcaccacccgcaggtccggccgcagccgtcccgcttcgacgaggacttcttcaacgacgacaacacggtcgggtgcagcgtcatgtgagccgtgaacggacggaccgacaccgccgccgccacgcctttcgcgcccgcccatgccatgtcgttttcccgggcagatcgcatcgacgacaatgtcatctgtcccgcccccccgcgcgcgcgtgcacagtgtgagcaatgcaacaaagaatcaaagaaagccatgatggagtcggtgctcgtcctgtcaacgtaccacagtaccatacgttaacttaagaaccatgtgtgtttgggactataatctaacttattttaaattaacatttagttcaaaatgatttaaattatataa

SEQ ID NO: 98829 - DNA, 424 bp, Zea Mays
ataacacacccaagcgtggaccatcgccacaagagcaaaaacatcagaacaaaaacaccgccacgccagagtaacccgatatgcttcctaccatgttcttgcagggtgcaagagatatacattacaatgccagtgcgttctccatcagttatcttgcccttgagggtcgcccttccgtttcgtggtgcctcggggccgagacgatttgttgcctcttgacaagtgcctatcctccagcttttgcttgtcatccaataactcggatggaagccggtggtggttttaggccatggagtgcgctttgcggggacgacgatttccaaaggtggctcaattacccacctgcaaaagaacgtattcggttgtggctaagaaagaaaacgaaagctaaatgggcaaaagaaataaacgagagagagagaga

SEQ ID NO: 98830 - DNA, 3120 bp, Zea Mays
atggagtacgagcgcggggaccgggccaagcggggccgtggaggtggcggcggcggcggcggcggcggaggacgcggaggtggcggcgagtacgggcggcagcacggaggcgcgtacggcggaggcggatggcacgggcacgacgaaggaggaggctacggcgggggccgtggaggcggtggctactatcaccaagggcctcgcggccgcggagggtggcgcggccccggcgcgggcggcagccaggcgtacgggtccggcggcggccgcgcgtgggcgccggggccgggtgaggggagaggccttggggttggccgcgagtacgcccccgtcaggcgggcagcgccggcgcctgcgcctgcgcctagggaggttgcgactgcgcccatggtcaaggaagcgccgagttcgtcgggatccgttggctacgatgcatacttttctgtttctgatgaatcgatgtctagcgatgtagacgagatgagcgctagctcctggtatctgaaccgagaacgcatcacatctagtgaattggccggagtagaaccactagcatccacactagctgcgacatcttctgttggcacacgagtgccaatgcagagacctgactgtggtggcgcattatctcaagcaaaggtcaaactcttggtgaatcactttattgtcaactaccaaaaggtgtcaactatttttcactatgacataaacatcaagcttgatgaagcttcctctaaggcttcaggcaaagaactctcgaaggcagaatttctttctgtcaaggatgagctcttcagggaaagcagtttacggcgtctttcctcatgtgttgcttatgatggtggaagaaatctcttcacttctgctgaactgccagcaggtttatttcgtgtgagagttcgatcaaaggcctacattgtatcagtagatttgaagaagcagctgccattaagtcaactctcagatttacctgtacctagagaggtcttgcagggtcttgatgttgttgtgcgtgaggcctccagatggcgcaaggttatccttggtagaggattttactcaccaagcagcagtatagacattgggcagggtgttgtagctatgaaaggaacccagcagacacttaaatacactcaacaagggttgaacctgtgtgttgattattcagttatgccattttacaaagctggaccggtgatggaccttgttcacaaaatagtggggtaccttgattatcgaacaactctgaacaagaggcaaatggaaaatctggttgatgagcttaaaggccgacgtgtaactgtgattcatcggaggactaatcagaagtacacagtgcaaggcttgacacccttacctgccagccagatgacctttgtggatgctgaatccggacaaacaaagtgtcttgtggagtattatgctcagaaacatggcattgtgattgagtatcagatgctgccatgcttggatttgagcaagagcaaggacaaaccgaatcatgtcccaattgagctctgcactcttcttgaaggacagaggtttccaaaagcaaacttggataagaattctggcaggatactaaaaggaaaggctctaattcctgcatccaatcggaggaaagagattctagacttggtgaatgcttcggatggaccttgcagaggagaaattgcacagcgatttgggatttccttggatttacgaatgacagaagtcacgggtaggatccttcccccaccaaacctcaaactcggggcatccaatggccagacctccaaattcagtatcgatcagaactgccagtggaaccttgtgaagaagagactcgtagagggccgggatcttcagtgttggggcattgtcgacttcagtgctgagccgtctgacccccagcaggagcccctcaatggaaggatgtttattgagaagattgtgaggaagtgctgtgagcttggtatccgtatgaactccaacccatgcttcgtacacaaatctaagatggcagtgctctccgatccgcatcgactacaggaggagctaaacaaggcaaaacaggctgcagtgagcaagaagcagaggttgcagctccttttctgcccgatgtccgagcagcatccagggtacaagacactgaagctgatttgcgatacacagcttgggatcatgacccagtgtttcctgggcgaccgcgcaaacaagccgaatgggcaggaccagtacatgaccaaccttgccctcaagataaacggcaagcttgggggcagcaacgtccagctgttcgactcgctcccacgggtcggtggggcacctttcatgttcatcggtgctgacgtcaaccacccgtcaccggggaacgtggagagcccatcgattgcagccgtggttgcgtctatcaactccggtgtcagcaagtacgtgacaagaatccgtgcccagccgcaccgctgtgaggtgatccagcagctcggcgagatctgcctggagctcatcggagtcttcgagaagcgaaaccgcgtgaagccgcagaagatcatctacttccgcgacggcgtgagcgacgggcagttcgacatggtcctgaacgaggagctggcggacctggagaaggcgatcaaggtgggcggctacgcgccgaccgtcaccgtgatcgtggccaagaagcggcaccacacgcgcctgttccccaaggaccccagccagccgcagacgaagaacgggaacgtgccgcccggcacggtggtggacacgggcgtggtggacccgtccgcgtacgacttctacctgtgcagccacgccgggatcctgggcacgagcaggccgacgcactactacagcctggtggacgagcacggcttccggtccgacgacctgcagaagctggtctacaacctctgcttcgtgttcgcgcggtgcaccaagcccgtgtcgctggcgacgcccgtctactacgccgacctcgcggcgtaccgtggcaggctctactacgaggcggccatgatgccgtcccaccagcgagggacggggtcggcgtcctcgggctcctccgctgggacttttggcgtcactaacttcccgaggctgcacaaggatgtggagaacaacatgttcttcatctga

SEQ ID NO: 98831 - DNA, 2449 bp, Zea Mays
ccccactcccgatgcgtccgccccaacgccgatagtcctcgcccctcccctccccgttgcgcccacccatgccccctccgcgcccgcgcctcccctcaaccaccgcaccgagatcgccgccgatctgagctcccctccccgttgcgcccacccatggtcgctgcttcgacttgctgttgctgctgctcctgcacgacgaccaatgaagggaacaacgtggtctgcgcgggcatggtgggcgcgtggaaggagaagtcgttgaaggcgccgccgaccgcagctcggctgtcgtcttgctgtcgtcttgctgagactgagacgcgatcaggtcggcggcctgcttccagtcgaacctctgcgccgggatggcgccggtggtgggcgacgcgaagaagttcgaggaagagtggagcgggacgggcgagtccagcagctcggcggggctgagcccgggcgggatggagaagtaggaggagggcgacatcggcggcggcgagatgggcaggctgggcggctgcacggacttgaacttgggcacgcctacgccgccgcccctggtggcgccgcggtggaacagccccctcggtgatggtggccaaccccaagatctatgtggccaaggccgtcgatgcctttgtggagttggcggaggcgagcaggttaatttttaggtaccagatcatctgatttctcagaagcaaaatgttgtttggagctcagtgacaccatcttgtaatgcctgtgattttacgggaaatggaggatcattctgtccatcccatgtctaagtctaaccatggctccttgtcaggaaatggttatgagatgaaacattcaggccataaagtttgcgattgggattcatcatcgaagtctgatcggtctcaccaagaagcatcagcagcaagtgaaagcagtccaaatgaacacacatcgactcaatcagacaatgatgaagatcatgggaaagataatcaggacacaatgaagccagtattgtccttggggaaggaaggctctgcctttttggccccaaaattacattacagcccatcttttgcttgtattccttatactgttgatgcttattatagtggggttggggtcttgacaggatatgctccacatgccattgtccatccccagcaaaatgatacaacgaacactccgggtatgttacctgtggaacctgcagaagaaccaatatatgttaatgcaaaacaataccatgcaatccttaggaggaggcaaacacgtgctaaattggaggcccaaaacaagatggtgaaaaatcggaaggctgcaaaggagggcgagcctttttgggatagcccttggggccgtggaagaccgggatggcatattgaatgcagcgcaatgagtgctcactatttaggacatgtattcgatattcatggtggggggaaagatttgatttttcctcatcatgagaatgagcttgcacaaagccaagctgcttatcctgagagtgaggtgaagtgctggatgcataatggctttgttaacaaggatgataaaaaaatggcaaaatcagataataacttttcacgattagagatatcactgctctttaccatccattggctttaagatttttcttgatgcgcactcattatagatcagatgtgaaccattctgatcaagcacttgagattgcatctgatcgtgtctattacatttatcagatcctgaatacttcctttgtcaaagctttcacttgtctgaaggaagacgtcggccttctgcttctccatcaccatcgttatcatgcaacctgctggaatgccacagcgggacaggagcatggggatgagcaggcgcaagatgatagcaagtggcgccggatcccgacgttcgacgactggaacctgcgggacgacatgcccgtcacccaatacttgcaagcagggacttcttcatcattgtgccgccgacagagaaggacgacgacgaggatctgttcaaggtgcccctgtgttccctgccaagccctacaactacaagaaggtgaaacaaaataggacgctgcattagtttctctcgccaattaattacactcagggggaaaaagttttctttcaccagctctgaagatagtatcagttaacattgtttcatatctccatttccatatacattatacccagtcggcactagcgagcgatgagaaagatactgaacaattctatgatccaagcatggaattataatcattgaaactctgttgctactgttacttggttcataggctgatatatacatccaagctcgcccgcaccgccacctccacagtttatcatggtgcttttgaccctgcttgacagaaccagcagtgatgtatatataggtcattttgcctaatttgcatgaatatgacaatgtttagttgtaaggttgtataaatggtcgattggggctgttggtttat

SEQ ID NO: 98832 - DNA, 1532 bp, Zea Mays
ttataaatagcttgcattaaattctgtgaaaattatataaaaataagagtgttgataaaaaactaagaacgttgataaaaggctatttatgatctctagataaaagatctaaggagtacaaaaccataatgcataggctccttcaaatccaaaaacatttttgttgccaaacaaatgagcctgcattaataccgtcattcctgtaatgtgcatttaggtccatccccagcaaaatgatacaacgaacactccgggtatgttacctgtggaacctgcagaagaaccaatatatgttaatgcaaaacaataccatgcaatccttaggaggaggcaaacacgtgctaaattggaggcccaaaacaagatggtgaaaaatcggaaggctgcaaaggagggcgagcctttttgggatagcccttggggccgtggaagaccgggatggcatattgaatgcagcgcaatgagtgctcactatttaggacatgtattcgatattcatggtggggggaaagatttgatttttcctcatcatgagaatgagcttgcacaaagccaagctgcttatcctgagagtgaggtgaagtgctggatgcataatggctttgttaacaaggatgataaaaaaatggcaaaatcagataataacttttcacgattagagatatcactgctctttaccatccattggctttaagatttttcttgatgcgcactcattatagatcagatgtgaaccattctgatcaagcacttgagattgcatctgatcgtgtctattacatttatcagatcctgaatacttcctttgtcaaagctttcacttgtctgaaggaagacgtcggccttctgcttctccatcaccatcgttatcatgcaacctgctggaatgccacagcgggacaggagcatggggatgagcaggcgcaagatgatagcaagtggcgccggatcccgacgttcgacgactggaacctgcgggacgacatgcccgtcacccaatacttgcaagcagggacttcttcatcattgtgccgccgacagagaaggacgacgacgaggatctgttcaaggtgcccctgtgttccctgccaagccctacaactacaagaaggtgaaacaaaataggacgctgcattagtttctctcgccaattaattacactcagggggaaaaagttttctttcaccagctctgaagatagtatcagttaacattgtttcatatctccatttccatatacattatacccagtcggcactagcgagcgatgagaaagatactgaacaattctatgatccaagcatggaattataatcattgaaactctgttgctactgttacttggttcataggctgatatatacatccaagctcgcccgcaccgccacctccacagtttatcatggtgcttttgaccctgcttgacagaaccagcagtgatgtatatataggtcattttgcctaatttgcatgaatatgacaatgtttagttgtaaggttgtataaatggtcgattggggctgttggtttat

SEQ ID NO: 98833 - DNA, 418 bp, Zea Mays
gcacaacacggatgctagactcttcatggagataagcgaggcctcttgcaatgcctaagcatatctcaaagcgtgttggccagtctaggttcagtttcccgtttcctgcaaatataaatgtttaagttttactgtttatataagaaacctgaactcctagagttactgttgtatcaaactgaaatgagcttgtaccaaacaatgctttatcaaggcttccattctctaggtactcataaactaacagtggtttatttccttcaagacagcaaccatacaacttcacaagattacggtgttgcactcgagaaatagtttctatttcggctgcaaattgctgttttccctgatgagatgtttcagataactgttttacagccaccacccttccatcagctaatttaccctgcaagcaggt

SEQ ID NO: 98834 - DNA, 1765 bp, Zea Mays
tcaccttttcactgctccagcgaagaaggcacacagccagccgccgccgccgattattcatcttcctcacagcgccggcgctacatcttccgctacctcggcacaggcgacggcgggggcgctcaggctcgggctcgcgctcggagcgacggcgtcagcggcttccccctccgcctcttgccagtcgcctcgcgcccttgcctccggtcctccgcacaccagccggtgaccctgtgtgcgtgcccccctctctctctcctcccgcctccggtggatcgtcaaacggagccaggcctcggcgtctgcgccgcgcgcggcctgagggcagccggggggggggggggggggttcagcagccgctgctccagcaaggcggtcgcggggctttgggagcgcttatgccccaaagcgaagatcatgtcgagagccttagcgcgtcacccggtacctcctttcctgaaacttcgttccacggtttgcgacgacggctactggatgggcagattggaccacaaggactggctcgctccaaacgaggtgctcaaagtatttgtgaacatcagggacactagcctgataaacagcgtattcaagaaggcatgcagccggagagactacaagcccagcgaggcgctctacagcttgatgatcgacaggctggcctgcgccaggaggttcagtgatgtggaggagttgctgtccaaggcaagaaccgaaaagttgaggttttcagacgagttcttctacaggctgatcaagatgtacggcaacgtggcagaacatcctcagaaagccatggacaccctctttgcaatgcctgggtataattgttggccttctacaaagacattcaattacgtccttcacatgcttgtgtgcaagcggcagtacgaggttgttcatgaggtctactcgagcgcgcccaggcttggggtgacgttggacacatgttctttcaatatccttgtcaagggtttgtgccagtacggtaaatttgatgaggctatctccttgctgcatgagatgccgaagcaagggtgtcagcctaacgcgacaacctactcgaccttcatgcatttcctctgtcagcgcagtcaggttgataaagcatttgagctgtttgagagaatgcggaagcaggatattgctgcagatacagttgtgtacaatattttgatctctggtctctgcagggacgaaagagtgaccgaggcattcgacctgttcaagtcaatgacttctgaagggtgctgtcctaattcagggacatatcaggtacttcttgatggtctaatcagtttaggaaaactttttgaagccaaaagccttgtttgcactatgagtacagagggtgtgaggccgagcttccaatcatacaagctactgattgatggcctctgtagtgatgactgcgtgggtgatgcacatcttgtcttgaagcaaatggtgggccaaggttttgttccccggatgggcacttggacaaaacttctcacatccatgttcaagttttagcttccgcatcggtgatttccttggcctaacaagacacatgaatgaaaaattcaaattttggcagactcttgactgaaggtcatcaagtttggttagaggagcaagtggaccaatggcggcttgagtttgtgcttgtagtcctgcataccattgctacctatacatgattatcgtttgttggaatagcttccacggacatcaacctgaattatataagtctgacaagaaaaaccgttcgattctgtaggtt

SEQ ID NO: 98835 - DNA, 812 bp, Zea Mays
acggcccctccccggcgacctggctggctccgcctcctccgttccgtctcatcgctccttcctcatcatcagttgttgccaccacccttccctccctccattcctctccgcgtcgccccacatcccatcttggcctggacacctgggctgcctcgctccgtttccgcgctcgcggacgcgccgagtcccggccgaaccaggcgcccgccctccctcccgccgctaccagcgtcgatctgcgaccgaagagcgattcagaggcagggtgagggggggagacgagttcttgtcggtttcattcttggccgccgacttcacatgccaacaaccccaaggagcagaagccaggctaggaccactaggccttggatcttgtcagggatggactttgctgattcgagacggaagcctaatttcacggggaagattgccgtggctgctgccctcacggtcatgtgcataatcgtgttgaaacagtcccctagtttcagcggcaccagcgtgttctctcgccatgaaactggggtgacccatgtgttagtaacaggcggtgctggttatattggctcacatgctactcttcgtctccttagtgacaagtacagggttaccattgtggataacctatccagagggaacatgggagctgtcagagttcttcaacggctatttccagaacccggaaggcttcagtttatttatgctgacttaggcgatgccaaagctgtatccttcctctgaattttaataacctagtgctccccgctccccttatattcatgtgttgatgacaattttgttttgcacttaac

SEQ ID NO: 98836 - DNA, 1952 bp, Zea Mays
acggcccctccccggcgacctggctggctccgcctcctccgttccgtctcatcgctccttcctcatcatcagttgttgccaccacccttccctccctccattcctctccgcgtcgccccacatcccatcttggcctggacacctgggctgcctcgctccgtttccgcgctcgcggacgcgccgagtcccggccgaaccaggcgcccgccctccctcccgccgctaccagcgtcgatctgcgaccgaagagcgattcagaggcagggtgagggggggagacgagttcttgtcggtttcattcttggccgccgacttcacatgccaacaaccccaaggagcagaagccaggctaggaccactaggccttggatcttgtcagggatggactttgctgattcgagacggaagcctaatttcacggggaagattgccgtggctgctgccctcacggtcatgtgcataatcgtgttgaaacagtcccctagtttcagcggcaccagcgtgttctctcgccatgaaactggggtgacccatgtgttagtaacaggcggtgctggttatattggctcacatgctactcttcgtctccttagtgacaagtacagggttaccattgtggataacctatccagagggaacatgggagctgtcagagttcttcaacggctatttccagaacccggaaggcttcagtttatttatgctgacttaggcgatgccaaagctgtgaagaaaatattttcggagaatgcatttgacgctgttatgcactttgctgctgttgcttatgttggtgagagcacaatggagccactcaggtactaccacaacataacatcaaacacattgacagttcttgaggcaatggcagcatataatgtaaatactctgatttactcgagtacgtgtgcaacctatggtgaacctgatacgatgcctattgtagaaacaactcctcagaatcctatcaatccatacggtaaggcaaagaagatggcagaggacatcatcctagattttacaaaatcaaagaagcaatcagacatggctgtaatgatcttaagatacttcaatgtgattggatcggacccagaggggcgactaggagaagctccaaggccagagctacgcgagcatggacggatatccggtgcttgctttgatgcggctttgggaatcattccagggctaaaggttcgtggaactgattactccactgcagatggaacttgtattagggactacatcgatgtcacagaccttgtagatgcccatgtcaaagctcttggtaaagctcagccaggcaaagttggaatctacaacgtcggaacaggccaaggtagatcggtgaccgagtttgtagaagcttgcaagaaggcaacgggagcttccatcaaggtcgaatatcttgcccgtagacctggagattacgccgaggtatacagcgacccgtcgaaaatcctcagggacctcaactggacagcccaatacacggatcttggccaaagccttgcccaggcgtggaaatggcagaaggcgcacccgaacggatatgcatcggcctgattcagagctcaaaaggttgagagactcatcactcagattcatccaaggggtccgtccatgtgcagtcaatatagccttcagacaattggttcttcaccatagaaaaaacgtagcaacagcaacagaagagtcgtgattcttttattgcagagctggaagaagacaagagtatcgcagggagaatacactacctgttccttgattagtttcatttatatgtataggtcctcttttcgttggtggcattttagtacaatttggtgtaataacacaaggaaatcgtgttgtagacagggtagatcgaatctcgtgtatcgaccttcgtcttcttcgtggtggtagaatgaaaggatatatataaataagttgatgtatgtttctgttcc

SEQ ID NO: 98837 - DNA, 351 bp, Zea Mays
cttatgtgctcaataagttgacgtgcgcaagctagtaggagtggctgcagtcacaaaatttggtgtggtcattagtctatgcatgtccatatcatagtttgatgccagatagtttaaagagcttacctcatctctcttcccaaaaagaacagacacattgtaggttgggtcggagaaaacactttcatctttcctatcaactagtatggttcccatgcagccgatttgtgtcacaatcacctgcagatttaataaaaatgaacatctttggcaagtgagagtcaaggccaaactgaataaaaaacaacactttcaacttaccagaaaggtatcatcatatgcatgggggta

SEQ ID NO: 98838 - DNA, 1136 bp, Zea Mays
gtgggacgaacggaccagcaggctagcaggtcatccagaaagctttcgtgctcctccatttctaggctatagctagcctagctggggttggacgacctttcaggcacacgcatgcaagtacctgcagtcggttcataagaggaggaggaggccatatggacgacgaaggagccaagtagaaaaggcaggcaccgcaaccaacggtaaagctggtgatcgagcaagttttgtcaagagcgagctcatggaggatggcagcagtgctccaagacgggctactccccccacccgcaggagcagatctgccgacttccacaacttttcagaaaggaggagaagggacaggatcaacgagaagctgagagcgttgcaggagcttcttccaaactgcaccaagaccgacaaagtttccatgctagatgaagcgatcgactacctaaaatccctccagctacagcttcagatgctggtcatggggaaggggggaggaatggcaccggtggttcctcctgagctgcagcagtacatgcactacatcacggccgaccccgcccaccagatgatgcctccgccgctgcggccctccgccgggcagctgcagcccgccgccggccggcagtttcagataacccaagcagcagcagcagcagccaacaacgacaacgacccccagcgacgacgacagtccaacgtcgagtcggacttcttgagccagatgcagaacctgcacccctccgatcagccgcctcatcatcacaacttcctcaggccgccgagattgcagctctttacgccggaacagaggggcggcggcggcggcctgcctaccacgagccacaacgccggctggatttccgggaggagttcctcgtataattttatggagtgacgtgtgtgctccctgatgctgccaaaattaatttgaaacaaccgttctcatcttgaactcagaagacggcgtcagcgcactctgggaccttcagctagcgtgtggtggtgtccatgcatgaatgaatgcagtagtagttatatatatattagcaagctagttgtgtcattaaataaaggaacgctgtgtgactgtgatgctgctgctgctgctcgttttgctatctgaatcgcacaccgttcaattc

SEQ ID NO: 98839 - DNA, 1197 bp, Zea Mays
gggacgaacggaccagcaggctagcaggtcatccagaaagctttcgtgctcctccatttctaggctatagctagcctagctggggttggacgacctttcaggcacacgcatgcaagtacctgcagtcggttcataagaggaggaggaggccatatggacgacgaaggagccaagtagaaaaggcaggcaccgcaaccaacggtaaagctggtgatcgagcaagttttgtcaagagcgagctcatggaggatggcagcagtgctccaagacgggctactccccccacccgcaggagcagatctgccgacttccacaacttttcagaaagggtagaggagaagggacaggatcaacgagaagctgagagcgttgcaggagcttcttccaaactgcaccaagaccgacaaagtttccatgctagatgaagcgatcgactacctaaaatccctccagctacagcttcagatgctggtcatggggaaggggggaggaatggcaccggtggttcctcctgagctgcagcagtacatgcactacatcacggccgaccccgcccaccagatgatgcctccgccgctgcggccctccgccgggcagctgcagcccgccgccggccggcagtttcagataacccaagcagcagcagcagcagccaacaacgacaacgacccccagcgacgacgacagtccaacgtcgagtcggacttcttgagccagatgcagaacctgcacccctccgatcagccgcctcatcatcacaacttcctcaggccgccgagattgcagctctttacgccggaacagaggggcggcggcggcggcctgcctaccacgagccacaacgccggctggatttccgggaggagttcctcgtataattttatggagtgacgtgtgtgctccctgatgctgccaaaattaatttgaaacaaccgttctcatcttgaactcagaagacggcgtcagcgcactctgggaccttcagctagcgtgtggtggtgtccatgcatgaatgaatgcagtagtagttatatatatattagcaagctagttgtgtcattaaataaaggaacgctgtgtgactgtgatgctgctgctgctgctcgttttgctatctgaatcgcacaccgttcaattcctccgatcctctgtgcgtgtcgatcgtacgtgttcgattcatgcaaaggctagttggcg

SEQ ID NO: 98840 - DNA, 691 bp, Zea Mays
acgcgtcccctccccctatccaggcctcgccacccatgccctccccgtctcactgacggtggcccccaccgcccggctccgctcgtcggcgagcactcttcccctcctcccccgccccaccgcagtcccggccaagagatccggccgactccggtcgctcggactcggaggccggcgagccgctcgtgctgggcgccgggatgcaggcggccggcaccagacggtttcccggatctcgccggcgccgcgtctcggcgaggtgaggagtggaggcgcctcaattctctcgtgctcaccttttctcgttcccgttacaaagtagtgtgctgtttttttttgttttctgttattattattattattttatccttttgctcggtacagagtgcgtgcaaaccgttgtggcgagctgccgaagaaactttagcattcgatatattttatttttcttcagttctgagacaacggataacagaaatgtgcctagtaaacggctctccgtgtttctccggcgaagcttgtctacagctgtatgcgcatcaagcgttgttcaaccaggaatcaatcgagttggcattgtgttggaattttttttttatcttgtggcagctgttatgttgcaaatgtaagcctagtcatggtaacgactcatcaagtgcttgctcttgtgtgatttattgggagattggta

SEQ ID NO: 98841 - DNA, 734 bp, Zea Mays
acgcgtcccctccccctatccaggcctcgccacccatgccctccccgtctcactgacggtggcccccaccgcccggctccgctcgtcggcgagcactcttcccctcctcccccgccccaccgcagtcccggccaagagatccggccgactccggtcgctcggactcggaggccggcgagccgctcgtgctgggcgccgggatgcaggcggccggcaccagacggtttcccggatctcgccggcgccgcgtctcggcgagttctgagacaacggataacagaaatgtgcctagtaaacggctctccgtgtttctccggcgaagcttgtctacagctgtatgcgcatcaagcgttgttcaaccaggaatcaatcgagttggcattgtgttggaattttttttttatcttgtggcagctgttatgttgcaaatgtaagcctagtcatggtaacgactcatcaagtgcttgctcttgtgtgatttattgggagattggtatgatatttttttgcctgattgaattaggaatctgccgtgcaacagtattcttgcagcctttcatactgtttgcgacaacgaaagaagagtagctttatctcaaaagaaaatttctatgggagagtatctttgagatttttagcgctgtactttgtaattttagttgatttcggatacggcaaagtatgagatcggcgacgaagatatttcttatgaatagttcaaatataaagttgaa

SEQ ID NO: 98842 - DNA, 2022 bp, Zea Mays
acgcgtcccctccccctatccaggcctcgccacccatgccctccccgtctcactgacggtggcccccaccgcccggctccgctcgtcggcgagcactcttcccctcctcccccgccccaccgcagtcccggccaagagatccggccgactccggtcgctcggactcggaggccggcgagccgctcgtgctgggcgccgggatgcaggcggccggcaccagacggtttcccggatctcgccggcgccgcgtctcggcgagagggggcctctggcctttctgacctcaggccctcgattttgtcatagatcagacaaataatggaaaagatacaagattgcaactcgaaaagcctggttgcccttccaggctctttggttctgcacctctttaggctgcttggccatcaggatcagagttcatggcagaagtacatactagcttactttctgttggtcagaaagggctgctacttctcaggggagtcgaagaaacactcagatgtgttctgtgatatctcagaattagatttctttccatatgctacagattcggatagcgaagaacttgaactgaaggagcagaaacctgttccgaaggctctgtcgggaggcgattcaagtggcaacagatcaaacgattgctacttcccaggccttcatgatgacctgtcacaagactgccttgcctgggcaagcagatcggaccacccttccatttcttgtctgaacaagagattcaatctgctaatgaacagcgggtatctgtacaagctgcgaaggaaatacggcatcgttgagcactgggtgtacctcgcttgtagcctgatgccctgggaagcatttgatccatcgcagagacggtggatgaggctcccgaggatgccatgcgacgagtgcttctcctgtgcagacaaggagtcactcgccgtcggaacacagcttcttgtcttcggccgtgaatacaccggcctcgctatttgggtgtacaacttactgactcgcagttggtccccgtgcgctccgatgaatctgccccgctgccttcttgcctcgggaagctcaggcgagatcgccattgtcgctggtgggtgtgataagaacggacaagtgctgagatctgttgagctgtacaactcagagactggccactgggagactgtcccaggcatgaacctgcccaggcggctcgcttcaggtttcttcatggacggcaagttttacgtcattgggggcgtatcgagccagagggactcgttgacctgtggagaggaatacagccttgagacaagaacctggagaagaatacttgacatgtaccctggtggaaccagcgcatcccaatcgcctccccttgttgccgttgtgaatagccagctctacgccgccgaccagtcgacgaacgtggtcaagaagtatgacaaggcaaataacgcctgggacgtagtgaagccactgcccgtcagagctgactcgtccaatggctggggcctagctttcaaggcctgtggcgataggttgctggtgatcggaggccatagaggacctcgtggcgaggtaatactgttgcattcctggtgccccgaaggcggggaagactgggaggttctgtcggtgaaggaacgcgcaggcgtcttcgtttacaactgtgcaataatggggtgctgagttaccttttgctcttcggtacatgccgccgctggtttagcaaggcaacgaccatttcttgctgccatttagctgcccttttatagtgacttgtaattcagaaatgacctcccctccccgaaattttgcggcgctctcaaatgttgaatgttttgtagagagcatatatagagcattcagttcagtttacctggaactactctcttttttttttctgttaaactcgttcacatttttccttgttcttgtccagtacgaattttacgcggtaggagtattctttattcatcattgttgcgaacttaaatgtctgcgccattgtccggagacatatcttaggcctcgattttcagtgca

SEQ ID NO: 98843 - DNA, 2664 bp, Zea Mays
acgcgtcccctccccctatccaggcctcgccacccatgccctccccgtctcactgacggtggcccccaccgcccggctccgctcgtcggcgagcactcttcccctcctcccccgccccaccgcagtcccggccaagagatccggccgactccggtcgctcggactcggaggccggcgagccgctcgtgctgggcgccgggatgcaggcggccggcaccagacggtttcccggatctcgccggcgccgcgtctcggcgagttctgagacaacggataacagaaatgtgcctagtaaacggctctccgtgtttctccggcgaagcttgtctacagctgtatgcgcatcaagcgttgttcaaccaggaatcaatcgagttggcattgtgttggaattttttttttatcttgtggcagctgttatgttgcaaatgtaagcctagtcatggtaacgactcatcaagtgcttgctcttgtgtgatttattgggagattggtatgatatttttttgcctgattgaattaggaatctgccgtgcaacagtattcttgcagcctttcatactgtttgcgacaacgaaagaagagtagctttatctcaaaagaaaatttctatgggagagtatctttgagatttttagcgctgtactttgtaattttagttgatttcggatacggcaaagtatgagatcggcgacgaagatatttcttatgaatagttcaaatataaagttgaatggctacctgtgacctagtatctgtatctgccatggaagtaaaaaatatcgtgtatctattacatactctgtttttagtccacgattcctgtgaatcttaccaaatatcatgtaacattacgcattttctgaaagtttgtctcttgatttttccagagggggcctctggcctttctgacctcaggccctcgattttgtcatagatcagacaaataatggaaaagatacaagattgcaactcgaaaagcctggttgcccttccaggctctttggttctgcacctctttaggctgcttggccatcaggatcagagttcatggcagaagtacatactagcttactttctgttggtcagaaagggctgctacttctcaggggagtcgaagaaacactcagatgtgttctgtgatatctcagaattagatttctttccatatgctacagattcggatagcgaagaacttgaactgaaggagcagaaacctgttccgaaggctctgtcgggaggcgattcaagtggcaacagatcaaacgattgctacttcccaggccttcatgatgacctgtcacaagactgccttgcctgggcaagcagatcggaccacccttccatttcttgtctgaacaagagattcaatctgctaatgaacagcgggtatctgtacaagctgcgaaggaaatacggcatcgttgagcactgggtgtacctcgcttgtagcctgatgccctgggaagcatttgatccatcgcagagacggtggatgaggctcccgaggatgccatgcgacgagtgcttctcctgtgcagacaaggagtcactcgccgtcggaacacagcttcttgtcttcggccgtgaatacaccggcctcgctatttgggtgtacaacttactgactcgcagttggtccccgtgcgctccgatgaatctgccccgctgccttcttgcctcgggaagctcaggcgagatcgccattgtcgctggtgggtgtgataagaacggacaagtgctgagatctgttgagctgtacaactcagagactggccactgggagactgtcccaggcatgaacctgcccaggcggctcgcttcaggtttcttcatggacggcaagttttacgtcattgggggcgtatcgagccagagggactcgttgacctgtggagaggaatacagccttgagacaagaacctggagaagaatacttgacatgtaccctggtggaaccagcgcatcccaatcgcctccccttgttgccgttgtgaatagccagctctacgccgccgaccagtcgacgaacgtggtcaagaagtatgacaaggcaaataacgcctgggacgtagtgaagccactgcccgtcagagctgactcgtccaatggctggggcctagctttcaaggcctgtggcgataggttgctggtgatcggaggccatagaggacctcgtggcgaggtaatactgttgcattcctggtgccccgaaggcggggaagactgggaggttctgtcggtgaaggaacgcgcaggcgtcttcgtttacaactgtgcaataatggggtgctgagttaccttttgctcttcggtacatgccgccgctggtttagcaaggcaacgaccatttcttgctgccatttagctgcccttttatagtgacttgtaattcagaaatgacctcccctccccgaaattttgcggcgctctcaaatgttgaatgttttgtagagagcatatatagagcattcagttcagtttacctggaactactctcttttttttttctgttaaactcgttcacatttttccttgttcttgtccagtacgaattttacgcggtaggagtattctttattcatcattgttgcgaacttaaatgtctgcgccattgtccggagacatatcttaggcctcgattttcagtgcaccgtacttccg

SEQ ID NO: 98844 - DNA, 339 bp, Zea Mays
atggacgccaccgcaagcccggccatcgtcatcgacaacgtggatgctatgctagactgccaaaagtttggcctgccagtcttgaccaaaccaggaacagaaaagaaaagtaggaagaagaaaatccaaggtgaaaatgatccagcattggagaaggagcaagctaaatgtcgtaagcgtgttaagagtttagttaagaggcggaagatgagtgaagcacagaggttagttcaacaggagttggaattggaggaatggggcacagaagcccaagtgaagaccaaggttattaaggcgttaaggcgagacatggcgaccgacccccttccaaacgcctag

SEQ ID NO: 98845 - DNA, 991 bp, Zea Mays
gcttcgttctcactccagagtctccaggctccaggcaggctacgctccaaacagtgagccctgccctgcccccacagagcagcaggcagcagatagatcctcgccagtttctctctctcgctcgctcacatgatcacatcgcatctccctaaacatgctcttactcttgggtatcaggagccacaggagcgtgtataaaaaggtcctggccctctaaactctgaacctccaagcacgcgcgcgccctgtgctccccctcagtcctcgctggtcctttctccatcacaaacgctagtcttttcctaaaggtacgtgctagtgttactcaaacaaagcaaccttttttttcttcttccgtttgagctctactacctttgtggttgtgggattgggaacagagaaaactccttccgtgtgtaaccagatccgctagcatcggtggaacctcggcctcgtttagttcgtaaagctgagtccaattctttgagtaacctgagtcctgagctaggttttcagtcgtttctaactaacagttctttggcgacgtacgtacgtacagctcggagaccgccggaagcgagcgatggcgtgcaagacgaagagcctgctgttggcgctcagcgtggcggcgctgctcgcggcgcggtcggagtcccacggcctgggggacttcacgagcgggagcgacgaggcgacgacgacgccggagatgcagaccttcttcaagccccaggccgccgcggcgctcccggaggccctcgacgcctccatgcccgccaagccggaggccacggcgctcccggccaccaccaccgccgccgccgcgacaacggccggcacggcgccgtcagccacgccgcgcaggtccgtgtccgtggccgccggcgtggcctgcggcgtggcggccgtggccgtggccggcatcgcggccgccgtggcgtacgtggtggtgcgcggcgcgcggcgcgggacggaggtgcagctcggttag

SEQ ID NO: 98846 - DNA, 1445 bp, Zea Mays
gcttcgttctcactccagagtctccaggctccaggcaggcagcagatagatcctcgccagtttctctctctcgctcgctcacatgatcacatcgcatctccctaaacatgctcttactcttgggtatcaggagccacaggagcgtgtataaaaaggtcctggccctctaaactctgaacctccaagcacgcgcgcgccctgtgctccccctcagtcctcgctggtcctttctccatcacaaacgctagtcttttcctaaagagaaaactccttccgtgtgtaaccagatccgctagcatcggtggaacctcggcctcgtttagttcgtaaagctgagtccaattctttgagtaacctgagtcctgagctaggttttcagtcgtttctaactaacagttctttggcgacgtacgtacgtacagctcggagaccgccggaagcgagcgatggcgtgcaagacgaagagcctgctgttggcgctcagcgtggcggcgctgctcgcggcgcggtcggagtcccacggcctgggggacttcacgagcgggagcgacgaggcgacgacgacgccggagatgcagaccttcttcaagccccaggccgccgcggcgctcccggaggccctcgacgcctccatgcccgccaagccggaggccacggcgctcccggccaccaccaccgccgccgccgcgacaacggccggcacggcgccgtcagccacgccgcgcaggtccgtgtccgtggccgccggcgtggcctgcggcgtggcggccgtggccgtggccggcatcgcggccgccgtggcgtacgtggtggtgcgcggcgcgcggcgcgggacggaggtgcagctcggttagctcctcccccgtgagccccgtccggccgggcccgcgtcataggccgtcgtcgtcggcgttaggatctgggttaagcgcgttgtttagctttgcgattttgtgttttagtcgatctgcagactgggcttgcttttgggtcggcggttgtattctttcgtacgtgtcgtgtcgctaccgagtacgtacggaccagcacagtggtgcatgtgtgacataaataaatgctggttgtagcgtcgtcgtggtgtctagagtctagaactttgctattgctgcatgaggatttttgctgttgagatgtgagtgagatgttgccgtctctggctggctactagctagctagatctcaggacgcctgaactctgtaccttggcgactggagcccaccatgaacgtccttgactgcatgagcctcccagagaatagagatgcagccaaacgacttgatgatgattaaaaagaggtaggaagaaaggcctgccagagtggccgcgttgtccagaacggaacagggacatcactgcctgccaacgcgatctcgccctggaccattcgtgagcagccggggaaaaaatgtttgtaccttttttg

SEQ ID NO: 98847 - DNA, 1284 bp, Zea Mays
gcttcgttctcactccagagtctccaggctccaggcaggcagcagatagatcctcgccagtttctctctctcgctcgctcacatgatcacatcgcatctccctaaacatgctcttactcttgggtatcaggagccacaggagcgtgtataaaaaggtcctggccctctaaactctgaacctccaagcacgcgcgcgccctgtgctccccctcagtcctcgctggtcctttctccatcacaaacgctagtcttttcctaaagctcggagaccgccggaagcgagcgatggcgtgcaagacgaagagcctgctgttggcgctcagcgtggcggcgctgctcgcggcgcggtcggagtcccacggcctgggggacttcacgagcgggagcgacgaggcgacgacgacgccggagatgcagaccttcttcaagccccaggccgccgcggcgctcccggaggccctcgacgcctccatgcccgccaagccggaggccacggcgctcccggccaccaccaccgccgccgccgcgacaacggccggcacggcgccgtcagccacgccgcgcaggtccgtgtccgtggccgccggcgtggcctgcggcgtggcggccgtggccgtggccggcatcgcggccgccgtggcgtacgtggtggtgcgcggcgcgcggcgcgggacggaggtgcagctcggttagctcctcccccgtgagccccgtccggccgggcccgcgtcataggccgtcgtcgtcggcgttaggatctgggttaagcgcgttgtttagctttgcgattttgtgttttagtcgatctgcagactgggcttgcttttgggtcggcggttgtattctttcgtacgtgtcgtgtcgctaccgagtacgtacggaccagcacagtggtgcatgtgtgacataaataaatgctggttgtagcgtcgtcgtggtgtctagagtctagaactttgctattgctgcatgaggatttttgctgttgagatgtgagtgagatgttgccgtctctggctggctactagctagctagatctcaggacgcctgaactctgtaccttggcgactggagcccaccatgaacgtccttgactgcatgagcctcccagagaatagagatgcagccaaacgacttgatgatgattaaaaagaggtaggaagaaaggcctgccagagtggccgcgttgtccagaacggaacagggacatcactgcctgccaacgcgatctcgccctggaccattcgtgagcagccggggaaaaaatgtttgtaccttttttg

SEQ ID NO: 98848 - DNA, 226 bp, Zea Mays
aaaagagcctgtcagacaacctgtaggccaccccagccaggcaagcctgagcaaggaacgatcctctacagcaaccagagcaagcagtagagctgaactcatagccgttaatcacgctctggcccacaggtcatgtctcatcaaccaggcttaagtgcttgcctccttattaatcaaggatgcaacggtacgatcctatagaacagatcctgttcaagtaaggtcg

SEQ ID NO: 98849 - DNA, 101 bp, Zea Mays
ctcctgcgtgcagccaacacatggtggctgcagacgattccccggttgtcagcagcaaccccgactcttgctactgcatcaaacccgtccgcctgtaaaaa

SEQ ID NO: 98850 - DNA, 1174 bp, Zea Mays
ctgtcttccacttccgtcgctcgcagtctctctcgcagaacagaaccagcaggcggcggcacacagcaagcagtcaagcaccagccgccaccgcccaccgccggtcgccagtcgccactgctccatggcgtgcccccaaatcccgtgacgggctgacggcgtgactcatcttcctcctctcctctctgtaacagtaaaaactgtgatccgctgtaatggctagtgaaggtgaagcttcacctccacgaaagcgtatgttgttggagttacctagtgaacatcaaagtcagaacttgacatcctcacctcatgcaaatacaactcaaccttttggtgtgtctgcatcatcatcaacacctgctgcaacatctcatgaacaaggtgcaaatccagaagaaggaattaatttggatgaggatgatccttcaaaattgaagcaagcaaagaagtccacttcaaatgtttggcagtattttgaaaagtatgaggttgtcgtagaggagaatggcaaatctgtgaagcaagtttgggccaaatgcaagtatccgggatgcaaaaacaagactagcaaagctagggctgaaagtagtagaggaacaactgcattttggtctcatttgaaaaattatcataagattgtgaaggggcaacaagagctcaaggcagaaaaggatcatggcacagtgcgggtggtcgtgtacttgatccatttcgtactcgccttgaccctaccatggtagaagcgcttgtctgcaccaaagattggataactggagcaagaaaaggttccaaggctaagagtgttgctattcctaatatggtttgtgaaatggaggaacttgaggctcttgctagaaatctttcacttgaggatgaagacctagatgatgatcatgatgatggaccagaggcatcgttgtaagcttgttgatgaagacctagatgatgataatgcaacatgaatgctctgaatgtttttattgtacttgttgcgtaatgctttgtgatcttgcgaacttgggacttgtggacttgtggctgtgtactttgtgatctgtgtgatgaacttgttatattgtgaacttgtgatctgtgtgatccacttattatattgtgaacttgtgatcaacttgttatattgtgaacttgtgatctgtgtgatccacttattata

SEQ ID NO: 98851 - DNA, 539 bp, Zea Mays
ctgtcttccacttccgtcgctcgcagtctctctcgcagaacagaaccagcaggcggcggcacacagcaagcagtcaagcaccagccgccaccgcccaccgccggtcgccagtcgccactgctccatggcgtgcccccaaatcccgtgacgggctgacggcgtgactcatcttcctcctctcctctctgtaacagatgaagacctagatgatgatcatgatgatggaccagaggcatcgttgtaagcttgttgatgaagacctagatgatgataatgcaacatgaatgctctgaatgtttttattgtacttgttgcgtaatgctttgtgatcttgcgaacttgggacttgtggacttgtggctgtgtactttgtgatctgtgtgatgaacttgttatattgtgaacttgtgatctgtgtgatccacttattatattgtgaacttgtgatcaacttgttatattgtgaacttgtgatctgtgtgatccacttattatattgtgaacttgtgatcaacttgttatattgtgaacttgtgata

SEQ ID NO: 98852 - DNA, 1263 bp, Zea Mays
cgcagtctctctcgcagaacagaaccagcaggcggcggcacacagcaagcagtcaagcaccagccgccaccgcccaccgccggtcgccagtcgccactgctccatggcgtgcccccaaatcccgtgacgggctgacggcgtgactcatcttcctcctctcctctctgtaacagtaaaaactgtgatccgctgtaatggctagtgaaggtgaagcttcacctccacgaaagcgtatgttgttggagttacctagtgaacatcaaagtcagaacttgacatcctcacctcatgcaaatacaactcaaccttttggtgtgtctgcatcatcatcaacacctgctgcaacatctcatgaacaaggtgcaaatccagaagaaggaattaatttggatgaggatgatccttcaaaattgaagcaagcaaagaagtccacttcaaatgtttggcagtattttgaaaagtatgaggttgtcgtagaggagaatggcaaatctgtgaagcaagtttgggccaaatgcaagtatccgggatgcaaaaacaagactagcaaagctagggctgaaagtagtagaggaacaactgcattttggtctcatttgaaaaattatcataagattgtgaaggggcaacaagagctcaaggcagaaaaggatcatggcacaggtatatgcattgtccagccatataaatatgatgaagaaaccagtttgagaaagttttatacagctattatcatgcatgagtatccatttaacattgctgagcatgaatactttgtggaattcattaaatcattaactttttaattgcatgaatgcttttagtgcgggtggtcgtgtacttgatccatttcgtactcgccttgaccctaccatggtagaagcgcttgtctgcaccaaagattggataactggagcaagaaaaggttccaaggctaagagtgttgctattcctaatatggatgaagacctagatgatgatcatgatgatggaccagaggcatcgttgtaagcttgttgatgaagacctagatgatgataatgcaacatgaatgctctgaatgtttttattgtacttgttgcgtaatgctttgtgatcttgcgaacttgggacttgtggacttgtggctgtgtactttgtgatctgtgtgatgaacttgttatattgtgaacttgtgatctgtgtgatccacttattatattgtgaacttgtgatcaacttgttatattgtgaacttgtgatctgtgtgatccacttattata

SEQ ID NO: 98853 - DNA, 3797 bp, Zea Mays
gaggggcgactgggcgagcgcttcgtctagacagcccagctgcgcatttggatgcaaattacgtgtggaggatggagtaaaatactgagcaagggagagggaagaggagacggtcttttcttttcttgagccgaggagggggatcaggtggagtgagcgagggggaggttttgccgccggcaatggagatgaatctccgggcggagagcccactctgctcccggggccgccccgccctcgtcgtgcgcccggccgctgcagccactggcctcgcgctgtctgtcgtaaggtgcagcagatttacgagaggcgggctcgttcgatgcatggtatcaagttcagattatcccaagaggaatccgaggagggcatcgacttctaagagcaagggcgttgcctctggagggtatgcttcgagacctactgctgaatccagtacgaagaagatagaacagagcaggaacaatgaaggtgatttcagcagagccaatgggtcactctatggcgaggcagcagagcaggcaagtactgctgaagaatcgtctcaggtttacatgacaggagacattttaagtggcgcagaaagggacggagctggtaccgaagaagaggctgaccaaaatcaatcttcagcgttgccttccgcgtccatggatgatgactcaatcgaccggcaacttgatgagtaccgtggtaaaataagtgctctagtaagttccaaacctgaaccttcgtcacttgcaagtgttgctggacaaaacgaatcagttggcggttttcacggccagcacgaaccaataactggttctgaggaacatggcagttcaattgttgatgcaccaacaaaaggcaggctatttgctgaggccgttgtgggtcataaggattttactgaatcagcagcaggaaaggcaagcagcgagaatgaggaagggcaagctgtctcgttagaagatgatgtcgggataagtacagacgcagatgaagagcttccggtatctgaagatgatccagaagtgctactgaggaggcttcaagagcttgctgatgagaattattcgactgggaacaactgttttgttttccctgaagtagtgaaggctgattcgatgattgatctttacttaaaccgcagcatgtcggccttagctagtgagtccgacgtttttgtaaaaggagcattcaatggttggagatggaaccgtttcactgaaacaatgcatagaagcgaattaagaggggattggtggtgctgcaagctctacattcccaagcaggcatacagactagactttgtattctttaacggtgacactgtctatgaaaataacaatcacaacgattttttcctggaaatagaaagtgacatagatgaacactcatttgaggacttcttggttgaagaaaagcgaaaggaactcgagaggcttgctgcagaagaagctgaaaggaaaagacaagctgaggagcggcacaggagagaggaagaaagggccgcgatggaagctgacagggcacaagcaaggtctgaggtcgagatgaagaaagagaaattgcgccagatgttgagttcggctagcagatatgctgagaacttatggtacatagaacctaacacctacagaggaggagacagagttagattgtactataatagaagctcgagatcactaatgcataacactgagatttggatgcatggaggttataacaactggattgatggactctcaatagctgaaagacttgtcaaatctcatgaaaaggaaggcgattggtggtatgtagaagttacattacctgaaagggcattggtgttggattgggtttttgctgatggaccacctgggaatgcatggaattatgataacaatggaaggcaggattttcatgccatcgttcctaataacatatcggatgatatcttttgggtggaagaagaacataggatctttacaaggcttcaacaagagagaagagaaagggagagtgccgaaagaataaaggctgagagatctgcaaaaatgaaggctgagatgaaggaaaagactatgagagcgtttctgctctcacaaaaacatattgtgtatactgagccactcgaagtacgtgcaggaaccactgtggacgttctttataatccttctaacacagtgctgaatggaaagtcagaggtttggttcagaggttcctttaaccgttggactcatccaagtggtcccttaccaccacagaagatggtaaaggctgagaatagttcacacttacgaacaacagtcagtgttcccctggatgcatatatgatggactttgttttctctgagtcggaagaaggtggaagatatgacaataggaatgggatggattatcatattcctgtgtctgattcggttgcaagggaacctccaatgcatattgtgcacattgcagtggaaatggctcctatcgcaaaggttggaggccttggtgatgttgttacaagcctttcacgagctgttcaggatttaggccataaagttgaggttattctgccgaagtatgattgtttaatcctaagcagtgtgaaggatttacactaccaacaaagttttgcttcgggtggcacagaggtaaaagtatggtttggaaaggttgaagatctgccagtttacttcttggaaccacaaaatggcatgttttgggttggatgtgtctatgggaagaatgatgagagtagatttggcttcttctgtcattctgctctggagtttctgctccaaaaaggatcttctcctgatatcatacattgtcatgactggtcaagtgctcccgttgcttggctatacaaggaacagtatgctcttaatgggatgggaaatggtcggattgtatttaccatccacaatcttgagtttggagcgcatcacattggcaaggcaatggcacattgtgacaaggctacaactgtctctgatacatattcaaaggaagtggctggacacggagctattgcacctcactactataaattccatggaattcgaaatggaattgatcctgacatttgggatccatatactgacagatttattccggttcattatacatcagagaatgttcttgagggcaagagtgctgcaaaaaaggcattgcagcagatgcttggattacagcaaactgatagccctgttgttggaatcatcactcgtctaacagtgcagaagggaatccaccttatcaaacatgcaatgcatcgagctcttgaacgcaatgggcaggtggttttactgggttctgcaccagatcatcgcatacaaggtgactttacaaatttagccagtaagctgcatggtgaataccatggccgggtgaagctatgtttaacctatgacgagccactgtcacatttgcttattgctatgcgctacggatccatcccgattgttcggaaaactggaggcctgtacgacaccgtctttgacgtcgacgatgataaggatcgggctcaagcacaaggcctcgagccaaatggattcagtttcgaaggagctgatagcagtggcgtagattatgctctcgacagagctataaccgcgttttatgatgcccgcgactggttcaactcccttagcaagagggtaatggagcaagattggtcatggaatagacctgcactagactacatggagttgtaccattctgctcgcaaaaactgatacatattatcacaagagaaaacaggctcagtttgcccagtttatgagcatctcagcctctcaggcctctgtgcaaattcaatttgcacactgggaagaaaa

SEQ ID NO: 98854 - DNA, 4008 bp, Zea Mays
gaggggcgactgggcgagcgcttcgtctagacagcccagctgcgcatttggatgcaaattacgtgtggaggatggagtaaaatactgagcaagggagagggaagaggagacggtcttttcttttcttgagccgaggagggggatcaggtggagtgagcgagggggaggttttgccgccggcaatggagatgaatctccgggcggagagcccactctgctcccggggccgccccgccctcgtcgtgcgcccggccgctgcagccactggcctcgcgctgtctgtcgtaaggtgcagcagatttacgagaggcgggctcgttcgatgcatggtatcaagttcagattatcccaagaggaatccgaggagggcatcgacttctaagagcaagggcgttgcctctggagggtatgcttcgagacctactgctgaatccagtacgaagaagatagaacagagcaggaacaatgaaggtgatttcagcagagccaatgggtcactctatggcgaggcagcagagcaggcaagtactgctgaagaatcgtctcaggtttacatgacaggagacattttaagtggcgcagaaagggacggagctggtaccgaagaagaggctgaccaaaatcaatcttcagcgttgccttccgcgtccatggatgatgactcaatcgaccggcaacttgatgagtaccgtggtaaaataagtgctctagtaagttccaaacctgaaccttcgtcacttgcaagtgttgctggacaaaacgaatcagttggcggttttcacggccagcacgaaccaataactggttctgaggaacatggcagttcaattgttgatgcaccaacaaaaggcaggctatttgctgaggccgttgtgggtcataaggattttactgaatcagcagcaggaaaggcaagcagcgagaatgaggaagggcaagctgtctcgttagaagatgatgtcgggataagtacagacgcagatgaagagcttccggtatctgaagatgatccagaagtgctactgaggaggcttcaagagcttgctgatgagaattattcgactgggaacaactgttttgttttccctgaagtagtgaaggctgattcgatgattgatctttacttaaaccgcagcatgtcggccttagctagtgagtccgacgtttttgtaaaaggagcattcaatggttggagatggaaccgtttcactgaaacaatgcatagaagcgaattaagaggggattggtggtgctgcaagctctacattcccaagcaggcatacagactagactttgtattctttaacggtgacactgtctatgaaaataacaatcacaacgattttttcctggaaatagaaagtgacatagatgaacactcatttgaggacttcttggttgaagaaaagcgaaaggaactcgagaggcttgctgcagaagaagctgaaaggaaaagacaagctgaggagcggcacaggagagaggaagaaagggccgcgatggaagctgacagggcacaagcaaggtctgaggtcgagatgaagaaagagaaattgcgccagatgttgagttcggctagcagatatgctgagaacttatggtacatagaacctaacacctacagaggaggagacagagttagattgtactataatagaagctcgagatcactaatgcataacactgagatttggatgcatggaggttataacaactggattgatggactctcaatagctgaaagacttgtcaaatctcatgaaaaggaaggcgattggtggtatgtagaagttacattacctgaaagggcattggtgttggattgggtttttgctgatggaccacctgggaatgcatggaattatgataacaatggaaggcaggattttcatgccatcgttcctaataacatatcggatgatatcttttgggtggaagaagaacataggatctttacaaggcttcaacaagagagaagagaaagggagagtgccgaaagaataaaggctgagagatctgcaaaaatgaaggctgagatgaaggaaaagactatgagagcgtttctgctctcacaaaaacatattgtgtatactgagccactcgaagtacgtgcaggaaccactgtggacgttctttataatccttctaacacagtgctgaatggaaagtcagaggtttggttcagaggttcctttaaccgttggactcatccaagtggtcccttaccaccacagaagatggtaaaggctgagaatagttcacacttacgaacaacagtcagtgttcccctggatgcatatatgatggactttgttttctctgagtcggaagaaggtggaagatatgacaataggaatgggatggattatcatattcctgtgtctgattcggttgcaagggaacctccaatgcatattgtgcacattgcagtggaaatggctcctatcgcaaaggttggaggccttggtgatgttgttacaagcctttcacgagctgttcaggatttaggccataaagttgaggttattctgccgaagtatgattgtttaatcctaagcagtgtgaaggatttacactaccaacaaagttttgcttcgggtggcacagaggtaaaagtatggtttggaaaggttgaagatctgccagtttacttcttggaaccacaaaatggcatgttttgggttggatgtgtctatgggaagaatgatgagagtagatttggcttcttctgtcattctgctctggagtttctgctccaaaaaggatcttctcctgatatcatacattgtcatgactggtcaagtgctcccgttgcttggctatacaaggaacagtatgctcttaatgggatgggaaatggtcggattgtatttaccatccacaatcttgagtttggagcgcatcacattggcaaggcaatggcacattgtgacaaggctacaactgtctctgatacatattcaaaggaagtggctggacacggagctattgcacctcactactataaattccatggaattcgaaatggaattgatcctgacatttgggatccatatactgacagatttattccggttcattatacatcagagaatgttcttgagggcaagagtgctgcaaaaaaggcattgcagcagatgcttggattacagcaaactgatagccctgttgttggaatcatcactcgtctaacagtgcagaagggaatccaccttatcaaacatgcaatgcatcgagctcttgaacgcaatgggcaggtggttttactgggttctgcaccagatcatcgcatacaaggtgactttacaaatttagccagtaagctgcatggtgaataccatggccgggtgaagctatgtttaacctatgacgagccactgtcacatttgatatatgctggcgcagacttcattcttgttccttccatcttcgaaccttgtggtttaacacagcttattgctatgcgctacggatccatcccgattgttcggaaaactggaggcctgtacgacaccgtctttgacgtcgacgatgataaggatcgggctcaagcacaaggcctcgagccaaatggattcagtttcgaaggagctgatagcagtggcgtagattatgctctcgacagagctataaccgcgttttatgatgcccgcgactggttcaactcccttagcaagagggtaatggagcaagattggtcatggaatagacctgcactagactacatggagttgtaccattctgctcgcaaaaactgatacatattatcacaagagaaaacaggctcagtttgcccagtttatgagcatctcagcctctcaggcctctgtgcaaattcaatttgcacactgggaagaaaaagagtactgattggccttgtggttgtgcatgaccgccgtccaaggtccaacgatgcaacacagagtgtatagttagagaatgtcacccgttgtacgttactgccgttacatgcatgtgtatacacatcaggtagtttgcaaaacaaca

SEQ ID NO: 98855 - DNA, 917 bp, Zea Mays
aaccaacccctatccgccccccgtcttttcccttttctctaccctctatctacccaccgttcccgtctctccgccgcttccttggaagacgaagaaaccctcctccaccaccaacccgatccagctacatccgttgaggcccgtgcgtttcttccctgttctcccatcaatcgacctagccttacgccgaccaggggcttcctctaatcgatctggtgtctgttctgtggtattggtctgggtgcactccagggccaggagcagctagccgtcttcgttcgatccgttcgcaccccccaacgcggcaggaaggagcgtgatggccaagacgagctcgttcaagctggagcaccccctcgagaagaggcaatctgaggctaaccgtatcagagagaagtaccctgacagaattccagtgattgttgagaaggctgagaggagtgatattcctgacatcgacaagaaaaagtacctcgtccctgcagatcttacagtcgggcaattcgtgtatgttgttaggaagagaatcaagctcagtgctgagaaggctatcttcatatttgtgaaaaacacccttccaccaacagctgctctgatgtcttcaatctatgaagagaacaaggacgaggatgggttcctctacatgacttacagtggtgagaacaccttcggactgctctagatggcccgcaatggggtcgccttgcccttgcccatgcctcctgtaaataagacctgccaagcaactgtgtatattctggtttcgtcgtcgcaagtggttgcgctctactgctaaagcctacctatcagttgtggagttgtcgtcgatgttatggacacacttaatcaagtttattaattgactggacctgaatcttgggtcagtaatgtgacatctcctatgtcgtttacggtta

SEQ ID NO: 98856 - DNA, 922 bp, Zea Mays
aaccaacccctatccgccccccgtcttttcccttttctctaccctctatctacccaccgttcccgtctctccgccgcttccttggaagacgaagaaaccctcctccaccaccaacccgatccagctacatccgttgaggcccgtgcgtttcttccctgttctcccatcaatcgacctagccttacgccgaccaggggcttcctctaatcgatctggtgtctgttctgtggtattggtctgggtgcactccagggccaggagcagctagccgtcttcgttcgatccgttcgcaccccccaacgcggttcgatttgaaggagcgtgatggccaagacgagctcgttcaagctggagcaccccctcgagaagaggcaatctgaggctaaccgtatcagagagaagtaccctgacagaattccagtgattgttgagaaggctgagaggagtgatattcctgacatcgacaagaaaaagtacctcgtccctgcagatcttacagtcgggcaattcgtgtatgttgttaggaagagaatcaagctcagtgctgagaaggctatcttcatatttgtgaaaaacacccttccaccaacagctgctctgatgtcttcaatctatgaagagaacaaggacgaggatgggttcctctacatgacttacagtggtgagaacaccttcggactgctctagatggcccgcaatggggtcgccttgcccttgcccatgcctcctgtaaataagacctgccaagcaactgtgtatattctggtttcgtcgtcgcaagtggttgcgctctactgctaaagcctacctatcagttgtggagttgtcgtcgatgttatggacacacttaatcaagtttattaattgactggacctgaatcttgggtcagtaatgtgacatctcctatgtcgtttacggtta

SEQ ID NO: 98857 - DNA, 926 bp, Zea Mays
aaccaacccctatccgccccccgtcttttcccttttctctaccctctatctacccaccgttcccgtctctccgccgcttccttggaagacgaagaaaccctcctccaccaccaacccgatccagctacatccgttgaggcccgtgcgtttcttccctgttctcccatcaatcgacctagccttacgccgaccaggggcttcctctaatcgatctggtgtctgttctgtggtattggtctgggtgcactccagggccaggagcagctagccgtcttcgttcgatccgttcgcaccccccaacgcggttcgatttgcaggaaggagcgtgatggccaagacgagctcgttcaagctggagcaccccctcgagaagaggcaatctgaggctaaccgtatcagagagaagtaccctgacagaattccagtgattgttgagaaggctgagaggagtgatattcctgacatcgacaagaaaaagtacctcgtccctgcagatcttacagtcgggcaattcgtgtatgttgttaggaagagaatcaagctcagtgctgagaaggctatcttcatatttgtgaaaaacacccttccaccaacagctgctctgatgtcttcaatctatgaagagaacaaggacgaggatgggttcctctacatgacttacagtggtgagaacaccttcggactgctctagatggcccgcaatggggtcgccttgcccttgcccatgcctcctgtaaataagacctgccaagcaactgtgtatattctggtttcgtcgtcgcaagtggttgcgctctactgctaaagcctacctatcagttgtggagttgtcgtcgatgttatggacacacttaatcaagtttattaattgactggacctgaatcttgggtcagtaatgtgacatctcctatgtcgtttacggtta

SEQ ID NO: 98858 - DNA, 931 bp, Zea Mays
aaccaacccctatccgccccccgtcttttcccttttctctaccctctatctacccaccgttcccgtctctccgccgcttccttggaagacgaagaaaccctcctccaccaccaacccgatccagctacatccgttgaggcccgtgcgtttcttccctgttctcccatcaatcgacctagccttacgccgaccaggggcttcctctaatcgatctggtgtctgttctgtggtattggtctgggtgcactccagggccaggagcagctagccgtcttcgttcgatccgttcgcaccccccaacgcggttcgatttgtaaggcaggaaggagcgtgatggccaagacgagctcgttcaagctggagcaccccctcgagaagaggcaatctgaggctaaccgtatcagagagaagtaccctgacagaattccagtgattgttgagaaggctgagaggagtgatattcctgacatcgacaagaaaaagtacctcgtccctgcagatcttacagtcgggcaattcgtgtatgttgttaggaagagaatcaagctcagtgctgagaaggctatcttcatatttgtgaaaaacacccttccaccaacagctgctctgatgtcttcaatctatgaagagaacaaggacgaggatgggttcctctacatgacttacagtggtgagaacaccttcggactgctctagatggcccgcaatggggtcgccttgcccttgcccatgcctcctgtaaataagacctgccaagcaactgtgtatattctggtttcgtcgtcgcaagtggttgcgctctactgctaaagcctacctatcagttgtggagttgtcgtcgatgttatggacacacttaatcaagtttattaattgactggacctgaatcttgggtcagtaatgtgacatctcctatgtcgtttacggtta

SEQ ID NO: 98859 - DNA, 806 bp, Zea Mays
gccccccgtcttttcccttttctctaccctctatctacccaccgttcccgtctctccgccgcttccttggaagacgaagaaaccctcctccaccaccaacccgatccagctacatccgttgaggcccggccaggagcagctagccgtcttcgttcgatccgttcgcaccccccaacgcggttcgatttgtaaggcaggaaggagcgtgatggccaagacgagctcgttcaagctggagcaccccctcgagaagaggcaatctgaggctaaccgtatcagagagaagtaccctgacagaattccagtgattgttgagaaggctgagaggagtgatattcctgacatcgacaagaaaaagtacctcgtccctgcagatcttacagtcgggcaattcgtgtatgttgttaggaagagaatcaagctcagtgctgagaaggctatcttcatatttgtgaaaaacacccttccaccaacagctgctctgatgtcttcaatctatgaagagaacaaggacgaggatgggttcctctacatgacttacagtggtgagaacaccttcggactgctctagatggcccgcaatggggtcgccttgcccttgcccatgcctcctgtaaataagacctgccaagcaactgtgtatattctggtttcgtcgtcgcaagtggttgcgctctactgctaaagcctacctatcagttgtggagttgtcgtcgatgttatggacacacttaatcaagtttattaattgactggacctgaatcttgggtcagtaatgtgacatctcctatgtcgtttacggtta

SEQ ID NO: 98860 - DNA, 95 bp, Zea Mays
gttcaatactcaatgtagcatgccgttttcgaagaaccgagcagcacagacgagaccgagatgtatatcaattagatagagaagcaaaattagag

SEQ ID NO: 98861 - DNA, 1015 bp, Zea Mays
aagagctcggtacatagccaagcaaacaggctgcaaacgctcacgaaaccacgcgtttggtggggtcggcgaggctggtgcggtggtgcacgccggtaactctcctcgccgtccaaagaagctataaattccacccaatcgccgccccgcacgcaccacaccgccccgaccatcaccgacaccagcgcctaagccccccccaaacggcaggagacagcagcaggccggaggtctcctccttctacgcatccactgagttccttcctgcgcaaagtaaatccccagttctttcggccgctgccaagttttcgaggtgggtctcgtgattttctttccaccatgcatgaattcgccctccgcgtcgcgtgattgcagcccgctttgcggggagacatgaaaagatgggaccttttttgaccctgcctccatagactggttggcttcacgggcgcgattccgcttcggttcaccgggttgcgtggcgatttttggaattatctagaggaccgagcatgtgggctattacctgatttttttggtgacgaattgatagttttgatttccctaatttcgcagtgttgctagccccgccagagttttcttctcccccgcagtcgaattgggcgagaagttgatgggaccgggggcacactggaaggttgtgtgagatcgcgaaggggaccgtgaaatcctgagagggctgcggtgattcggctgctcggctgtatgaactgtttcgtgaacctgggactcaactcgaactcgaaccactacgtcgcctgcctcctcatcttcctgctgcatttctccccccagttaaatccatccaattctaattcaactagtagttgtgaaggagaagaacagagctgcacagatggcgagcaacagtaagtcctgcttcttccccgggagctcttccagttttgggcttatagttgacagatggatgtttgttccaatttgaaaatatatcttaaatcgacgtgaattattaaagctgctcggctgaaga

SEQ ID NO: 98862 - DNA, 2352 bp, Zea Mays
aagagctcggtacatagccaagcaaacaggctgcaaacgctcacgaaaccacgcgtttggtggggtcggcgaggctggtgcggtggtgcacgccggtaactctcctcgccgtccaaagaagctataaattccacccaatcgccgccccgcacgcaccacaccgccccgaccatcaccgacaccagcgcctaagccccccccaaacggcaggagacagcagcaggccggaggtctcctccttctacgcatccactgagttccttcctgcgcaaagtaaatccccagttctttcggccgctgccaagttttcgagtgttgctagccccgccagagttttcttctcccccgcagtcgaattgggcgagaagttgatgggaccgggggcacactggaaggttgtgtgagatcgcgaaggggaccgtgaaatcctgagagggctgcggtgattcggctgctcggctgtatgaactgtttcgtgaacctgggactcaactcgaactcgaaccactacgtcgcctgcctcctcatcttcctgctgcatttctccccccagttaaatccatccaattctaattcaactagtagttgtgaaggagaagaacagagctgcacagatggcgagcaacagctcatgtggtgaaaatgcgagaaagccacacacaccatccgctattgttattggtggtgggtttgcaggtcttgctgctgctgatgcgctcagaaatgcatccttccaggttattcttctggaatctcgtgatagaattggtggcagagttcacactgactactcttttgggtttccagtcgatttgggagcatcttggcttcatggcgtttgtgaagaaaatcccttggcaccaataattggaaggcttggacttccactgtaccgcacaagtggagacgattctgtgctgtttgatcatgatctggagagctatgcactctatgacactaatggacgtcaagtaccacaggagttggtagaaaagattgggaaggtgtttgagaccatactggaagagactggcaaattgagggaaggaaccaatgaagatatgtctatcgcaaaagccattgcaattgttatggatagaaatccacagttgaggcaagaagggattgctcatgaagttcttcagtggtatttgtgccgtatggagggttggtttgccactgacgcagattcaatttcactacagggctgggatcaggaggtgctgcttccaggtggccatggcctcatggttcgtggatatcgtccagttataaatactcttgcaaaaggcttagatatacgcctcaaccataaggttttggaaattgttcgccaccggaacagggtagaggttactgtaagcagtggccaaacattcgttgcggacgctgcagtggtcactgttccgttgggtgtcctgaaagtgaaaaccatcagatttgagccgaggctgccagagtggaaagaagaggcaatcagagaactgacggttggagttgagaacaaaattgttctgcacttcggccaggttttctggcctaacgtggagttcctcggcgtcgtttcctctagcacgtatggttgcagctatttcctgaaccttcacaaggcaacaggccaccctgtccttgtttacatgcctgctggccgacttgctcgtgacattgagaagatgtcagatgaggctgctgcgcagtttgccttttctcagttgaagaagatccttcccaatgcagctgagccgatgaattacttggtgtcgcactggggctcggacgagaacacacttggctcctacacgttcgatggggtgaacaaaccccgcgacctgtacgagaagctgcgcatccccgtggacaacctgttcttcgcaggagaggccacgagtgtcaagtacacgggcacggtgcacggcgccttctccactggtgttatggcagccgaggagtgcaagatgcgagttctggagcggttcagggagcttgacatgctggagatgtgccaccctgccatgggcgacgaaagccctgtctccgtcccgttgctcatctctcggctctaagcagacgagaggttgtctatgggattgattggcacctgacagtacgctggacgtcccactgattgccggagggaaagctggcagtacagggagaaagaaactccccttgcttctccctcttcggcatgaggaatgtgctggcattacttgtgtggcgtttcatgttaaaacctatattgtgtattgtggccttgtgggtctgtgtgtgttcagggttatcatgtcatcttggtagaaaaggatgccccgtatgtattatgaacactagtaataataatacatatatgta

SEQ ID NO: 98863 - DNA, 2215 bp, Zea Mays
cccaatcgccgccccgcacgcaccacaccgccccgaccatcaccgacaccagcgcctaagccccccccaaacggcaggagacagcagcaggccggaggtctcctccttctacgcatccactgagttccttcctgcgcaaatgttgctagccccgccagagttttcttctcccccgcagtcgaattgggcgagaagttgatgggaccgggggcacactggaaggttgtgtgagatcgcgaaggggaccgtgaaatcctgagagggctgcggtgattcggctgctcggctgtatgaactgtttcgtgaacctgggactcaactcgaactcgaaccactacgtcgcctgcctcctcatcttcctgctgcatttctccccccagttaaatccatccaattctaattcaactagtagttgtgaaggagaagaacagagctgcacagatggcgagcaacagctcatgtggtgaaaatgcgagaaagccacacacaccatccgctattgttattggtggtgggtttgcaggtcttgctgctgctgatgcgctcagaaatgcatccttccaggttattcttctggaatctcgtgatagaattggtggcagagttcacactgactactcttttgggtttccagtcgatttgggagcatcttggcttcatggcgtttgtgaagaaaatcccttggcaccaataattggaaggcttggacttccactgtaccgcacaagtggagacgattctgtgctgtttgatcatgatctggagagctatgcactctatgacactaatggacgtcaagtaccacaggagttggtagaaaagattgggaaggtgtttgagaccatactggaagagactggcaaattgagggaaggaaccaatgaagatatgtctatcgcaaaagccattgcaattgttatggatagaaatccacagttgaggcaagaagggattgctcatgaagttcttcagtggtatttgtgccgtatggagggttggtttgccactgacgcagattcaatttcactacagggctgggatcaggaggtgctgcttccaggtggccatggcctcatggttcgtggatatcgtccagttataaatactcttgcaaaaggcttagatatacgcctcaaccataaggttttggaaattgttcgccaccggaacagggtagaggttactgtaagcagtggccaaacattcgttgcggacgctgcagtggtcactgttccgttgggtgtcctgaaagtgaaaaccatcagatttgagccgaggctgccagagtggaaagaagaggcaatcagagaactgacggttggagttgagaacaaaattgttctgcacttcggccaggttttctggcctaacgtggagttcctcggcgtcgtttcctctagcacgtatggttgcagctatttcctgaaccttcacaaggcaacaggccaccctgtccttgtttacatgcctgctggccgacttgctcgtgacattgagaagatgtcagatgaggctgctgcgcagtttgccttttctcagttgaagaagatccttcccaatgcagctgagccgatgaattacttggtgtcgcactggggctcggacgagaacacacttggctcctacacgttcgatggggtgaacaaaccccgcgacctgtacgagaagctgcgcatccccgtggacaacctgttcttcgcaggagaggccacgagtgtcaagtacacgggcacggtgcacggcgccttctccactggtgttatggcagccgaggagtgcaagatgcgagttctggagcggttcagggagcttgacatgctggagatgtgccaccctgccatgggcgacgaaagccctgtctccgtcccgttgctcatctctcggctctaagcagacgagaggttgtctatgggattgattggcacctgacagtacgctggacgtcccactgattgccggagggaaagctggcagtacagggagaaagaaactccccttgcttctccctcttcggcatgaggaatgtgctggcattacttgtgtggcgtttcatgttaaaacctatattgtgtattgtggccttgtgggtctgtgtgtgttcagggttatcatgtcatcttggtagaaaaggatgccccgtatgtattatgaacactagtaataataatacatatatgtaacttaactgtttggagtattgagttatttggcatgt

SEQ ID NO: 98864 - DNA, 1830 bp, Zea Mays
ccactccaccagtccacctgcatcctccctctctctctcccgctcccgtgctctctccctctccccaggatccgaattgccagcgcaccagtcgagctcgcgggacctcgccggcgccggcgatggcctcctcccttttggccggacggggagggggccaccaccacaactggggggagacgcgcgccccgctcgagcccataccccccaaccctagtcccagccagccccacccgcgcgccgacgggtccaagtccaagccgcgggcggcggccggctacgtgaagttccgcccggcgtccctgggccaccgcgaggcccgcgcgctccgggaccgcctcgcggtggagctcggccaggtccgcgccctcctctcccgcatcgacacctggcagcagcagggcccgccgccgcgcgcggtgctccgcggggcgatgcggaagcggtgcggccagatcctcagcaggctgcgcaaggacaagcgcagcgtgtggttcaacgcgcccgtcgaggtggagcgcctcggcctccacgactaccatgccgtcatcaagcgccccatggatctcggcaccgtcaaggagggcctcgccgccgggaggtacgcctcgcacgacgacttcgcggccgacgtccgcctcaccttcaccaacgcgctgcggtacaacccggtcggccacgaggttcacacgttcgctggcgccctcctcgcctacttcgagaggatgtacaaggaggcgctcgtttgtttagaggaagagcgcaagcgccttgagccgccgaggccagtggcggctgagctgccacctccgccggcagttgagcctgtcgaggcgaaggctaagacgagagcagggaatgtgaggatgcggaagcccaaggcgagggagcctaacaagagggagatgagcctggaggagaagaacatgctcaggctggggctggtgagcctgcccgaagagaagatgcacaatgtgcttcagatcgtgcgcaagaggaacaacaacccggagatgcttggggatgagatcgagcttgatattgatgagatggatgttgagacacagtgggagcttgatcgtttcgttactaacttcaacaaggcgctcaagaagtcccagcgtgctgcgatgttgaatggtggcgttgctgatgtaaccagtactgctgtggctgaggatgacactgcacctgtgggcgatgtgcctacattggttggcaatgacgatgcggagagtgaggaacctgtgaagagcactacagtggctgagcaggtggatgagtatgttgatattggggatgaaatgccagcagccacttaccaatccatggagatcgagaaggacgctgaaggtacgactggctctggtggttctggcagtggctcttcatcgtccagtggttctgagtcgaggagctcaggggacagtgcctcaggagctggcaatgctcattctttgacttaggggaggttggtaacaataggatttgaaaatctgaatgatccgagttcgtgtgcaggtaattgtaagtgtgtagctgtttctgagacatgggtgtctgcttaggctttgattacgttagtagtagataacaaactggctttgtgggtgtctgacagcagtacagcaccatgtgtatgtaagctggaggtggaaggtactggtgtgttaaaagtagctgatcgaccttctcgtatgaagggggccagggctagtgtctgtgttcttaatggtagggttgatcgaccttctcgtaattgatgctttgtgcatgacattaaagtatggttttataagtaacaatgcagtatcatttgttgggtgatga

SEQ ID NO: 98865 - DNA, 246 bp, Zea Mays
atatacgatgtcaaaatagagcagggtgccagagacattgaggcgtacgcggatgacgatgccaaaatcgttgtgcggctagcaggcgacgtcgccgacactatgggttcgacggctgagatgggtggaggcatgaggcagcggcggcgggtgaagcgcggctccggtgacggactgatgggagaggacgacaacaaccttggacggacttacgctcaatcgaagatggagagcttgaaaccctag

SEQ ID NO: 98866 - DNA, 902 bp, Zea Mays
cgttaccaaatttatagtatcttgtattactaaatagcaagcatgccctctgtacatgtttttgctttcacatccagatcagtgcaaacaaacaacgaaaactttatagcacagtagcacactaagctaacaagataaacgacgaatagagatctacaaggctaatacaacagtacggcgagacactagtgggcggcgaccaccatgtcaggcgcgttgaggaactcgataaccgcatcgatgggcagatcggtgcttggaggcgacagagcgaagagcaccacggacttggccgccgcgatcttcttccgctgggggcaccggggcgcgaggagcctcgaggcgggcgcgaagcacggcacggccgcgacgccctcgccgtctccagaagcaggaagaggcgatgaggaggacgccggcgcaggcgcatgcgcaggcgcaggcgatgagggcgggggcaggcgagtggcgcggcggagcctgtcgtcgcggaggcgggcgagggccccgggacggaggaagcggaggtggtccccgctggcggcggcggcggacggggagcggcggagcttgcgggtggcagccatgtggagcccggatgttggtgggggtgaataggcagaccgcagacggaatggattggacgcttgttgcggttgcggtggaggcggggcgagcggggggttttgaaggcgggctgggcgagcgggaggcgcgagcgcgacctttgggagggaaaattttgctcgaggtgccaggagtacgctgttgtttgccgcgttggccaatgtcgagtgggtccaagagtgcgtgggatccacatggcggggtgagattgtctgctcacagttttggatggaatttagtgagggaacggacgcccacggttcgaaagggaacgg

SEQ ID NO: 98867 - DNA, 849 bp, Zea Mays
agccctagcaccggcaccctatataaacctcgcccctgtttcaccctgcgtttccctcttccccccactacccaaacccaacaggcggcgcagcagcatcgccaccaccgtccaaagatggtgaagttcctcaagcccggcaaggccgttatcctcctccagggccggttcgccggccggaaggccgtgatcgtgcgcgttttcgaggagggcacccgtgatcgtccctacgggcactgcctcgtcgcgggcctcgccaagtaccccaagaaggtgatccgcaaggactccgccaagaagacggccaagaagtcccgcgtcaagtgcttcatcaagctcgtcaacttcacgcacctcatgcccacccgctacaccctcgacgtcgacttcaaggacgtcgcatcgggcgggcccgacgcgctctccacccgggacaagaaggtcgaagcctgcaaggccgccaaggcgcgcctcgaggagaggttcaagaccggcaagaacaggtggttctttaccaaactccgcttctagacgtcgggcgtccctcatagtgtctgatttagttgtcaatttcttgtacctgaaaccctttaaggtatctctgttttgctatttccatgaaggcttcgtgcttggtatggatcttggagaggattttgttaaaaacatgtcgatgatgttaaattatgccaaagcacacatatggttggattttgtggagaatctgcttgtgacgtgctgttaaccttctgtgcagttagtcttgcgggtctcaaattttgttgacgcatcttataggcctccatcactgaatgtttcttggtttacagatgtggtttactgccctgt

SEQ ID NO: 98868 - DNA, 2582 bp, Zea Mays
ctcaaaatcccattcgaaacctcccgattccctccacgaaatttacaaaaccacagcactcccgccaatctcccgcacgtttgggacccaaatccgcgatcccgttgcccagccgcagcgtacggaaacctagctccccccccgccgccgccgccgccgctgggatggacttctcggcgccctcattctcgctgggttttgactgggacgacgatgaccccccggccagcagcgaccggcgcgagcagccgcgcgggtacggggcccccgacgcgccgtcgttctcgttagggatcgacgacgacgacgacgtggaggagccccgcatcccggcgagaggccgccagaatgagcaggcgcgtgagttcacggcgcccgatccgccgtcgttctccctgggcttcgacgacgaacacggcgatggtgacatactctctgccgaccgttgccgcgagcagtcgcagccccaggtagcgcccggatctccttcaaatggcactgcagatgatgatgatgataaggaggatggcttcgtcgtcgctggtggcaagcggccggttcgagtggagcgtgacacgctatacccagatcccctgccgacgccagcggagaccaatcggttcaagcggctgcggaagggctctgcgacagcccatccggcgcaaactccccaggtgccgcaccgtgaggcgcctgacgctccgtcttcctcccttagcatcagcgacgacgacttcctaactggcggccagcatcacgagcgactgaagccacaagcctctcctcggatcccctcatcgctcagtatcgaagacgaggacgacgacttcttcctcgctggtgaccgacagccagagccaacactgcctcaagtgactcaactcaagcggctgcggaagggccctgtcccgccacatctggcgccatcaccgcctcctcccaaggtgccaggacagcccacgacggaagcctctccagtaatgactgaagatgcagcacgaggggcggttgggagttgggaagacgagatcgaggattggacaacagacgaggaccgaccagttcgagatgtgccaccatctgttggtagctgcagcacttcaagcaactcaaagttctctctgcttaaccgtggtgtccttatgacccagtcaggaactaaagcgagtacatcaaaatttacacaaacaccaaatacatctgcttcaatatctttggaagaaagctgcacaaagaaattacttcctaagataacagtaagcccgatgaggaaaatttatttgcttgattctgacactgatgctgacgatgactacagtcaaaataaagcaaagagcatgcagcaaaacaggaagccccaaatgaacagtactgtacagaagagcggggctatgatgagtgacaattgggcaacacctgccttggatgagttctgcaaggaatacttcgaatctccaaaagatgcaggattttctcagccgaaagaaggaaacactcattacaaggcttcacaacctaagaactctgggcacttccagcaacaagcgtcttcaagtggaggtgaagtggatgatggtcctcctgctatgcaatatctgtaccaccctgacccaagggtgggtgatttgttccggaacaggctgcaacatttcgttcctattggggcaggaagtaccatagcaaatgagcaaaacagagcaaaaagtctaagaagttgcaggaggcaatccagctcgagtgcagctgctaccgatgactgggtaactcctgggagggtctcagttccaactgatgctagcaaaagaagggtgcatgccagtggaactcattctggctctggccattggtttactaatgacagtgggaggaaggtttacgtctcaaaaaatggacaagagttgactgggcgtgatgcctatcgacaatatcaaaaggaaagtggcaggggattcaacaggtacaagaagaaaggttcatcaggaaccaaacgaggtgctgctcaagtgaaaactgagactgcagccaaacgaggtactgctcaagtgaaaactgagactgcagccaaacgaggtacgagtagagcaaaaaggaagcggtgactgcctacattggctaggattctgtagttaggttttcacctcgcgtgcttgagttcacagccgatttgttggtagaagtagaaccatatgaatgtataacaagcctcagctgctctcgggtcttcttttagggtgcgtttggttgcaatgacaggacgggataggacgagacgatccctcaaataagattgttttgttcagggtcaagggttgggacaggattatcccagtgttgtccccagttatccctcaaaattggagggacgagaggatgccagaggacgtccctatcctggttgtcccgcaaccaaacacacccttatatcaggaggctagcgtatacgtcagtacatggttctattgtgtgtttgtaaatatgattttgctcttcatgtattcttctttttttggatgccaatgaggcaatgatctgtatgcaaaaggctggattactccacaggatgaataaaccattatttcaca

SEQ ID NO: 98869 - DNA, 1772 bp, Zea Mays
cccacggcccacggcaagtctcccgcgaagtcgcaagtctcccgcacgaaccacgacaaatgtcaaccccgattcctcgccgtcgctcatctcctctctcccatctctgctagggttaggtcgtctcggcaagtcgccatgatgcagcagcccccgcagccgcagccgggtatggcgctacctcctccccctcagaccggtggcgggcagccaccgcagtggggcgcgatcccgccgccgatgacgcagcagtacggcgcaccacctccgcagcagcctccagcgatgtggggccagcctccgtcgcaggcgcactacgggcaggcgccgccccctcagccgtattatgccgcgccgccggtgccggccgcccccgctgcggcggacgaggtcaggacgctctggatcggggacctgcagtactggatggacgataactatgtcttcgggtgcttttcgaacaccggcgaggttcaaaatgtgaagctcatccgcgacaagaattcaggacagcttcagggctatggttttgttgaatttacaagccgtgcagctgcagagcgagttcttcagacatataatggacaaatgatgccaaatgttgacttgacatttcggctgaactgggccagtgctggtgaaaagcgtgatgatactcctgactatactattttcgttggtgatttggctgcagatgttacagattacttgttacaagagacattcagggttcattatccctcggtgaagggtgcaaaagttgtgactgataaattgacaatgcgtaccaagggttatggatttgtgaaatttggcgatcctacagagcaagctcgtgcaatgactgaaatgaatggaatgccttgttcttccaggcctatgcgtattggtcctgcagcaagtagaaaaaatgcaggtggtgttgttcaagagagagtaccaaattctcaaggagctcagtctgagaatgatcctaacaataccactatatttgttggtgggcttgaccccaatgtcactgaagatgtcctaaaacaagcattttctccttatggcgaagtcatccatgttaagatccctgttgggaagagatgtggttttgttcagtttgttaccagaccttctgctgagcaggcgctgctaatgttgcaaggggccttgattggtgcacagaatgttcggctttcgtggggtagaagcctgtcgaacaagcagactcagcctcagcaggaatccatgcaatggggtgcgggtgcgcctgctggtgttggtgattactatggtggctatggacaaggttatgaggcttatggcagtgggtatgcacaaccccaggaccctaacatgtatggttatggcgcttatgttggttatcccaattaccaacagcaaccagctgcacagcagccacagcaacaacagtgaggcctctttgctcgggtaggtcattgggttgtctgagatgggatcaattagtattatttctaggcattcatatattgatttcttgaaaatagaggtggtttcgaaaatctcctgattttgatggccccatggcatgttttcttcgagttatatcatatatatatgcactatgttatgtctatgaacaagtggtgctcaactgtgattgctatgttgaggcatgcttcgtagtttccttccagacttgtcttatatattgttctctcttttactctgtattgttatctctattagtgtgtattgcatatctactgcgatgctatatatgcgctgtgccgcctttcgtt

SEQ ID NO: 98870 - DNA, 1843 bp, Zea Mays
cccacggcccacggcaagtctcccgcgaagtcgcaagtctcccgcacgaaccacgacaaatgtcaaccccgattcctcgccgtcgctcatctcctctctcccatctctgctagggttaggtcgtctcggcaagtcgccatgatgcagcagcccccgcagccgcagccgggtatggcgctacctcctccccctcagaccggtggcgggcagccaccgcagtggggcgcgatcccgccgccgatgacgcagcagtacggcgcaccacctccgcagcagcctccagcgatgtggggccagcctccgtcgcaggcgcactacgggcaggcgccgccccctcagccgtattatgccgcgccgccggtgccggccgcccccgctgcggcggacgaggtcaggacgctctggatcggggacctgcagtactggatggacgataactatgtcttcgggtgcttttcgaacaccggcgaggttcaaaatgtgaagctcatccgcgacaagaattcaggacagcttcagggctatggttttgttgaatttacaagccgtgcagctgcagagcgagttcttcagacatataatggacaaatgatgccaaatgttgacttgacatttcggctgaactgggccagtgctggtgaaaagcgtgatgatactcctgactatactattttcgttggtgatttggctgcagatgttacagattacttgttacaagagacattcagggttcattatccctcggtgaagggtgcaaaagttgtgactgataaattgacaatgcgtaccaagggttatggatttgtgaaatttggcgatcctacagagcaagctcgtgcaatgactgaaatgaatggaatgccttgttcttccaggcctatgcgtattggtcctgcagcaagtagaaaaaatgcaggtggtgttgttcaagagagagtaccaaattctcaaggagctcagtctgagaatgatcctaacaataccactatatttgttggtgggcttgaccccaatgtcactgaagatgtcctaaaacaagcattttctccttatggcgaagtcatccatgttaagatccctgttgggaagagatgtggttttgttcagtttgttaccagaccttctgctgagcaggcgctgctaatgttgcaaggggccttgattggtgcacagaatgttcggctttcgtggggtagaagcctgtcgaacaagcagactcagcctcagcaggaatccatgcaatggggtgcgggtgcgcctgctggtgttggtgattactatggtggctatggacaaggttatgaggcttatggcagtgggtatgcacaaccccaggaccctaacatgtatggttatggcgcttatgttggttatcccaattaccaacagcaaccagctgcacagcagccacagcaacaacaggtgaagctcctagctaattgatgccctttggagtttaattggtgaaaaaaatatctctactaataacaaattgaggcctctttgctcgggtaggtcattgggttgtctgagatgggatcaattagtattatttctaggcattcatatattgatttcttgaaaatagaggtggtttcgaaaatctcctgattttgatggccccatggcatgttttcttcgagttatatcatatatatatgcactatgttatgtctatgaacaagtggtgctcaactgtgattgctatgttgaggcatgcttcgtagtttccttccagacttgtcttatatattgttctctcttttactctgtattgttatctctattagtgtgtattgcatatctactgcgatgctatatatgcgctgtgccgcctttcgtt

SEQ ID NO: 98871 - DNA, 2057 bp, Zea Mays
cagtcgagcactcgcgtcgcggtggcacctgcgatccgaagcgagtccgagtcacacggccacgccccttggtctccttcctccgcttgcggcttgcctttttcgggccgcctccgctcctctctctctctctggctctctccctctccaatggcccgccccaggaagccgccgccgccctcgccgcctaaggcggcggcgccgtccatcgctgacgcgctgctgctggccacggtctgcatggtgggtctgcccgtggaggtgcgggtccgcgacggatccgcctacgccggcgtcctccacactgcctgcgtcgacgccggatacggtgtcgtgctaaagaaagcaaagaagattgcaaacgggaagggagatgtgaatctctcgctgggatcgtttgtggacactcttgttgtttgcccagatgaccttgtacaagttattgcaaagggtctttcactcccccttaaaggtgtctgtaaacctcttgattccaacgtggttgctgccagtggatccttgaagcctcaaatttcacatgcaaatgacccaaaaatgtctaataaaactaaaaatatgtctccacttatgtatgttatcaattccagccatgcatactgttatgtattgttccatatatatgagaaatcgcatatggattgcatgtatgcatcctacttggccccaatataaatgagaaatcgatttttttcacatgcggatttaagcattagatatcaagcaatctatttaactccatttccttctttccattgtcgaacaattaatactatttttgtcacaggcaagctgagaaatgcacctcggtgggtcaggagaaaaatacttctgttaagagaaatggtcaagataatggtattactacaagtttaagttcttcaaccagacatgtgggggcatgtttatccaataattgggattctaggtctggaagtatggtgcctaaagttgatgttatcacaagttcagcttcagctgtgcccgtggtggcttcaggtgttaaaccctctcagccagtcaataattcagttgccaagattgtcacgtcaagcaaaactgctgctaaggaattcaaactcaatccttccgcaaaggtcttttctccatcttttgcaagttctaggcaagtacttgcagctgcggcccctgttgacacatactacatttcacactctgcccctgaagtaccaatgggtgtgcctgtatatgaaccaaaatctgtgtcaggtgtttcacctctatccaacaaggtttattgtagtaatctatctcctgcaaactatgccatttcacctcagtatgtgccgtctatcatgggccataatgcatcaaggctagacccatccagaattggcacaccataccatcctatgcaggtgggggcaacttatactacccctagtcctcagcctgtaatggctgggaagttcagtcctgttgtttatgttcaaccaggtcctcaggatgcaatgcatggaacaaccgttggttttcaaggatggccttgccctttgttattgaattcgtaccaagctagcatgcagaaattccaaggcaaccccccggtgtatttagctcctccagtcatggcaactgggaaccttccattggtggtaccaagccctgcatcacttgtgcagccgttcgaggccattcatcccataatggtccctgctgcaagcagcatggtcccaggaaaatacatgtaaacttgtcgtaccaatgacaatctccttttgttggaagaatcctggcgtacccattttgtctgaaaggactctagtctgttgattcacttgtcagttgctggtctgtgtccgtattttagttggaagggctttgcaacttcttgtcattcttcatgcttggtgtgggtttccaattttttttaggggcgggacagtaaaatgaattagggagaaaatgcagcgattctttgttatcttagcgacacctcttcttccaagagcagtatgtacaatgtgacattgtaaaagattcatatagtgaaggccttattttcacgaggctaatgt

SEQ ID NO: 98872 - DNA, 2381 bp, Zea Mays
ccttcctccgcttgcggcttgcctttttcgggccgcctccgctcctctctctctctctggctctctccctctccaatggcccgccccaggaagccgccgccgccctcgccgcctaaggcggcggcgccgtccatcgctgacgcgctgctgctggccacggtctgcatggtgggtctgcccgtggaggtgcgggtccgcgacggatccgcctacgccggcgtcctccacactgcctgcgtcgacgccggatacggtgtcgtgctaaagaaagcaaagaagattgcaaacgggaagggagatgtgaatctctcgctgggatcgtttgtggacactcttgttgtttgcccagatgaccttgtacaagttattgcaaagggtctttcactcccccttaaaggtgtctgtaaacctcttgattccaacgtggttgctgccagtggatccttgaagcctcaaatttcacatgcaaatgacccaaaaatgtctaataaaactaaaaatatgtctccacttatgcaagctgagaaatgcacctcggtgggtcaggagaaaaatacttctgttaagagaaatggtcaagataatggtattactacaagtttaagttcttcaaccagacatgtgggggcatgtttatccaataattgggattctaggtctggaagtatggtgcctaaagttgatgttatcacaagttcagcttcagctgtgcccgtggtggcttcaggtgttaaaccctctcagccagtcaataattcagttgccaagattgtcacgtcaagcaaaactgctgctaaggaattcaaactcaatccttccgcaaaggtcttttctccatcttttgcaagttctaggcaagtacttgcagctgcggcccctgttgacacatactacatttcacactctgcccctgaagtaccaatgggtgtgcctgtatatgaaccaaaatctgtgtcaggtgtttcacctctatccaacaaggtttattgtagtaatctatctcctgcaaactatgccatttcacctcagtatgtgccgtctgtaagtgcttcgatctattcttatgtgtttttgattgtttcatttatttcgccttcattggataatactatattatcctcttgatatttaaaaaggctattggatggcaacttgtaacatgcctttggttcaagttgataacttgctgcatatggcttaggcttactccgttatcatttgttctatatttgaggccatgcacgtactcagttactcctatgtgctttgcctttgcagttgagctattcaagccattcttacctgttagctgtctaatttacttgtctgttggattaaatgaataaattgaacttgtaaactgattcttcatgtcaacttacagcttatcagctttaatttaattctgatgcaagaaaaaaaatctttttactccgaactgaaaaacctagctcacatgtaaatgtattttttatgtttgaaagcttcttttaacaacttgccttttatgttctattactgtactttgtgcaagcatattttaatacacttaaatttggtcttgcttgttgcctctatcatggatgtctaacattaccatgcttctggattctggtactacttaaccttttgggtcatagatcatgggccataatgcatcaaggctagacccatccagaattggcacaccataccatcctatgcaggtgggggcaacttatactacccctagtcctcagcctgtaatggctgggaagttcagtcctgttgtttatgttcaaccaggtcctcaggatgcaatgcatggaacaaccgttggttttcaaggatggccttgccctttgttattgaattcgtaccaagctagcatgcagaaattccaaggcaaccccccggtgtatttagctcctccagtcatggcaactgggaaccttccattggtggtaccaagccctgcatcacttgtgcagccgttcgaggccattcatcccataatggtccctgctgcaagcagcatggtcccaggaaaatacatgtaaacttgtcgtaccaatgacaatctccttttgttggaagaatcctggcgtacccattttgtctgaaaggactctagtctgttgattcacttgtcagttgctggtctgtgtccgtattttagttggaagggctttgcaacttcttgtcattcttcatgcttggtgtgggtttccaattttttttaggggcgggacagtaaaatgaattagggagaaaatgcagcgattctttgttatcttagcgacacctcttcttccaagagcagtatgtacaatgtgacattgtaaaagattcatatagtgaaggccttattttcacgaggctaatgtacatccatcttgcaa

SEQ ID NO: 98873 - DNA, 1824 bp, Zea Mays
cttgcggcttgcctttttcgggccgcctccgctcctctctctctctctggctctctccctctccaatggcccgccccaggaagccgccgccgccctcgccgcctaaggcggcggcgccgtccatcgctgacgcgctgctgctggccacggtctgcatggtgggtctgcccgtggaggtgcgggtccgcgacggatccgcctacgccggcgtcctccacactgcctgcgtcgacgccggatacggtgtcgtgctaaagaaagcaaagaagattgcaaacgggaagggagatgtgaatctctcgctgggatcgtttgtggacactcttgttgtttgcccagatgaccttgtacaagttattgcaaagggtctttcactcccccttaaaggtgtctgtaaacctcttgattccaacgtggttgctgccagtggatccttgaagcctcaaatttcacatgcaaatgacccaaaaatgtctaataaaactaaaaatatgtctccacttatgcaagctgagaaatgcacctcggtgggtcaggagaaaaatacttctgttaagagaaatggtcaagataatggtattactacaagtttaagttcttcaaccagacatgtgggggcatgtttatccaataattgggattctaggtctggaagtatggtgcctaaagttgatgttatcacaagttcagcttcagctgtgcccgtggtggcttcaggtgttaaaccctctcagccagtcaataattcagttgccaagattgtcacgtcaagcaaaactgctgctaaggaattcaaactcaatccttccgcaaaggtcttttctccatcttttgcaagttctaggcaagtacttgcagctgcggcccctgttgacacatactacatttcacactctgcccctgaagtaccaatgggtgtgcctgtatatgaaccaaaatctgtgtcaggtgtttcacctctatccaacaaggtttattgtagtaatctatctcctgcaaactatgccatttcacctcagtatgtgccgtctatcatgggccataatgcatcaaggctagacccatccagaattggcacaccataccatcctatgcaggtgggggcaacttatactacccctagtcctcagcctgtaatggctgggaagttcagtcctgttgtttatgttcaaccaggtcctcaggatgcaatgcatggaacaaccgttggttttcaaggatggccttgccctttgttattgaattcgtaccaagctagcatgcagaaattccaaggcaaccccccggtgtatttagctcctccagtcatggcaactgggaaccttccattggtggtaccaagccctgcatcacttgtgcagccgttcgaggccattcatcccataatggtccctgctgcaagcagcatggtcccaggaaaatacatgtaaacttgtcgtaccaatgacaatctccttttgttggaagaatcctggcgtacccattttgtctgaaaggactctagtctgttgattcacttgtcagttgctggtctgtgtccgtattttagttggaagggctttgcaacttcttgtcattcttcatgcttggtgtgggtttccaattttttttaggggcgggacagtaaaatgaattagggagaaaatgcagcgattctttgttatcttagcgacacctcttcttccaagagcagtatgtacaatgtgacattgtaaaagattcatatagtgaaggccttattttcacgaggctaatgtacatccatcttgcaagtgtaacagcttctgaagttctgttttgagaaaataaacttgttcgacaata

SEQ ID NO: 98874 - DNA, 715 bp, Zea Mays
tttctgccatggttggtctgttcttatctctggcaaggaaccaaccttgctccatagaaatgatatatagtctaaatataagttaactcacatattttccccttcctcctcttggctcatctattcttggtttccattgaaggatgcaatgcatggaacaaccgttggttttcaaggatggccttgccctttgttattgaattcgtaccaagctagcatgcagaaattccaaggcaaccccccggtgtatttagctcctccagtcatggcaactgggaaccttccattggtggtaccaagccctgcatcacttgtgcagccgttcgaggccattcatcccataatggtccctgctgcaagcagcatggtcccaggaaaatacatgtaaacttgtcgtaccaatgacaatctccttttgttggaagaatcctggcgtacccattttgtctgaaaggactctagtctgttgattcacttgtcagttgctggtctgtgtccgtattttagttggaagggctttgcaacttcttgtcattcttcatgcttggtgtgggtttccaattttttttaggggcgggacagtaaaatgaattagggagaaaatgcagcgattctttgttatcttagcgacacctcttcttccaagagcagtatgtacaatgtgacattgtaaaagattcatatagtgaaggccttattttcacgaggctaatgt

SEQ ID NO: 98875 - DNA, 3549 bp, Zea Mays
cagaagcctccacctctgcggtcatgagggtcatctaaccttttcacagctccagcgaatgcacacagccgccgtcgtttcttcgtcttcctctcagcgccggcgctcccactcgtgctccctcccccactcgcgctcggcacgcaggccacgcggcggcgctcaggctcgggatatcagcgacggcggggcggtcccaggcttgtcgtcttcgtcagcggctccccctcctgcctctcgccaatcgcctcgcgccctcgcctctggttctccgcacacagcccggcgaccctgcgtgcgcccctaccgcctccggtggaccatcgacggctcctggcccggcggctgcgctgcacgccgcgcgcggccggcgggcagcgggagctagcagccgctgctgcaccaaggcggtcgcgccgctttgggagcgcttttgccccaaagcgaagcattaccagtccgcttaacgcttcagcgcgctgaagcgtgcgtttagttccgctttttggaaccctgtgctgacttctctttcgaggatctagagcgcacaatgatattttgctagcgttatgctcttcaactcgccaaaatcagcaaaacgaataggagtacagttcctatcagttgcaagtgcagactgctttggtcgagatgtctctccgacgcactttgcatccctgttaaaggaatgcaggtctgtgaatacagttcgtcaaattcatcagaagataattgcttgcggccttctttcgtatccatcatctttgttgtctgtgccactcgcaccacttccatcacattcatatgtatcaccaaaatctttgggcaccggtgttgtagcttcctatcttgcttgtggtgctacgaaggatgctctctcagtgttggagcgtgtcacaccatcaccagccgtgtggtggaatctactcgtaagagaacacatcaaggaaggccaccttgatagagcaattggtgtatcttgtcgcatgctgcgtgctggaactaagccagaccattttactctgccgtatgcgctgaaagcatgtggagagctaccttcatactgttgtggaagagcattacatggactcatatgttgcaatggatttgagtcaaatgtctttgtctgcaatgcattggtggcaatgtattcccgctgtggttctttggaggatgccagtctggtgtttgatgaaataacacggaagggaattgatgatgttatctcatggaattcaattgttgctgcccatgttaagggtagtaatccgcggactgcattagagctgttttcagagatgtcaatgattgttcacgaaaaagctacaaatgaaaggtcagatatcattagcattgtcaacattcttcctgcatgtgcttctctaaaggcattgcctcaaattaaggaaatccacagctatgccattcggaatggcacatttgcagatgcttttgtgtgcaatgctctgattgatacctatgcaaagtgtgggtcaatgaacgatgcggtaaaggttttcaatgtaatggaattcaaggatgtcgtttcttggaatgcaatggttactggatacacccaaagtgggaactttggggcagccttcgagcttttcgagaatatgcgcaaggaaaatatcccactagatgtcataacgtggagtgctgtaattgcagggtatgctcagagggggtgtagccaagaggcccttgatgcattccagcaaatgattcttgatggttcagagccaaattctgtcactatcatctctctattgtctgcttgcgcttccttgggagcattgtctcagggcatggaaattcatgcatactctctgaagaagtgtcttttatccttggataatgattttggtggtgacggtgacggtgaggatctaatggtgtacaatgcattaatagatatgtactcaaagtgcagaagtttcaaagctgcacgctccatatttgattccatacctcgaagagaacgtaatgtggtgacttggaccgtcatgattggtggatatgcacaatatggagactcaaatgatgccctcaagattttctcagagatgatttcaaaaccatacgcagttgccccaaatgcttatacaatttcctgcattttgatggcctgtgcacatctggcagctcttcgtatgggtaagcagattcacgcttatgtcacccgtcaccatgaatatgaaccatctgtgtactttgtggcaaattgccttattgatatgtactcaaagtgtggtgatgttgatactgctagaaatgtatttgatagcatgcctaaaaggaatgaagtatcttggacttcaatgatgtcagggtatggaatgcatggtcgtggtaaggaggctttagacatatttgacaagatgcagaaggcaggctttgttcctgatgatatttccttcctggttcttctttatgcttgtagccattctggcatggtggatcaaggtctgaattactttgatatcatgcgcagggattatgatgtagttgccagtgcagagcattatgcttgtgttattgacttactggctcgctgtgggcgattagataaggcatggaaaacaattcaggaaatgccaatggagcctagtgcagttatctgggttgcattacttagtgcctgtagagttcattcgaatgtggaacttgctgaatatgctctgaacaaactggtcaatatgaaagcagagaatgatggatcctacacacttatctccaacatatatgctaatgcaaggcggtggaaagatgtagcaagaatcagacaattaatgaagaaatcagggattaagaagaggccaggatgcagctgggtccaaggtaagaagggtactgcatcattctttgttggagatcgatcacaccctctatctccagagatatattctcttttagagagattaattggccgcatcaaggttatgggttatgtccccgagacaaactttgcactgcatgatgttgatgacgaggagaaaaataatcttctcagtgaacacagcgagaagcttgctctcgcatatgggctcctcacgacttcccctggttgtcccatacggatcacaaagaaccttcgtgtttgcggtgattgtcatagtgcattcacctacatctccaagattgttgaccatgagatcattgtacgagattccagtcgcttccatcatttcaagaatggctcttgttcctgtggtggctattggtgataccttgttctgtgaaagcagcaggtgcagaagcaacactaatgttttccaagtgaaagaaatactaatgtgatcatgacttttctcaggactaatgtgttcatgacttcattataatgattcacgcagaattctgtttaccattatttctctctttgtttttagttcttctgtgacatacacctgcactggtgtttatgttgtttgtctctctttgttcatgtctaatgctgatatatttgaaggcataattcttatagatgatctgcacagtccactgttgttcattctcctgaataagccctgctgtttgagttgc

SEQ ID NO: 98876 - DNA, 311 bp, Zea Mays
tcacatccggtcgaccggtcgttttggtggaacgggagcatttcaactatttatgaatgtcatcccaagccaggcttctttgctttgtggtgactgccattgcaaagctagcaacatgccatattgagttgcttcgggaagcacgggtgtcattgggtaagtttgctcgttcccgaacctcagacaggagagtctggcaatgggcctgtgactatttagggctcatgaatgaaccagccatctgtttatcagtactgggaccgtccactgcccaaggtaatggtcctggtgttgtgcattggcgtggagga

SEQ ID NO: 98877 - DNA, 1002 bp, Zea Mays
ccatctgctccctttatataggagcaagtcttaaagaaatggagctcatgcactctgatgacctaatctatgtgtgaacagtaactggagatagatgatacctctctctctccagacttctcagttcccaaggaaaaagctagctaatccttgcaggatcagtacatacatattgcagacatggcccttctgttgtagtacttctctaatcctagtactgaccagaccaagacctcaaatcaaacgaagaaaaatttacccagaagccagacttgcaagatcgagagcgccaaaaaaaaaacaagagaacaacaagttctgatttttccaaagaaaagagagaagcagctaaaaacagtcttttgaactcaacaagctagcccaaaaaaagaggcagaaaactgattacctggccgagcgaaagcgccgacgaggacccatacgccgcggcgctgttccggacgatcatcggcggcatgtgcctcgccgggatcatcatttctccctctcagaacctctcgaaccctaattcctgccgcctcagtagcttctttccatttgttcactggcacatgcgtagtatctatctcccgcctcacggacaaagaacaggcggcgccaatcctattcctatatggagatgtataccttgcctgccaagtaacaacacgaccaacaacagatctagcgatcgacaaggtagcccagacaaccttcgctgcgagctgacgactggcagtgagatctagcagaagagctacatatgttcgtgtgcctatgcaaaaatagaactccgatcgatctctggctgcatgcagctctcaaggcgtgcgtgcagcaaaaactttgcaagctcagaagggtagctagcaggaggtggcgagataagccgggaggagactagcttgagaagctataggcggccatggaaggggaggcgaggaggaggaggaagaggaggagaggaaaggggaacgggcggaggtggaagagaatgtggag

SEQ ID NO: 98878 - DNA, 285 bp, Zea Mays
atggcgccttttggcctccagatttgtccgcaaattcagttcatcagttggttcgccttctctccagatctccagtacacacacccgaacgtgcttccacaagatcgcctcgcctgcatgcccagtgccagtgacacccggcttctcctctcctccatttcaattcctcacttcaaagacgctgcacgcctgcctgcctgcctgcgcgctggggggctcactgtcactggtcaccgtcaacactgcatcaatcttcgggcatgtgtgcatggacccatatactga

SEQ ID NO: 98879 - DNA, 4243 bp, Zea Mays
tgtacatgtacatatgcgtgcgctatactatatacgaatagcatagagccagtcaataacacacgcaactcacaagaagattctcagggagggatttctcaactgtattctactcgcaaacagtttaaatatacatactcatgtgctgctgccgctgctaccgactagtcggttcatccactataggagtaataggacctgtatatatatccacagactctagcgaacgttcttcactcccatcccatattcccatccggaaaacaaagcagcaccagcacaacagatcgatagcaagagctgccgctgcaactcctactgtttcttccggccgggcactaccggtcagaacaatggataacaaatcagcctcctcctcgtgcgtcatcaccccggcggccacgtccaccatgtcatcagccggcggcgagagcagctgggccgtgcacatcgcgaacttcctggcctccatgccgcaagacgacatcgcaacgacggatgatccgcaagcggcggtctctggcggcggcggcagcttctcttcttccttcgattcctttggcgacgccgacgcctcctcctttatcacgtctcagctcatgtgcggcggcgacgacgacgagtccctacaggacaccgcctgctcttctgcagctggccaaaagatggctaccatggagagtttcggcttgaagcaaatggcagccatggatggcgcgaaagagtccaacatgccccaccacctgcagctcatggccaagtacgtggaagctgtgggttcaaaacagcaggtgactggcgtgggggatcaacaagccatcaacagttcaagtaatagcgagaaggcgctgctgtgtgagagcaatgagctgaggaagagagggctttgcttggtccctatctctatgttgatagactatctcggatgattctttctcatgtatagtataccaccagcagtatattcaatacagcgcgctgttatggttcatacatcacgcccttctgtcagctgacagggacctactccaatatagctagctgttgagctgtctggtcatatatatacctttcaaataaaaggacaaattaaaacatatatccaactactattgggaaacaacaacaaaaaagcaaagcaggtattaaagttgacgcactgaggaaaaacttcgtatagcggaccatactaagggttgatttggtgatcagggaattggaggagatccatggggaggaatctccttgttattcaattttaaatagcaaggggatttcttcccatgaatcccctccaattcactggtcaccaaaccagccctaatgtttcggtaaaccctccagtgcaattatttgtcagcttccattccatgcaagtaactgatgaaaacatatgtacctcgtctcagcgattagtagatcaacataacagcttaattagcgctagggtgtgaactaacaaaacgagcagtttaagaaagtaattagctgcaaggctcagtcgaccagtctgcagtccacatggatagagggatgattcccttacgttacgtctgtccacactcagtagttgtatgtatggtgaccaacgaactagacgcgagctgtaataatactgacctcatgtcacgaggaagctagcagttctttaatgagtggctgatgccaaaaaacccgctcaatcagtcagaataagcacaaggggcatcgctgaccttccagaaatactaagtcctgactaaaccaaaacaagcaattaataataagtgctcatcgaattagttcagttcaataattttacataccttctgcagaggttgcaactagccaacgtacgtacttctgtagcagaataagatatttgcatgtgctatcacagggagacagttagcatccaccgagtggacctggaattctggacagtgcaagaatattctgctcagtgctcctgaaccgtatggtgcatttctcattttataggacgtgagtgcagtagagacacgcttcacattaaccttaattatttgagaatttacaatatttccgaatctctgatggctcagaatgagggtgggcaactggccatctgcacctatgctcacgatgtattttccgttttttgaggtctttgaaaaaacattgagcttttttttcctgaaaggaatgtgtgtgtacagtatactaactactgaaaattagctcaaaatatagcaaacaagtgcatctctttaacattttagtgcggcatggattgtgaagacaaatacatggcacatttctgtgcatttgtgatctgtcaatgcacaagatgcttataatactgactgtagctggctggaaaaggcacggttattttatttgtcaagtcgtgactatttttctatttcattatatagccctactccctagtgtttccaaatagtcactctccatagaggaactcattggataataagtctttattaataaaaggccacttggcatgtctgacccttatcctcagtattccatctattcgatggaacttttcagtgacaaccaagcataagtttaaacaccacagccgttgggcactctatcctaaatgtatctagacatagtgtaaatataagtgcatagcaaaaaaatgctttgtatatataaaatccagagtgtaaatataagtgcatagcaaaaaaatgctttgtatatataaaatccagagtgtcttataactttgaatagatggagtatatatgtatcaagaaaagctaaaacgacctacaattttggagagagtaatacataaccacctccaaaatgtacatggtaataaccggcttagaactgaacttaaagttccaaatatacgaatattgtgaagtttaggagatatttaataaagtggaaatgtatcgttcaaaaatgaggaaaatgataaatgggcaaggaaaagaaggtaactatgtttcctttaactgaaaaattattcagggcacatgccaagttagactcgaactattggctagttccaagttgtagaacatcatgcatatgattcttctccatctcaatagaattcatggttcattgccacattactactggttgggtaatggaatagtattactactaggtgaccttgatgaacatgcaagtgagaatctaattaataattacagtacagggcagtgacagctgacgatgtcgaacagccgttgcaaaatttcctcgcataatcgatcaaataggaaaaaggtttacctacttccttcttctagttaacctggcgacagaccaccataatattccagacaacagtagtatgatatacggaggagggcaggttcacagaatgcggcagttccgggccaaccagaagcatttggagtgggcaacggctatacggatcagcagctccgaaacagacaaggacctatcacctatatgtgttggaactgctgcaaaatcatgcgcataaaacaaaggaagaaagccttgcagtagttagaacttcgtaaccttgtgcttgtgcatcgtttgaacgaatctcgatcccctcgcaagttgctccaggctttgtacttttctgggggcgccgcgcaccgctggagcctgccgccgacgcgcgaccatacgcgctggcacatgagtatatatcccactgccgcaacgccaacgccgcccgtcgagcggcggagcggttatccaattgcaacatgtaattgtctttccaaatgtcttggctctccacgcaaaattttagtccctccacgtccccactcgtcgaaaccctagtttttagcaagttgctcgccaatctgcaagtttggtggcgggaacaagtggcagcaactaatcgaggtcgtctcatggcgataccacgcgaaaaaaagaagaagaggacatgggggaagaaaataggatttactgctaggagcgttagtgtggaactcacttacgcgcgcccagagatttccagaagcagtgggtggagtaccacgcgacggagggaacgccggcggcttggcgcgctctggttctccgcaagaccgcaagtccgcaagattccggcgagagagaagcaaagggaggggatttgggccggccgggccacacgagcctggcccatcaaaacaagtcgacatgggcgggcgctagcagctccaaaaggtcactaaggtctaagggcgaggctccaaaatgctcgggctccgattttcttccaattgcattggctctggcaacggagccactttcttgc

SEQ ID NO: 98880 - DNA, 993 bp, Zea Mays
ctgctgccgctgctaccgactagtcggttcatccactataggagtaataggacctgtatatatatccacagactctagcgaacgttcttcactcccatcccatattcccatccggaaaacaaagcagcaccagcacaacagatcgatagcaagagctgccgctgcaactcctactgtttcttccggccgggcactaccggtcagaacaatggataacaaatcagcctcctcctcgtgcgtcatcaccccggcggccacgtccaccatgtcatcagccggcggcgagagcagctgggccgtgcacatcgcgaacttcctggcctccatgccgcaagacgacatcgcaacgacggatgatccgcaagcggcggtctctggcggcggcggcagcttctcttcttccttcgattcctttggcgacgccgacgcctcctcctttatcacgtctcagctcatgtgcggcggcgacgacgacgagtccctacaggacaccgcctgctcttctgcagctggccaaaagatggctaccatggagagtttcggcttgaagcaaatggcagccatggatggcgcgaaagagtccaacatgccccaccacctgcagctcatggccaagtacgtggaagctgtgggttcaaaacagcaggtgactggcgtgggggatcaacaagccatcaacagttcaagtaatagcgagaaggcgctgctgtgtgagagcaatgagctgaggaagagagggctttgcttggtccctatctctatgttgatagactatctcggatgattctttctcatgtatagtataccaccagcagtatattcaatacagcgcgctgttatggttcatacatcacgcccttctgtcagctgacagggacctactccaatatagctagctgttgagctgtctggtcatatatatacctttcaaataaaaggacaaattaaaacatatatccaactactattgggaaacaacaacaaaaaagcaaa

SEQ ID NO: 98881 - DNA, 581 bp, Zea Mays
gcccgtcgagcggcggagcggttatccaattgcaacatgtaattgtctttccaaatgtcttggctctccacgcaaaattttagtccctccacgtccccactcgtcgaaaccctagtttttagcaagttgctcgccaatctgcaagtttggtggcgggaacaagtggcagcaactaatcgaggtcgtctcatggcgataccacgcgaaaaaaagaagaagaggacatgggggaagaaaataggatttactgctaggagcgttagtgtggaactcacttacgcgcgcccagagatttccagaagcagtgggtggagtaccacgcgacggagggaacgccggcggcttggcgcgctctggttctccgcaagaccgcaagtccgcaagattccggcgagagagaagcaaagggaggggatttgggccggccgggccacacgagcctggcccatcaaaacaagtcgacatgggcgggcgctagcagctccaaaaggtcactaaggtctaagggcgaggctccaaaatgctcgggctccgattttcttccaattgcattggctctggcaacggagccactttcttgc

SEQ ID NO: 98882 - DNA, 1784 bp, Zea Mays
atgtggggtcctcttacatacctgctcgccggggaggaagtcccgtttgctgatggcggagtggtcgccagtgccgccgccggtagcaagcgccgccatcctgttgttaggcctctaacacacatataatatagtgctcatgaaatactgatccccaggcacacacgatcgactagtttaactccaagctagctagcaggccacatgcatgcatggtggacatgatcacatcacatctcgaaaaataaagaatgcaacttcaaggctgtacgtacatcttggcttctctatctgtagccacaatatataccagtatacatacactgaagaaaatgcatggctgcaggcttactgtcatttatgtgcaagccaagcaactgaactataaagcaggccggctgcaacaagttcgagtcgttcaccccacaaatcagcaagcaagagagcaactaaccctaccctaccctcgcattaatcatcgtcatggtctccaggcttctcttcggactcgtcgtccttcctctctccctacaatattcctcatcggcgctatccaatccaccagaagagttcggcggcggcgggctgcaacaaccctcgccgccgccgacgtcgtcggggctgcgggtcggattctaccagtacacgtgcccgaacgcggaggccatcgttcgcgacgagatggccaagatcatctcccgagtcccgagcctcgccgggcccctgctccggatgcacttccacgactgctttgtgaatggatgcgacggttccgttcttctgaacagcaccgtgccagggctgccatccgagaaggaggcgataccgaacctcaccttgcgaggcttcggcaccgtcgaccgcgtgaaggcgaagctggagcaggcctgccctggagtggtgtcgtgtgctgacatcttggctctggtagccagggacgtcgttgtgctgaccaaagggcctcactgggatgttccaacagggcggagagacgggaggagatcggtgaagcaagatgctctggacaacctccccgcgcccttcttcgacgctggtcggaacctgtaccagttcttcatccccaagggcctcgatgccaaggaccaggttgttctgctaggagcgcacactctggggacctcccactgctcgtcgttcgcggaccggctgtacaacttcagcggcacgacggcggcggacccgtccctggacaggcgctacctcccgcggctgaagagcaagtgcggcagccccggcgacacgacgacgctggtggagatggacccgggcagcttccggacgttcgacgcgagctactaccggcgcgtcgccaggggccggtcgctgttcgcctccgaccagacgctgatgaacgaccccgcggcccgggcctacgtccagcggcaggccggcgccggcgccggcgcctaccccgccgagttcttcgccgacttcgccaagtccatggtgaagatgggcgccgtgcaggtgctcaccggcgcgcagggggaggtccggaggcactgcgccgccgtcaactagctagcgcgcgctgctagccggacgccagctgagatgcatgcatgtatattacgtcgtatatatgtagctccatctccgttgctttgcttaatcattagagtactgatgtgatgcatctgtaaggaggatttgttggtgattattgcgtattaattaggtagtgctcactttttatttcttcccatgcatccatgtgtagaaactgctaataaaggtgcatgtgaaatcagctcgtttacaat

SEQ ID NO: 98883 - DNA, 846 bp, Zea Mays
cccactcccgcgttaaacacccgccatccgcctcagcagcattcggcactcacttctgaagaatgacagccgtggccctggcgctgcccacggacgacgacaaagacggcggccgccgaggcgtcgaccactccccgacggctcccgcgccccctcctccgccgccgccgccccaggagctggtcatggtggcgcgcgccgtgcagcggctcgtggcgcggaacgacgcggtggtgccgccggcgccggacgggcgcggaggaggccggagactcgggatgcgggcgttcgaggcggcggagggcgcggcggcgccgcgcatcggcgtgcccgagtacctggagcgcgtgcaccgctacgccgcgctggaccccgagtgctacgtcgtggcgtacgcctacgtggacatggccgcgcaccgccggcccgccgccgccgtcgcgtccaggaacgtccaccgcctcctcctcgcgtccctcctcgtcgcctccaaggttctcgacgacttgtgagcgcctttaaatctcttcctctcgttcttatgtttcctaccaaaacctgcacgtacgtacacggtgtctgcgtgtgtctcgagctccagattcgttctagacgtggtgatatattctcgtcggtgaccttgatcgaagacggccggagtacaaatggaatggattcgggattccaaaccactttatcttcagcatcaagagctgtcaatgcataacaacatcagtagcatgtgtatactagcctagctagtaggataacgtcaagtgcagagcgcgccaccacgaccacgataaaaaaaatgagaagaactacacactgcagaaacaaaaaaaa

SEQ ID NO: 98884 - DNA, 1107 bp, Zea Mays
cccactcccgcgttaaacacccgccatccgcctcagcagcattcggcactcacttctgaagaatgacagccgtggccctggcgctgcccacggacgacgacaaagacggcggccgccgaggcgtcgaccactccccgacggctcccgcgccccctcctccgccgccgccgccccaggagctggtcatggtggcgcgcgccgtgcagcggctcgtggcgcggaacgacgcggtggtgccgccggcgccggacgggcgcggaggaggccggagactcgggatgcgggcgttcgaggcggcggagggcgcggcggcgccgcgcatcggcgtgcccgagtacctggagcgcgtgcaccgctacgccgcgctggaccccgagtgctacgtcgtggcgtacgcctacgtggacatggccgcgcaccgccggcccgccgccgccgtcgcgtccaggaacgtccaccgcctcctcctcgcgtccctcctcgtcgcctccaaggttctcgacgacttccaccacagcaacgccttcttcgcgcgcgtgggcggcgtgagcaacgcggagatgaacaggctggagctggagctgctggacgtgctcgacttcgcggtcgcggtcgaccaccgcgtgtaccgcaggtaccgcgagcacctggagaaggagacgacgctgatgatgctgcgcagggacgacggccacggcccgcccgtgcccgtgcccggcagcggcgcggcgcccaccaagtcgagaacggccgcgtcgtcggtcgtcaagccgccgctgacggaggatcgtcgccgcccggccgaagctggcgacgccgacggcggcggcgaacacgacgaccggcggaagctgcccaacagcgcgacggcggcggcgtctcttcgagagctgtgggccttcgattactagccgtagattgttgcatgtccaagctgaagcctgcagtgcaggcaaagagtgtgtcgtgtgttgtcgtgcgtgctaatccaacgacaggtagtgtaactggatgaaatctcaagctgttgagcgtcattgacgtactgttcatcgaattgaaaactatactagttgcctagttcacaatctattcctagctacctga

SEQ ID NO: 98885 - DNA, 781 bp, Zea Mays
gactgcaaattgcgcgtctcctccgcccttaatcctgacaaaaggaaaaacgcgaagcagagctccctccctcctctctcctcttcttcttcgtcgtggtgttggtgtggggcatctcgcaccccacccatccctgtcctcccgctcgccggtgcgcgcgcttttctagggtttccgctgccccagccgccaatcccgctcacctctcgtcaccggcgatggcgtcggcgtcggtgtcggccccggtggcaggggcaggggccgggggcgggaaggacgaggagctcgccgatctggtgcggcgcctcatggacgccctcgctcgctacgctgatcgcctgcccttcgaccttgatcgccaggttcgcgctcggatctgtgatctccacctgcggtctgttgacgcctttttgaccagtccatgcctcgttgcgtgggatttgttgggtccggccgcccaaagacgccgccttgtttgggaaaggctttattctgagtactattgtctaggtagtgttgtgctgttctcgggtaaaattctaggttcccaatcatcgtcgatatagtaatgtttttttttgttgttgtcgcggatgcttgggcttcgaatgtataagtcgattagggtttaaggttctttgccaaattgtaaacttatacatcaaaatcacaggatacgaagggtttgggggaatatatggaagcaaagaacacaacaaaaattcagatgttatatgcttccgtaaaccctaaatcctaaccatatgtgtgtatatatata

SEQ ID NO: 98886 - DNA, 1435 bp, Zea Mays
gactgcaaattgcgcgtctcctccgcccttaatcctgacaaaaggaaaaacgcgaagcagagctccctccctcctctctcctcttcttcttcgtcgtggtgttggtgtggggcatctcgcaccccacccatccctgtcctcccgctcgccggtgcgcgcgcttttctagggtttccgctgccccagccgccaatcccgctcacctctcgtcaccggcgatggcgtcggcgtcggtgtcggccccggtggcaggggcaggggccgggggcgggaaggacgaggagctcgccgatctggtgcggcgcctcatggacgccctcgctcgctacgctgatcgcctgcccttcgaccttgatcgccagaaacttcgttcacttactacacttgctgcgatctcgatcacacttctgtttgcctggaaaatgttgagagctcctcaagagcaacctcggaggcctcgtaggagagctgccccatcatctagcaacaccagcactagatcgcgaccaggtgctttaaccgtagcagatgcttgttcatcagcagattcaagagcacacgaagcagtcaaccagcttttccagccagtaaatctgactcttgagcagcttgtcaggcataagctaagcgaagggcgaaggttcacatgccgcttgcttggtgtgattttagaagaaacagctccagaggagcttcagaaccatgtcacagtgaagccttccgtggtggaggttctccttgagattgcaaaattctgtgatgtgtatttgatggagcgcattcttgatgatgagagtgagggaaaggttttatcggccctgagtgaagctgggctttttggtggtggtggcttgataaaagataaggttctcttctgtagcacggagaatggccgtacatcttttgttcggcaactcgagcctgattggcatatcgacacaagtcctgaagttgttcaccaattagctaggtttatcaaatatcaactgcacatctccccgcagcgacctgaaagaatagcaaccaatgttttcaccgctccaagcttggaacagtattttggaggcctagaccagagataaagaggtcaaactccatccaggaaattggcggcggcggcggattagtgagaagggaggacgtcattgttttttcttttctctgctcgaatgatggaactcgttttttttcctgtatcatgtgtaaaagcctgtgctatgtaccagtaatccattgttgtgcgatatgtagtgcctcagaatctattcaagggaaaacatatgtagtagcatacttgtcgaatcagttgtgttaatgtacaactacaaccaaaatagcatagttgcaagtgccaacctccctgctattgccattcgctcttgtgtctgtttgtcacatcaagattcgctcttgtgttgtcacacgagtttgccga

SEQ ID NO: 98887 - DNA, 156 bp, Zea Mays
atggagggccggatctcctgtcttgcgttgggaaaaatatccggcttcgcggcggtctcaacccagccctcggcctgcgcggggccagcagagagagccgaggcagccaccatccttcgcccagcgctgggagggaaaaacaaaatcgacgggtaa

SEQ ID NO: 98888 - DNA, 1760 bp, Zea Mays
cgccagtctcttgtcacaccaaacacccagtggttcaggctggccaaagttatgagttatctgccctgtcctcccaaactaatctagtcccaggaaactaatttcaacacacaactggacgacggtgcgttgcgttggtggccgccggcgacgatgtcgtcgtccgcgggcgacaagaggaagaagacggcgtgcgtgaccggagggaacgggtacatcggctccgcgctcatcaagatgctgctggaggacggatacgccgtcaagacgacggtcaggaaccccggttcgattctccttctcctcctcccctcttttctttcgggccggttcagtgtttgtggtggttgctgctgctgttccggccggcgttgcagctgcgcaggatcaggaaacggcgtcttttgaactccggaacgcataataatagcacaagattgtgaacgattagatttctgatgagatggttgatggttcagcagcgccatagaaatcctacactttgctacttcagccaggcctaggcgcgcatgtgcctttactttactgtcgctgttggagacgacatggacaagaactcccacctcaagggcctgcagcagctcgggccgctgacggttctccgcgccgacatggacgaggagggcagcttcgacgacgccgtcgccggctgcgactacgccttcctcgtcgccgccccggtgaacctctcggcacaggatccagagaaagagcagatcgagccgtccgtccgaggcacgctgaacgcgatgcggtcgtgcgcgaaggccgggacggtgcggcgcgtgatcctgacctcgtcggtggccggagtctacatcaggccggacctgctgcaactgcgaggcgacgggcacgtgctggacgaggagtcctggtccgacgtcgagtacctcagagccaacaggccaccaacctgggtccggcgtccgatgatcgactctgctcccatatattctcgctctacgtcttttccttcgtgtcggccactgctaggacagcaccgtacaccagtttgatggtgacctggactgctcgctcgcactcgcaggggtactgcgtgtcgaaggtgctcctcgagaaggaggcgtgcaggttcgcgggcgagcacggcatcagcctggtcaccgtctgccccgtcatcaccgtgggcgcggcgccggcgcccaaggtccgcacgagcatcatcgacagcctctccatgctgtccggcgacgagcgagggctcgccgtgctcaagggcatcgagaagacctccggcgcggtgcagctggtccacgtcgacgacctctgccgcgccgagctgttcctggcggaggcggcggcggccgacgggaggtacatctgctgcggcctcaacacgaccgtcctcgagctcgcgcgtttcctggcacacaagtacccgcagtacggcgtgaaaacaaacctcgacggcgatgaacagcagctactcgagaagccgagggtgagggtgtcgtcggagaagctcgtccgggaagggtttgagtacaggcacaacacgctggacgagatctacgacaatgtggttgagtacggcaagtcgttagggattctgccctactgatacatagatgcccgagcttaattaagtacgagggcagcatatatgttatcggacatatacgagtcttggaaagtaattaaataatttatggagatatttttcattggaaaaaacagtgtgagagttctaaactagctcaaaattgagctgaaaa

SEQ ID NO: 98889 - DNA, 1468 bp, Zea Mays
gtcacaccaaacacccagtggttcaggctggccaaagttatgagttatctgccctgtcctcccaaactaatctagtcccaggaaactaatttcaacacacaactggacgacggtgcgttgcgttggtggccgccggcgacgatgtcgtcgtccgcgggcgacaagaggaagaagacggcgtgcgtgaccggagggaacgggtacatcggctccgcgctcatcaagatgctgctggaggacggatacgccgtcaagacgacggtcaggaaccccgacgacatggacaagaactcccacctcaagggcctgcagcagctcgggccgctgacggttctccgcgccgacatggacgaggagggcagcttcgacgacgccgtcgccggctgcgactacgccttcctcgtcgccgccccggtgaacctctcggcacaggatccagagaaagagcagatcgagccgtccgtccgaggcacgctgaacgcgatgcggtcgtgcgcgaaggccgggacggtgcggcgcgtgatcctgacctcgtcggtggccggagtctacatcaggccggacctgctgcaactgcgaggcgacgggcacgtgctggacgaggagtcctggtccgacgtcgagtacctcagagccaacaggccaccaacctgggggtactgcgtgtcgaaggtgctcctcgagaaggaggcgtgcaggttcgcgggcgagcacggcatcagcctggtcaccgtctgccccgtcatcaccgtgggcgcggcgccggcgcccaaggtccgcacgagcatcatcgacagcctctccatgctgtccggcgacgagcgagggctcgccgtgctcaagggcatcgagaagacctccggcgcggtgcagctggtccacgtcgacgacctctgccgcgccgagctgttcctggcggaggcggcggcggccgacgggaggtacatctgctgcggcctcaacacgaccgtcctcgagctcgcgcgtttcctggcacacaagtacccgcagtacggcgtgaaaacaaacctcgacggcgatgaacagcagctactcgagaagccgagggtgagggtgtcgtcggagaagctcgtccgggaagggtttgagtacaggcacaacacgctggacgagatctacgacaatgtggttgagtacggcaagtcgttagggattctgccctactgatacatagatgcccgagcttaattaagtacgagggcagcatatatgttatcggacatatacgagtcttggaaagtaattaaataatttatggagatatttttcattggaaaaaacagtgtgagagttctagactaaaggctagtttagaaacttaaattttctttggtattgtaggggattgaggtagaaattagttcatttcctttagaacccccacaaaatttccgatggaagcttgagtttctaaactagctcaaaattgagctgaaaagcacttttg

SEQ ID NO: 98890 - DNA, 1599 bp, Zea Mays
gtcacaccaaacacccagtggttcaggctggccaaagttatgagttatctgccctgtcctcccaaactaatctagtcccaggaaactaatttcaacacacaactggacgacggtgcgttgcgttggtggccgccggcgacgatgtcgtcgtccgcgggcgacaagaggaagaagacggcgtgcgtgaccggagggaacgggtacatcggctccgcgctcatcaagatgctgctggaggacggatacgccgtcaagacgacggtcaggaaccccgacgacatggacaagaactcccacctcaagggcctgcagcagctcgggccgctgacggttctccgcgccgacatggacgaggagggcagcttcgacgacgccgtcgccggctgcgactacgccttcctcgtcgccgccccggtgaacctctcggcacaggatccagagaaagagcagatcgagccgtccgtccgaggcacgctgaacgcgatgcggtcgtgcgcgaaggccgggacggtgcggcgcgtgatcctgacctcgtcggtggccggagtctacatcaggccggacctgctgcaactgcgaggcgacgggcacgtgctggacgaggagtcctggtccgacgtcgagtacctcagagccaacaggccaccaacctgggtccggcgtccgatgatcgactctgctcccatatattctcgctctacgtcttttccttcgtgtcggccactgctaggacagcaccgtacaccagtttgatggtgacctggactgctcgctcgcactcgcaggggtactgcgtgtcgaaggtgctcctcgagaaggaggcgtgcaggttcgcgggcgagcacggcatcagcctggtcaccgtctgccccgtcatcaccgtgggcgcggcgccggcgcccaaggtccgcacgagcatcatcgacagcctctccatgctgtccggcgacgagcgagggctcgccgtgctcaagggcatcgagaagacctccggcgcggtgcagctggtccacgtcgacgacctctgccgcgccgagctgttcctggcggaggcggcggcggccgacgggaggtacatctgctgcggcctcaacacgaccgtcctcgagctcgcgcgtttcctggcacacaagtacccgcagtacggcgtgaaaacaaacctcgacggcgatgaacagcagctactcgagaagccgagggtgagggtgtcgtcggagaagctcgtccgggaagggtttgagtacaggcacaacacgctggacgagatctacgacaatgtggttgagtacggcaagtcgttagggattctgccctactgatacatagatgcccgagcttaattaagtacgagggcagcatatatgttatcggacatatacgagtcttggaaagtaattaaataatttatggagatatttttcattggaaaaaacagtgtgagagttctagactaaaggctagtttagaaacttaaattttctttggtattgtaggggattgaggtagaaattagttcatttcctttagaacccccacaaaatttccgatggaagcttgagtttctaaactagctcaaaattgagctgaaaagcacttttg

SEQ ID NO: 98891 - DNA, 1586 bp, Zea Mays
gtcacaccaaacacccagtggttcaggctggccaaagttatgagttatctgccctgtcctcccaaactaatctagtcccaggaaactaatttcaacacacaactggacgacggtgcgttgcgttggtggccgccggcgacgatgtcgtcgtccgcgggcgacaagaggaagaagacggcgtgcgtgaccggagggaacgggtacatcggctccgcgctcatcaagatgctgctggaggacggatacgccgtcaagacgacgacgacatggacaagaactcccacctcaagggcctgcagcagctcgggccgctgacggttctccgcgccgacatggacgaggagggcagcttcgacgacgccgtcgccggctgcgactacgccttcctcgtcgccgccccggtgaacctctcggcacaggatccagagaaagagcagatcgagccgtccgtccgaggcacgctgaacgcgatgcggtcgtgcgcgaaggccgggacggtgcggcgcgtgatcctgacctcgtcggtggccggagtctacatcaggccggacctgctgcaactgcgaggcgacgggcacgtgctggacgaggagtcctggtccgacgtcgagtacctcagagccaacaggccaccaacctgggtccggcgtccgatgatcgactctgctcccatatattctcgctctacgtcttttccttcgtgtcggccactgctaggacagcaccgtacaccagtttgatggtgacctggactgctcgctcgcactcgcaggggtactgcgtgtcgaaggtgctcctcgagaaggaggcgtgcaggttcgcgggcgagcacggcatcagcctggtcaccgtctgccccgtcatcaccgtgggcgcggcgccggcgcccaaggtccgcacgagcatcatcgacagcctctccatgctgtccggcgacgagcgagggctcgccgtgctcaagggcatcgagaagacctccggcgcggtgcagctggtccacgtcgacgacctctgccgcgccgagctgttcctggcggaggcggcggcggccgacgggaggtacatctgctgcggcctcaacacgaccgtcctcgagctcgcgcgtttcctggcacacaagtacccgcagtacggcgtgaaaacaaacctcgacggcgatgaacagcagctactcgagaagccgagggtgagggtgtcgtcggagaagctcgtccgggaagggtttgagtacaggcacaacacgctggacgagatctacgacaatgtggttgagtacggcaagtcgttagggattctgccctactgatacatagatgcccgagcttaattaagtacgagggcagcatatatgttatcggacatatacgagtcttggaaagtaattaaataatttatggagatatttttcattggaaaaaacagtgtgagagttctagactaaaggctagtttagaaacttaaattttctttggtattgtaggggattgaggtagaaattagttcatttcctttagaacccccacaaaatttccgatggaagcttgagtttctaaactagctcaaaattgagctgaaaagcacttttg

SEQ ID NO: 98892 - DNA, 930 bp, Zea Mays
acacccagtggttcaggctggccaaagttatgagttatctgccctgtcctcccaaactaatctagtcccaggaaactaatttcaacacacaactggacgacggtgcgttgcgttggtggccgccggcgacgatgtcgtcgtccgcgggcgacaagaggaagaagacggcgtgcgtgaccggagggaacgggtacatcggctccgcgctcatcaagatgctgctggaggacggatacgccgtcaagacgacggtcaggaaccccgacgacatggacaagaactcccacctcaagggcctgcagcagctcgggccgctgacggttctccgcgccgacatggacgaggagggcagcttcgacgacgccgagctgttcctggcggaggcggcggcggccgacgggaggtacatctgctgcggcctcaacacgaccgtcctcgagctcgcgcgtttcctggcacacaagtacccgcagtacggcgtgaaaacaaacctcgacggcgatgaacagcagctactcgagaagccgagggtgagggtgtcgtcggagaagctcgtccgggaagggtttgagtacaggcacaacacgctggacgagatctacgacaatgtggttgagtacggcaagtcgttagggattctgccctactgatacatagatgcccgagcttaattaagtacgagggcagcatatatgttatcggacatatacgagtcttggaaagtaattaaataatttatggagatatttttcattggaaaaaacagtgtgagagttctagactaaaggctagtttagaaacttaaattttctttggtattgtaggggattgaggtagaaattagttcatttcctttagaacccccacaaaatttccgatggaagcttgagtttctaaactagctcaaaattgagctgaaaagcacttttg

SEQ ID NO: 98893 - DNA, 980 bp, Zea Mays
aattggagcatctgtgggctgtggcgtctgtgcacctcgggattcttcgtgtggaggttcaccggagcggcgaccaggaaggcgtagtcgcagccggcgacggcgtcgtcgaagctgccgtcttcgtccaggtcggcgcggaagacctccaaggacccgagcgcctgcaggtccttgagatgggaatgggatatcctccgtccatgaaaaagaggggaagttcaaagaaccaaaccagggttcctgaccgtcgtcttgacggcgtagcccttctccagcagcaccttgatgagcgccgaggcgatatacccgtttcctccggtcacgcacgccgtcctcatcttcctgccgccggtcgacatcgccggcgctcctcacgccggggctaggaagaggaggattcactcgctcgctcagcggaatttccaccacgagcgaacagacgaaacttggagagctgtcgcctcagccactatcgatgaatcatcatttgtttgagcaacactttgagtgcccactaagcaaggagatgatggatacggagtacagatcttgctggaacgggggcaggccagagagctcaaagttgcaaggcgcgtctctgtccaataatgcagtgcaatagacaatgtaaagttgccttgttgtagttatggttggccagttgtctcctgatagagattgtgattatgaagcgttttttcttagtttgtagtgtaaaatctagaacccattacacgcctcttgtgtcatggtttgtccgttcaaaaccatttatgatgtgacatgtgtgtaaacatgtggctcactttataccttttttaatgcaaaatggttacgcacaataaccacctaatttttcaataaaccaatttatagagacgttttaagttattttttatgtttaatggaatttagagaaatatcagattatagactgtttcaaatacatggcagttacacacaatgtttttatgcag

SEQ ID NO: 98894 - DNA, 1334 bp, Zea Mays
cagcaacctcaaaggctcaaactaccacctgttcacttgtcgccaatccatcagtgtcgggacaacccatcagagctagctagggccagctagcagcgatttatcctagctagctagcaagcttctcttcttcttgccctcgtcgatcgatcggtatggcggcggcggcaggtgaggagaggaagaagacggcgtgcgtgaccggagggaacggctacatcgcgtcgttgctcatcaagatgctgctggagaagggctacgccgtgaagacgacggtgaggcaccccgaggacaaggagagcaactcccacctggaggacctggagaagctgggcctgggccccttggaggtctaccgcgccgacctcgccgaggaaggcagctacgacgaggccgtcgccggatgcgactacgccttcctgctcgccgcgccggtcaactacacgtccaagaaccctgagaaagagctgatggagctcggcgtccaaggcactctgaacgtgatgaggtcgtgcgtcaagtccggcacggtgaagcgcgtggtcctgacctcgtcgacggccgccgtctccagcaagccgctggaaaacgacgggcacgggcacgtgctggacgaggagtccttgtccgacatcgactacctcaccgccaaaaggactggcctctgggcgtacccggtgtcgaaggtgctcatggagaaggcggcggcggagttcgcggcggtcgagggcgtcagcctggtgaccctgtgcccctccgtcaccgtgggcgaggcgcccgacaggcaggtctacaccaccgtccccgccatcctctccctgctctccggcgacgaggcggagctcaaggtgctccggggcatcgagcgggcctccggctccgtgccgctggtgcacgtcgaggacgtctgccgcgccgagatcttcgccgccgaggaggccgccgacgggaggtacatctgcaacggcgtcgacaccaccatcgtcgagatggcccgtttcctggcagacaagtacccgcagtacgacgtcaacaccaacctgtaaggatccatgaacaagaagaagctcctccgttccgagctagctccggattttagttgtttgcttgcatgccatgaatccatgaaaccatggatctgtttggttcagctttttctgaccagcttttctgaaaatctggctgtggggagaatctggctgtgggaagaatctgagtatcattacgattacgtgtggaggaaaataaagttgttcatagggctcaggatctagaaagtgacggattcctactattacaacgactcaaccgattatgtgtttatgttgattttg

SEQ ID NO: 98895 - DNA, 1228 bp, Zea Mays
cagcaacctcaaaggctcaaactaccacctgttcacttgtcgccaatccatcagtgtcgggacaacccatcagagctagctagggccagctagcagcgatttatcctagctagctagcaagcttctcttcttcttgccctcgtcgatcgatcggtatggcggcggcggcaggtgaggagaggaagaagacggcgtgcgtgaccggagggaacggctacatcgcgtcgttgctcatcaagatgctgctggagaagggctacgccgtgaagacgacggtgaggcaccccgaggacaaggagagcaactcccacctggaggacctggagaagctgggcctgggccccttggaggtctaccgcgccgacctcgccgaggaaggcagctacgacgaggccgtcgccggatgcgactacgccttcctgctcgccgcgccggtcaactacacgtccaagaaccctgagaaagagctgatggagctcggcgtccaaggcactctgaacgtgatgaggtcgtgcgtcaagtccggcacggtgaagcgcgtggtcctgacctcgtcgacggccgccgtctccagcaagccgctggaaaacgacgggcacgggcacgtgctggacgaggagtccttgtccgacatcgactacctcaccgccaaaaggactggcctctgggcgtacccggtgtcgaaggtgctcatggagaaggcggcggcggagttcgcggcggtcgagggcgtcagcctggtgaccctgtgcccctccgtcaccgtgggcgaggcgcccgacaggcaggtctacaccaccgtccccgccatcctctccctgctctccggcgacgaggcggagctcaaggtgctccggggcatcgagcgggcctccggctccgtgccgctggtgcacgtcgaggacgtctgccgcgccgagatcttcgccgccgaggaggccgccgacgggaggtacatctgcaacggcgtcgacaccaccatcgtcgagatggcccgtttcctggcagacaagtacccgcagtacgacgtcaacaccaacctctccggcggagatctccttgagaagccgatcgcgctccggccgtccaccaagctgatcaaggaagggttcgagttcaagtacaagacgctggagcacatctatgagaacatggtggagtacggcaaggccattgggatcctgcacaattgatgtgatgctgaccgatcctccgtgtgtgctttgga

SEQ ID NO: 98896 - DNA, 396 bp, Zea Mays
atgtcgaacttatcacaccatatagagttaaatgaatcatctgatctttgtctttttaaactactcgaggaagatacagaatatggagcatccttgcctccggtatcattctcttttgtcatttcctttgaactttcagctgctgttttagcaccctctccatttgcttggtctttattgtacactaggctgagtagatcccaaaactttataaccgtatgtctatatccttttgcttccttattcctctataaaaaaattgttacaaagatacatcaacaaataaacttggaattgaaacataaactaagctgcaaaaaatggaataaactactaggcaacagtagcatgtatgaccaatttgcaggtctaacttccttggcacaagatttttaa

SEQ ID NO: 98897 - DNA, 1014 bp, Zea Mays
atccagtgccagtcttccatcgcaagacggggaaaagtgagcacattcttgcacgaagcttgccgccgccgagctggggaggagatcttgcctaggtctagcgaggaggaggtcgatcgatcgattggctaggactctaggaggaggagctggttcataagcagacctaccgacccacccatcgactgtacttgttcgaggaagggatggccgatctgctgagcttcctgaagacgatcttggaggccgggttcagtataatgagcgcgctggagaaggctggccacaacgcggacgactgccgcaggatcggtcagctcctgcaaacactgagtgccatcgctaacgccaagtacctggaggacaacacgaccaaaggtctgaaggagaccctccagcgcgcgtccgagatcgtcaagacgtgcaaccgcaagaccttggtgagccgtgccttcaaggccaatcaaatcgccgacgagctgcgcggggtttgcattgacatattgctgaacctgaatacggtgctccttgccaacgtggccgacattaagaaaactgttacccacactaactcaatgttggcccaaattttggaaatatgtgctgctaatcccgatgttcgtctgctacggcaaaaggtatagttgtttttgttgtctgtaatcctgatgattgaataaccggccaattagttgtggctgaacgagtctagtgcctgacgcatgccagttcatgcggggcgagttcgagtctcaggggagtgcgcgagtgcttgcagatcgtgggatggcacggccagtaaacgcggcatggagtgcatgtaaacgagtcgagtctgtttattaattcagagcaatacaacagaaaaggctgtgagtaatacagcaccaaaaatcaccctgtctctaattcttcagtcgcttgaactcgccggaattcctggcagctgaactcgccggattttccaacaattggtatcagagggggttaaagtagaaatcacctccacgacga

SEQ ID NO: 98898 - DNA, 399 bp, Zea Mays
atggcccactttgccccccctctgcgtccgcccctgctcccgactcccaaggtcatgcccccacaccatcgtgagttcttgaggatggccgtccttgcttgcttcggtcgtgtatttgtccaaggagtttgccgtcagcccatcaccgatccacggggagacaattgcgcacagaaaatcaagctccgttgtccaaggagagcatgcggcgggcgtggggatgggcacggcggcagttgcaagggggcggcgggggtggagcgcatcccaggcggaggcaactgcgttgagggacgatggatacatcaagcgggaggcttagggcctgattggttgccgtatctaggcagcatggccgagcgagccaggcccgtggcagcctggctgtgcatcgcgtga

SEQ ID NO: 98899 - DNA, 319 bp, Zea Mays
atcaagcaagagataaacctcatatttcagataacattcgagaacatctaaaaacattggaccactttcagcactcttgctcccctcagctccacttttgttagagaagtctttcagttcattctatcagaagtccggctgatttacaaacaaaatagggaaacatattaatggatattgatatccaaaatgtaaaaacgaaatattatgaatggtcaccggttaccaggttacactctggaaagtaaagtttcattgtgtgacttagttgtggtcactccaagtattcaaaaacaagtgcagccagtaacctacctgc

SEQ ID NO: 98900 - DNA, 636 bp, Zea Mays
atggaactgtgcgaccggacttgggttgactcatgtcgcggctttgtcttggactgcggggctggtggaggccactggcgaggagacggcgaaggtgacgtcaaccatctttgggtgttgaggaagggtggatcagagccatggaggccaccagcgaggagacggccaagtgcggctgcggcaggaggcgacgcgtgggcgaggggcccttggccgccatgccgagcaaccccatcccctggatctggagacgacgacgtcctaactggacggcgtggtcacaatccgacctccacctcgacgaatccacccagcggcgagtctaggcagcgtgactccaggtccggcaacgggtcaccgggcgggggagtgtgtacctggacgaagagctcgatctcgctgccaatgcggacgagattcaggttggcgttgaagcggaagacgtggacgcggctgccggagctaccggcgtcaaagatgacggcgtacctgtctatcccgggcgctgcccatggtgccagcgggggagggggcgcggcaggactgctcggcagcggggactgcgggcgcggtgagggaggcgagcgcgctatggcagaacaaggcagtgtgcacgcctacactgctaacatatag

SEQ ID NO: 98901 - DNA, 437 bp, Zea Mays
tgggcatcttcggcatggcggcgacgtacaacctgctgttcatctacacggcggagctgttccccacggtggtgcggaacgcggcgctggggtgcacggcgcaggcggcgcagatgggggccatcgtggcgccgctggtggtggtgctcggggagaggctgccgttcgcggtgttcggcgcctcgggcatcgtcggcggcctgctcgtcttctacctgccggagaccatgaacaagcccctgtacgacaccatggcagggctggaggaaggggagaagagcgtcatcaagtgagaggatcggtctagccgtccaggtgaactgcacaaagcgctgcgtcctcggaatgtgcatgtccacagtccactgttactggagactgatcttgtgaataatacgtttcgtttcgatacattacaaacgaggtatatacatgca

SEQ ID NO: 98902 - DNA, 1109 bp, Zea Mays
cttcagattctcgacagtccgcgttaaataggccgccccgctcgccttccactcctcgttcccacacccctcaccgcgtccgcctcccctaccatctagggtttctagggttttcgaggaggaggaaatggcgtctgatagggtgctcgggactgtgaagtggttcaacggaaccaagggcttcggtttcatcacccccgacgacggtagcgaggacctattcgtccaccagtcctccatcaagtccgacggctaccgcagtcttaacgacggcgatgccgtcgaatacaccgtcggcagcggcaacgacggccgcgccaaggccctcgatgtcaccgcgcccggcggcggcccgcttgccggcggggaacgtcccgacggcggcaacggcggtgggcgaggcggatacggcggcggcgaccgcggttacggcggcggcggtgaccgcggctacgggggaggaggcgaccgtggctacggcggcggcgaccgtggttacggtggaggtggcgaccgcggctacggcggcgaccgtggctacgggggaggcggcggctatggcggtgggtacggtggaggcggcggtggaggcggccgcggctgcttcaagtgcggcgaggagggccacatggcaagggactgctcccagggcggcggctacggagggggaggcggcggcggccgcggcagcgagtgctacaactgcggccaggagggccacatctcccgcgactgccccaacaaaaggcgttaggcgcggcgccaccgtcgcgtcggatccggcggagtcccatgtcgcctctcgccgcttccctacccctccaaaggtatcgctcggctgactcttgcgtgaagtcgtcggagcaaactatctatcagtagtactagcagtgtcgtttcgttttggtctgtcgtggcgtggtagtaagaaatgcaagtgagcagcaccagtatctttccgtttgaatcagttgtaaggcagtcatggtcatggttggctctgccggatctatctgtcatgaactatctatattatatcattatcaatgttatgcaatgagtctttggcattgagttaaggtaaaatactggaatgcctttgttgattc

SEQ ID NO: 98903 - DNA, 404 bp, Zea Mays
acgaccttacttgaacaggatctgttctataggatcgtaccgttgcacccttgattattaaggaggcaaggttgatgaaccatgacctgtgggccagagcgtgattaacggctattaaggaggcaaggttgatgaaccatgacctgtgggccagagcgtgattaacggccaggacctgcttgatgtctgtttccggagctgtagaggatcgttccccccttctggggtgggctcataggttgttgacaggttctcttttttttctcagcattgctcctcgtttttaagactaacgcgccttcttgttttttccatcaacagagcaagagctacagtttttttggcactcgagaagtttcttcaaatctgacttcatgcgattgtgcgacacacatgattctttc

SEQ ID NO: 98904 - DNA, 594 bp, Zea Mays
gttattgttgcttttttttttggtctgtaatttagctatgtcagaatgacggatcgatgattccaaattttcaattgataactgttgtgaaaacgtggagtatgaatagaatcgtatatccacggttaactaccatggaaaggttccagctggactacaatcatactaggaaagtagggaagagctgagcgcgtcaagaaggtaaagctagagcaggcacgaccagaatgaagcccacgcattaatattacacataataggacagcatatagcagaatgcagcggcccagtcccgccgattagcaccacctcgcttgctcagatgagggaacgctgatttaaaagcttggttctcgagcccggtaacacgaccttacttgaacaggatctgttctataggatcgtactgttgtatccttgattgataaggaggcaagcacttaaacctggttgatgatccatgacctgtgggtcagagcgtgattaacggccgccaccggctctgatgcctgtgtccggtgctgtagatgatcgttcctccgccagttctacctggctggggtggcccatgggttatctgacgggttgtctttt

SEQ ID NO: 98905 - DNA, 789 bp, Zea Mays
ttgctagctagccgcccttagcttcgcacgcgacatctatcatcggccaagaaacggagcagatcggtcggccgccgacatgggggatcacgctgagatgctgcatgccactccggccatgtacaacggcgccggcgctgcccctcgtggtggctggtggagtacggcggtgcccgcgaccacgtgctcgacggagctggccggcggcttcaccacgtggtcgtccgccctggctgctagctacgacctggcggcggagggggcaaaggccaacaagagcgccaccaccgcctcgtcggagtcgcccgggaacaacagctccgtgaccttccaagaaccggccggcggcgtcggaaccgccgtggtgcagcagcctcttgctggctgcgctgactggaggcatccctatttgagcagcggcgctgctactttgcatgggtttctgcaagatggtcaccagcaggacatgagctcatcgacaactgagcagagccccatggccgcatcaagcctcatgaacccttcatccaataacctagccctggccctgcaacaaggtcaccatcaccaagagccggaccaccagcagatgctgtccaacttcggcggctccgaggccgagctgctcctgtcgccgacgacctcaccctacgggttccagtcgtctctgctgagaagcctcatggagccgacagcggacgcggcgaagccggctttgccggggtaccagcagcagtatgaccagtaccagcagatgggcatgggccaggcgaggtcgtttgcaccggc

SEQ ID NO: 98906 - DNA, 505 bp, Zea Mays
gcgtcaccgcgtccccaacgcgaatcatccttcttccgtcaccagacagacggtagagagtcgaacaatcgccggctcgacgcccctcttcccgacgccgcacgccttcacggtcctcggccgccgatcttccagagcggttcgacaccgtgctcgccacggtcgacatcactgctgccgccgccgccgccggaaagttggcatcgttgtcgacctctttctccccttcttccacccaggaggcaacatgtcgtcgctcgccgctgcgagagcggataacttctactatccgccggaatggagccccaagaagggtgggctgaacaagttccatggccagcatgcgctcagggagcgagcgaggaagctcgaccagggcatcctgattataaggtttgagatgccttttaacatttggtgtggtggatgcaattccatgatagcgaagggagtaagatttaatgctgagaagaaacaagttggaaattattactctaccaaggta

SEQ ID NO: 98907 - DNA, 782 bp, Zea Mays
tcgaggtctgcagagacattgctgctgccagcagatgaagatcgagacaagcttgcggatcctatgtaccggcttgaacaccaggaagaggatcttcggaagaaaaaagaagctgagccagttttagttcgccttcagcgactctcggacagccggcactctgatgattatgccctgaacagagcactccgcgatcgtcttagggtcatccaatgaattcctataaattgatcaactatttccaccataggccatgcaatgatcacatttcttattcacctgtttgtgtttttatgtagagccaaaaaaagagagttgctgaagagaagaagtccgcgagaaagataggccttggtgtgcggctcttgcctccctccgcagaagatgccaccgcagcggcttcagtgaagtttgcatcgaaatttgagaaaagcagaagggataagagggccgcaatcaaagctgcctccatctttccggagtcatcaagctcagcatcacatggtaaacccgacctcgtgctgaagaggcggaacataaaagctggagccgctacagcactgatggcaggcagggtgaagccgtcctcgtggcagagcgccagttccacgagctcaaggactcggatgcctgttctggcagcacgcaagtaggcagctcgttgcctcaggctttgtgtgggaaatagggggcttgtgaaatatggacttgcccgtaatattgctatgtttctttggttgtactatactcacaaatatgacgccgttgacttttttcaaaaa

SEQ ID NO: 98908 - DNA, 912 bp, Zea Mays
tcgaggtctgcagagacattgctgctgccagcagatgaagatcgagacaagcttgcggatcctatgtaccggcttgaacaccaggaagaggatcttcggaagaaaaaagaagctgagccagttttagttcgccttcagcgactctcggacagccggcactctgatgattatgccctgaacagagcactccgcgatcgtcttaggagccaaaaaaagagagttgctgaagagaagaagtccgcgagaaagataggccttggtgtgcggctcttgcctccctccgcagaagatgccaccgcagcggcttcagtgaagtttgcatcgaaatttgagaaaagcagaagggataagagggccgcaatcaaagctgcctccatctttccggagtcatcaagctcagcatcacatggtaaacccgacctcgtgctgaagaggcggaacataaaagctggagccgctacagcactgatggcaggcagggtgaagccgtcctcgtggcagagcgccagttccacgagctcaaggactcggatgcctgttctggcagcacgcaagtaggcagctcgttgcctcaggctttgtgtgggaaatagggggcttgtgaaatatggacttgcccgtaatattgctatgtttctttggttgtactatactcacaaatatgacgccgttgacttttttcaaaaatttgaccactcgtcttatttaaagtactttttcaaaaatgttaaattttaaatcaaacacaaactaccaaacaaataaaaaaataaataataacttattattttttaaataagacgagtggtaaagttttttttttcaaaaaaaaaggtgtaatatatttatgaatggtagtacttttacggattgtctaaggggcgtttgttaattagtgttttcattgttttc

SEQ ID NO: 98909 - DNA, 739 bp, Zea Mays
aggaccccggattcttctttccaccgctgttaagctggctcgttgccattctgccattgtcccgacctgctggctgctgccctctaattccttttactccccgccgagcgaaacaaacggccttcttggtcgcctcccccatttcgccgctgggcgctggctcaccccactggctttctcaagtttcaagcccctgctgcatcttggccagttgaagatgagcagggcatcaatcaaaatcatcccagagtgctacaggtccatgcaccttttgctagattgtcctttcatagtattttacttcatcagatatgcattgataagttaaaatgtttagcatgatagattgtatctctctgcattgtggtggcttggttgggcagactagtgatggatcttgattctaatttcttcaagaggaaggatgctaggggtagcatgttgcttgcttactccatgtcaacagcaagcagatcgaagttgttcctgtggatgctacaagcaacacttttggatgcatgctactttgctttgcattttgtagcagaggataaagttgcaagtgaactaggttcctgaacccaaaacatgtggttgcaacagtagacatttgatctatgagagctttgacaagccaaacttgttgttgcctacttattacgatttgaaaggtgacaagtagactcattattgtgaccgattattggcgctaatggaaatatgacctacgctttggcta

SEQ ID NO: 98910 - DNA, 580 bp, Zea Mays
aggaccccggattcttctttccaccgctgttaagctggctcgttgccattctgccattgtcccgacctgctggctgctgccctctaattccttttactccccgccgagcgaaacaaacggccttcttggtcgcctcccccatttcgccgctgggcgctggctcaccccactggctttctcaagtttcaagcccctgctgcatcttggccagttgaagatgagcagggcatcaatcaaaatcatcccagagtgctacagaggaaggatgctaggggtagcatgttgcttgcttactccatgtcaacagcaagcagatcgaagttgttcctgtggatgctacaagcaacacttttggatgcatgctactttgctttgcattttgtagcagaggataaagttgcaagtgaactaggttcctgaacccaaaacatgtggttgcaacagtagacatttgatctatgagagctttgacaagccaaacttgttgttgcctacttattacgatttgaaaggtgacaagtagactcattattgtgaccgattattggcgctaatggaaatatgacctacgctttggcta

SEQ ID NO: 98911 - DNA, 662 bp, Zea Mays
aggaccccggattcttctttccaccgctgttaagctggctcgttgccattctgccattgtcccgacctgctggctgctgccctctaattccttttactccccgccgagcgaaacaaacggccttcttggtcgcctcccccatttcgccgctgggcgctggctcaccccactggctttctcaagtttcaagcccctgctgcatcttggccagttgaagatgagcagggcatcaatcaaaatcatcccagagtgctacagattgtatctctctgcattgtggtggcttggttgggcagactagtgatggatcttgattctaatttcttcaagaggaaggatgctaggggtagcatgttgcttgcttactccatgtcaacagcaagcagatcgaagttgttcctgtggatgctacaagcaacacttttggatgcatgctactttgctttgcattttgtagcagaggataaagttgcaagtgaactaggttcctgaacccaaaacatgtggttgcaacagtagacatttgatctatgagagctttgacaagccaaacttgttgttgcctacttattacgatttgaaaggtgacaagtagactcattattgtgaccgattattggcgctaatggaaatatgacctacgctttggctatttctgtgta

SEQ ID NO: 98912 - DNA, 2480 bp, Zea Mays
gctgtaagcctgtataacaaatgatccaatctttacatacatagctagctgacgtgcatgattccgtgtgcaacgacaaacatacatcgcacatggcggttctcaacctcctcgccttgatcattgccacgctactgctacttttcagaagaacctccggcgccggcatttcgccggcggacacgctcaacagcgggggcaacgtcaccgatggcgagacgctggtctcggccggtggcacattcaccctgggcttcttctccccgtcgaccacggtgctgaccaagaggtacctcgggatctggttcacggcgtctggtacggacgccgtcttgtgggtggccaaccgcgaaaccccgctaaacaacacctccggcgtcctggtgatgagcagccgggtgggccttcgccttctcgacggctctggccggaccgcctggtcctcaaacacgaccggcgcctccacctcttcggtggcacagctgctcgggtccggcaacctcgtcgtgcgcgagaagagcagcaacgccgtcttccagtggcagtcgttcgaccatccgcagaacaccttgctcgccggcatgaggttcggcaagaacctaaagaccggcatggagtggtccctgacgtcgtggcgggcgcaggacgaccccgcgacgggggactaccgtcgtgtcatggacacgaagggccttccggacatcgttacttggcacggcaacgccaagaagtaccgcgcgggtccgtggaacgggcgctggttcagcggcgtgccggagatggactcagggtacaagctgttctccgtccagatggtggacggcccggacgaggtcacctacgtgctcaacaccacggccggcatccccttcacccgcgtggtgctggacgaggttggcaaggtgcgggtcctgatgtggctgccgaccagccgggtgtggaaggaatacccatggctgccgcgcgacgcctgcgacgagtacacgtcctgcggcgcgttcggcctgtgcaacgtcgacgccgcgccgacgccgtcctgcagctgcgccgtggggttcagccccgtgaacgcgtcggagtggtccaggagggaagcctccggcgggtgccagagggacgtgccgctggagtgcgccgccggcaacgggacggcggtgacggaccggttcgcgcccgtgcacggcgtgaagctccctgacacggacaacgcgacggtggacatgggcgcgacgctggagcagtgcaaggcgaggtgcctcgccaactgctcgtgcgtggcctatgcccccgccgacatccgaggcggcggcgatggcagcggctgcgtcatgtggaaggataacatcgttgatgtccggtacatagaaaatgggcaggatctgtttctgaggttggccaagtctgaatcagctacaggggagagggtccgtctggcaaagattttggttccagtgatggcgtttgtgcttgcactcacggccgccggcatgtaccttgcttggaactgcaagcttagagccaagcgtcggaacagggataatttgaggaaagcgatcctaggatactcgactgcgccaaacgaactcggtgatgaaaacgtagagctcccatttgtcagccttggagagattgctgcagcaacaaataatttttccgaggacaacatgcttgggcaaggtggctttgggaaggtctataagggtacgctgggacagaacgtgcaggttgcaatcaaaaggctcggccaatgttcaggacagggcgtggaggagttcaggaacgaagccgtcctgatcgcgaagctgcagcacaggaacctggtcaggcttcttggatgctgcatcgacggagacgagaagctgctagtctacgaatacttaccgaacagaagcctggactccattatttttgatgctgcaagtaaacacctccttgattggccaacacgtttcaagataatcagaggagtatgtcgagggctcctttatctccaccaggactcaaggctgactataatccacagagacctgaagacgagcaacatactgctggacgcagatatgagccccaagatatcggatttcggcatggcaagaatctttggtggaaaccagcatgaagcgaacaccaatcgagttgttgggacgtacggttacatgtctcctgaatatgcaatggacggcgtgttttctgtcaagtcagacacgtacagtttcggcgtcatagtcttggagatcataagtggcctgaagatcagtttaacccattgcaatggcttccctaacctgctagcttatgcatggagcttgtggatagacgacagagccatggatctcgtggactcgtccctggagaagagcagttcctgcagtgaagctttacgctgtatccagatcggactgctgtgtgtgcaggacaacccgaatagtaggccgctcatgtcgtcggtggtgaccatgctcgagaacgaaaatgtgtaa

SEQ ID NO: 98913 - DNA, 591 bp, Zea Mays
caggttactgaagaaaacctggcggcactatttataaattgtggacatgttgtggactgtcgcatgtgtggagacccaaacttagtccttcggttcaccttcatagagttcactgatgaggagggtgcaagggctgctctgaatctatcaggaactgtgctcggatattatcctgtcagggttctgccatcaaaaactaccattgcaccagtcaatccaacattcctacccaggtctgatgatgaacgggaaatgtgtgcgaggactatttactgcacaaacattgacaagaaggtcactcaggcagatctaaaattgttctttgagtctatatgtggagaggtctttcggctgaggttgcttggtgactaccatcattctactcgcatcgcttttgtggaatttgtgatggcggaaagtgctaccgctgccctgaactgcagtggcgtgatactgggatccttgccaataagggtgagcccctcgaagactcccgtgcgtccctgtgcgcctcgccagctgatgcactagaggtgtcctaggtacaggaggtgtggaaggcactgcttatatatcatcatcatcatatat

SEQ ID NO: 98914 - DNA, 893 bp, Zea Mays
acggctcgccccacatctaccgcgtgccagccgccctcgctcccgttcagtccgtctcccccctctctccatccaaagcctacgcgccgccgccccgccaccgggcgcgccctcgttctcctacctagccgtgttctccaactgcccgctcgtcgccgcggtgctcaccttcgccatcgcgcaatccatcaaggtcctcaccacctggtataaggagaaccggtgggatgcgaagcagctggtgggctccggtgggatgccgtcctcgcactcggccaccgtcacagcgctcgccgtcgccgtcggcctgtaagaggggctcgccagctcgctgttcgccaccgccgtcgtctttgtctccgtggttggttaccctccccactccccctctccctttcgacaccaaaaaaacgcactgaccatctttggcaagctgtcgcccaccccaccccaaaaccctagctctattccatcgctcccgtactccctgttgcggcggttgagaacagtggcgacaagatctcatggagagaagctatgcggaccccaggaaaggtgaagtcgtcgtgcgatggtggagatggccgatgggaggctccaccaaccctagggtgcggccaacaagacgctactcgccactgcgtgggtcggcagtgagatctcagggagagaagccatgcaaccccatgaaaggcgaaactgtcgcacgatggtggagacgaccggcggtaggatgcaagtatgagcatttggcaaagagagtattcctccccatgctcccgctccctcctgcaccccacgctcgccgacgagccgctcgacctcgtcgcagcttgccgagccatcatgcgcctcggtgcggtggtcaacatcatccacgccgtcaatcgctt

SEQ ID NO: 98915 - DNA, 2585 bp, Zea Mays
acggctcgccccacatctaccgcgtgccagccgccctcgctcccgttcagtccgtctcccccctctctccatccaaagcctacgcgccgccgccccgccaccgggcgcgccctcgttctcctacctagccgtgttctccaactgcccgctcgtcgccgcggtgctcaccttcgccatcgcgcaatccatcaaggtcctcaccacctggtataaggagaaccggtgggatgcgaagcagctggtgggctccggtgggatgccgtcctcgcactcggccaccgtcacagcgctcgccgtcgccgtcggcctgtaagaggggctcgccagctcgctgttcgccaccgccgtcgtctttgtctccgtggcacaataagccacttcaggcttcagtctgttctgtgatcagcagaacattatgggctctaaaacaggaggacttttgaggtattttgatgccaaaatttttagacataccatcattgaagttgctctgatctgtacaacatttacaagatttacagagcttcaactaagtcaacttgttgagtcgcttgttacatatcttttgcatatgggaaaaaataatagataaggtacttggagttggcaaacaattgtttgatatacccttttcatatgcacttgttttttggttaccaacctgctagctaataacaagttttcactcatctctaccattttttggaatggcggcgtctcttcgctatatgtcaatcaaagaggtagtgtgagacacatattggcaactgaccaaatgacttcagatatttggggtctcatcgatgttcaaacagagaatgcacaaagtagtcagaaatggtaattatattgtcattgttgttgctggtagtgatgttacttgttctactatcacgaaggagaaatttgatccaattggtgggcctttgcctaaactttcacaagctaattccaagcaatgtgtctgaaatctttttcttgtgttggtaaccaccagatgcttgtcaattgtcaaacttattttggttggcttattttcaagattaaatgatctctggtaactgaggagaatgttgtagatgttgattttccttttaggaaggaatggaaaatgtgcatatatgcttctgattgcagtgagattagcctcgtccaagttatgggatctgccatgaactagacaagattataagtttacagaggccttacatcaagagagtacaagattgccataaggaagtaaagtctttgagaaaagtgaccttatgagaagcttgagaaaatcaacttgtgtgtgagaagttttgtctacttgtgctaattagtcatatgatatttttagtcatgaactagacaagatcagaagtttaaagaggttttacatcgagtacaagatcgccataaggaagtacaagtctttgaggaaagtgaccttatgaaaagtttgagcaaatcaacttgtgtgcgagaagttttgtctacttgtgctgatcagtcataccttggaatattgctgaattgttgcctttgttgctcattggcttcaatacttcatacaccatcaaatgagtcatgtgcaaaattcttcgaagcatcagttcttgctctagaagaacttcatcaggtgattactcttttgctttcctttattgaataattagcacatgtgcgttcaaaaaaattgccacatgaatgaaatgatatattctcgaattattctattgagtttttttgttttgatcacaacaccaccctggcgcgctagaggcggggtcgaatcagcaacgacggctgacatgacgctacccatccagttgctcactgctcaggttatagcgaagaacattgtcttagctggatacaaggagatgcagaagctctgagttttgaggatggatctatggatggttacactatcgcatttgggatcagaaatgtgacacacattgagaaagctctatcagaagcttacagttgatggttctaaagcaagggtggaggttcctatgcttggagttgagtcatgtggatgtccctatttttaaatagatttatgatgcttactcgttttctatgattccggctattggagagctggttgatggtgatcggcagatagaagacaggcaacatgctaaccaggcctgtgaaccttaaaccttggcaggaaaagtttgctcagatgattcaggaagccggattccagagggtggaatatgaaaacctcctgagcggtgtagttgccattcattctggactgaaactgtagagctgaatacagatggttgttttttcatgggtgcaccgattctacaattagtagtatttgttgttttttaatgaattctataataggttcggtggcttgtaaaagcagctggtgctggctgtcagcatcatcacaatatgtagaataagtagtatttgctagaagtatgtgctggagcagtagcgtcagtggctattttggcttttaagccagctgacctcttccatttgtaaagctttttcttggaaacgtgaaaccatccagaacatcaaattagtcttatcacatacctcctgcaatacatttttttgttctg

SEQ ID NO: 98916 - DNA, 2236 bp, Zea Mays
acggctcgccccacatctaccgcgtgccagccgccctcgctcccgttcagtccgtctcccccctctctccatccaaagcctacgcgccgccgccccgccaccgggcgcgccctcgttctcctacctagccgtgttctccaactgcccgctcgtcgccgcggtgctcaccttcgccatcgcgcaatccatcaaggtcctcaccacctggtataaggagaaccggtgggatgcgaagcagctggtgggctccggtgggatgccgtcctcgcactcggccaccgtcacagcgctcgccgtcgccgtcggcctgtaagaggggctcgccagctcgctgttcgccaccgccgtcgtctttgtctccgtggcacaataagccacttcaggcttcagtctgttctgtgatcagcagaacattatgggctctaaaacaggaggacttttgagatttacagagcttcaactaagtcaacttgttgagtcgcttgttacatatcttttgcatatgggaaaaaataatagataagaggtagtgtgagacacatattggcaactgaccaaatgacttcagatatttggggtctcatcgatgttcaaacagagaatgcacaaagtagtcagaaatgatgcttgtcaattgtcaaacttattttggttggcttattttcaagattaaatgatctctggtaactgaggagaatgttgtagatgttgattttccttttaggaaggtgaagctctccgatgtggtagggggaatggaaaatgtgcatatatgcttctgattgcagtgagattagcctcgtccaagttatgggatctgccatgaactagacaagattataagtttacagaggccttacatcaagagagtacaagattgccataaggaagtaaagtctttgagaaaagtgaccttatgagaagcttgagaaaatcaacttgtgtgtgagaagttttgtctacttgtgctaattagtcatatgatatttttagtcatgaactagacaagatcagaagtttaaagaggttttacatcgagtacaagatcgccataaggaagtacaagtctttgaggaaagtgaccttatgaaaagtttgagcaaatcaacttgtgtgcgagaagttttgtctacttgtgctgatcagtcataccttggaatattgctgaattgttgcctttgttgctcattggcttcaatacttcatacaccatcaaatgagtcatgtgcaaaattcttcgaagcatcagttcttgctctagaagaacttcatcaggtgattactcttttgctttcctttattgaataattagcacatgtgcgttcaaaaaaattgccacatgaatgaaatgatatattctcgaattattctattgagtttttttgttttgatcacaacaccaccctggcgcgctagaggcggggtcgaatcagcaacgacggctgacatgacgctacccatccagttgctcactgctcaggttatagcgaagaacattgtcttagctggatacaaggagatgcagaagctctgagttttgaggatggatctatggatggttacactatcgcatttgggatcagaaatgtgacacacattgagaaagctctatcagaagcttacagttgatggttctaaagcaagggtggaggttcctatgcttggagttgagtcatgtggatgtccctatttttaaatagatttatgatgcttactcgttttctatgattccggctattggagagctggttgatggtgatcggcagatagaagacaggcaacatgctaaccaggcctgtgaaccttaaaccttggcaggaaaagtttgctcagatgattcaggaagccggattccagagggtggaatatgaaaacctcctgagcggtgtagttgccattcattctggactgaaactgtagagctgaatacagatggttgttttttcatgggtgcaccgattctacaattagtagtatttgttgttttttaatgaattctataataggttcggtggcttgtaaaagcagctggtgctggctgtcagcatcatcacaatatgtagaataagtagtatttgctagaagtatgtgctggagcagtagcgtcagtggctattttggcttttaagccagctgacctcttccatttgtaaagctttttcttggaaacgtgaaaccatccagaacatcaaattagtcttatcacatacctcctgcaatacatttttttgttctg

SEQ ID NO: 98917 - DNA, 2474 bp, Zea Mays
acggctcgccccacatctaccgcgtgccagccgccctcgctcccgttcagtccgtctcccccctctctccatccaaagcctacgcgccgccgccccgccaccgggcgcgccctcgttctcctacctagccgtgttctccaactgcccgctcgtcgccgcggtgctcaccttcgccatcgcgcaatccatcaaggtcctcaccacctggtataaggagaaccggtgggatgcgaagcagctggtgggctccggtgggatgccgtcctcgcactcggccaccgtcacagcgctcgccgtcgccgtcggcctgtaagaggggctcgccagctcgctgttcgccaccgccgtcgtctttgtctccgtggcacaataagccacttcaggcttcagtctgttctgtgatcagcagaacattatgggctctaaaacaggaggacttttgaggtattttgatgccaaaatttttagacataccatcattgaagttgctctgatctgtacaacatttacaagatttacagagcttcaactaagtcaacttgttgagtcgcttgttacatatcttttgcatatgggaaaaaataatagataaggtacttggagttggcaaacaattgtttgatatacccttttcatatgcacttgttttttggttaccaacctgctagctaataacaagttttcactcatctctaccattttttggaatggcggcgtctcttcgctatatgtcaatcaaagaggtagtgtgagacacatattggcaactgaccaaatgacttcagatatttggggtctcatcgatgttcaaacagagaatgcacaaagtagtcagaaatggtaattatattgtcattgttgttgctggtagtgatgttacttgttctactatcacgaaggagaaatttgatccaattggtgggcctttgcctaaactttcacaagctaattccaagcaatgtgtctgaaatctttttcttgtgttggtaaccaccagatgcttgtcaattgtcaaacttattttggttggcttattttcaagattaaatgatctctggtaactgaggagaatgttgtagatgttgattttccttttaggaaggtgaagctctccgatgtggtagggggaatggaaaatgtgcatatatgcttctgattgcagtgagattagcctcgtccaagttatgggatctgccatgaactagacaagattataagtttacagaggccttacatcaagagagtacaagattgccataaggaagtaaagtctttgagaaaagtgaccttatgagaagcttgagaaaatcaacttgtgtgtgagaagttttgtctacttgtgctaattagtcatatgatatttttagtcatgaactagacaagatcagaagtttaaagaggttttacatcgagtacaagatcgccataaggaagtacaagtctttgaggaaagtgaccttatgaaaagtttgagcaaatcaacttgtgtgcgagaagttttgtctacttgtgctgatcagtcataccttggaatattgctgaattgttgcctttgttgctcattggcttcaatacttcatacaccatcaaatgagtcatgtgcaaaattcttcgaagcatcagttcttgctctagaagaacttcatcagaggcggggtcgaatcagcaacgacggctgacatgacgctacccatccagttgctcactgctcaggttatagcgaagaacattgtcttagctggatacaaggagatgcagaagctctgagttttgaggatggatctatggatggttacactatcgcatttgggatcagaaatgtgacacacattgagaaagctctatcagaagcttacagttgatggttctaaagcaagggtggaggttcctatgcttggagttgagtcatgtggatgtccctatttttaaatagatttatgatgcttactcgttttctatgattccggctattggagagctggttgatggtgatcggcagatagaagacaggcaacatgctaaccaggcctgtgaaccttaaaccttggcaggaaaagtttgctcagatgattcaggaagccggattccagagggtggaatatgaaaacctcctgagcggtgtagttgccattcattctggactgaaactgtagagctgaatacagatggttgttttttcatgggtgcaccgattctacaattagtagtatttgttgttttttaatgaattctataataggttcggtggcttgtaaaagcagctggtgctggctgtcagcatcatcacaatatgtagaataagtagtatttgctagaagtatgtgctggagcagtagcgtcagtggctattttggcttttaagccagctgacctcttccatttgtaaagctttttcttggaaacgtgaaaccatccagaacatcaaattagtcttatcacatacctcctgcaatacatttttttgttctgaaaac

SEQ ID NO: 98918 - DNA, 1090 bp, Zea Mays
gcatgaacttttctaatagattttgttgcctctgtctcaagtgtgggttatgttgttcaacagttggtttttatttccaggttatagcgaagaacattgtcttagctggatacaaggagatgcagaagctctgagttttgaggatggatctatggatggttacactatcgcatttgggatcagaaatgtgacacacattgagaaagctctatcagaagcttacaggtcggctaatttagaaccctaacaattattattgctcatgtttaaattattactgtttgaacttcagtatatgtgtatattcttcgtgattaagttttttttgtcttcgtgtgcagtatcatggattaagcttttttatattttaccatgtttgtttagttgatggttctgaaatgtcattactgtcatatcaattggcatatttcaaaattttttttgcttagttgatggttctaaagcaagggtggaggttcctatgcttggagttgagtcatgtggatgtccctatttttaaatagatgtaagtttcgtcaatcatgtttactcgtcaatctttaactgctctttcagattttctgcccttcttttttcagttatgatgcttactcgttttctatgattccggctattggagagctggttgatggtgatcggcagatagaagacaggcaacatgctaaccaggcctgtgaaccttaaaccttggcaggaaaagtttgctcagatgattcaggaagccggattccagagggtggaatatgaaaacctcctgagcggtgtagttgccattcattctggactgaaactgtagagctgaatacagatggttgttttttcatgggtgcaccgattctacaattagtagtatttgttgttttttaatgaattctataataggttcggtggcttgtaaaagcagctggtgctggctgtcagcatcatcacaatatgtagaataagtagtatttgctagaagtatgtgctggagcagtagcgtcagtggctattttggcttttaagccagctgacctcttccatttgtaaagctttttcttggaaacgtgaaaccatccagaacatcaaa

SEQ ID NO: 98919 - DNA, 243 bp, Zea Mays
atggcgaatctccagagaggagaggaacccaagagcgtcctattcctacatgatttgtcacaaattagcagaaactcttttgtcctcctattccttcatcgtcccaaactcccatcagaacaaggaatccccaacagaaagcttggaggggcattggcacacgccgcacatctcgatggcattatggcaaggccatacatcactggctgtcaggctcatcactccaacgcaagaacaagctaa

SEQ ID NO: 98920 - DNA, 2041 bp, Zea Mays
atgtcatcagaaactgcagctgcaccttctgaaactgaagcagctagagtgaatctcctaaaaagaaattcagatgatgttggatgggaatatggtgttcttgttgatgctaacaacaaagacaaggtgaagtgtaagttctgtgacaaggagatgaggggagggatttataggttgaaggagcatcttgcccatgttggaaagaatgtgaagaaatgcacgtctgcaacaccgcaggctctagaggctaaagagaagtgcaagaaagcaatagaggctgcaaaaaggaagagggaggagaagactgttcgtgagctagaacttagagaggaagtgaatgtatctagggttggagaggagtcagaagaagtcacttgtgttagaagctcacagcctcacaaattagggccaattgacaaatggacacgtgctattgatcctaccaaggctgattcattcaaacaacagcagctgaacaaggaattatggaaagaaagagagcatgaggtgcacaagtttattgcaagatgggcctataatcatggaatacctttcaatgcatgtgacaatgatgagttcaagcaaatgtgtgaagcaattggacaatttggaccaggacttacacctccaactcaagatgcctttcgaggtagtttgctggaagaagaatatgaaagaaccaagtgtttgttgcaggaacgtgaagccgagaagatgaaaaatgggtttgatgcaagtaccacgtgtttgatgcaagtagtcactgacaatgcctctaacaacatgggagcaaagaagctattgcttgagaagagaccacaaatattttggacctcttgtgcagctcacacaatcaacttgatgctccaaggaattggcaaattgcctcggttcaggaaagtgattgaccaagccttttggaaggatgtgaagctaatgttggctgtttttgagccattggtcaaagtcctccgtttggttgatggggatgtgaagccatccatgggtttcctttatggagagctactaaaggcaaaaagagagatcaaagaggcctttggcaatgttgagtttcgattcaaagatgttatggctgtaactgagaagaagatgaatggaagacttgattctccattgcatttgacagcttttttgctgaatccacactatagctatgctaacccatcaatatttgatgagcccaaaatgaatgaagccttcatatcttgtgtcgagcaattttattatcatgatgaggaccaacaagaacaggctgccaactttgaattgaaaaaatttcagaatagagaaggaccatttagcaagaagcttgcaagaacttttcaaaactatgattacaatccagcatcatggtggcagttatatggaactgaaacatcagctttacaaaagatggctacaaggatattatctttgacatcaagctcttctggttgtgaaagaaattggagtgggtttgaagggatacacactaagaagagaaataggctgactacaacccgcctcaacaagttggtctatattcagttcaataacaggctgatgaataacagagaaaagattaagtcaaagaaaatcactgatgttctcttgtctagtgatacaactgaagctcaaggttttctccaagagggtggagatgattgtgcacaagttgtctttagagatgaggaagatgagatggaaggtacagggataccttggtctgttattggagaggcagtgggagcagaagaacagcttgagccttgtagaagtgcaagagtgagagagctctatgaaggagaagagtttgagtctgaagaagaagagtatgaagatgaagatttgtgctatagtgaagatgaaatatgatctggaccatctccatctagtagtgaagccttttgtgatgccctggtcttatgaactgcagctgtgtcactttgtgtctgtgtgtcttcttttgtgtgagacctgaactaagaactatgtgcttgtgttgtcctttatttataaattgtgttctgcacttgtatta

SEQ ID NO: 98921 - DNA, 294 bp, Zea Mays
cttgtgtccatcaagtgcactctgcactagttctgaaatttcattgaatattgtttcctgtgaagctgtatggtcaaagactctatcacatgtgaaagaatattctgactctacataagaaaaagattaaaaatcaatccaacactttatttattatttaaatctcttattacaagcttaatcataaattataataaaaatatatgattaacctgaatgtgccaaacaaacacatcggccaatgcatccccttgtttcaggaaatgtgattctggcctatttgtgttctgtttg

SEQ ID NO: 98922 - DNA, 774 bp, Zea Mays
aaaactcttttgaacacgtctaagaatgtacggacaaggacctgctctgtttctcggcgagtttttcccacttccacctctccgtccctgccgagctgcggcggccgcatcgactgttagggcgaaaatccgttctagtctctcggcgattttcggcaggcggaggcagcaggatctgcgggaaggatttcgtgtcgagatggctgggcgcaaggaaactgcactcgacctggcgaagttcgtcgacaagggcgtccaggtgaagctcaccggcggccgccaagaacactaaaggaacatataaagtgggaaaacaaaacgaactagtactgttgtcatcattttgtgttctacaacgtggaatgttctatgcagtcatttacacaacctcttggcgtgcaacttccttttgtgttggaatcgttcatctatccatcttaggcatacttgagctagttgctgatgaatgttgacaggaactctaaagggatatgaccaactactcaacttagtgctagatgaagcagttgagaatgaaagagagcaagatgatccattgaagctatcagggaaaactagacaacttggcctcattgtgtgcagaggcacggcagtcatgctggtctcaccgactgatgggactgatgagatcgccaaccctttcctcgcggacggagcatagcttgcacccctcggaacaatatgtccctgtgggaaaagaaccggtttctcgtgtatctgttgtatcgtgtgcagctgtgcggcttattagtg

SEQ ID NO: 98923 - DNA, 886 bp, Zea Mays
aaaactcttttgaacacgtctaagaatgtacggacaaggacctgctctgtttctcggcgagtttttcccacttccacctctccgtccctgccgagctgcggcggccgcatcgactgttagggcgaaaatccgttctagtctctcggcgattttcggcaggcggaggcagcaggatctgcgggaaggatttcgtgtcgagatggctgggcgcaaggaaactgcactcgacctggcgaagttcgtcgacaagggcgtccaggtgaagctcaccggcggccgccaagtgacaggaactctaaagggatatgaccaactactcaacttagtgctagatgaagcagttgagaatgaaagagagcaagatgatccattgaagctatcagggaaaactagacaacttggcctcattgtgtgcagaggcacggcagtcatgctggtctcaccgactgatgggactgatgagatcgccaaccctttcctcgcggacggagcatagcttgcacccctcggaacaatatgtccctgtgggaaaagaaccggtttctcgtgtatctgttgtatcgtgtgcagctgtgcggcttattagtggtgtttaaatgcactagatctaatagttagtgactaaaattagttggagacatccaaacatcctagctatgagttcaattattagctatttttagtaaattagttaataattagctatctatttgttagctagctaaatccactagtatttttttagccaactaactattaactatagtacatttaaacaccccttagaatttagggacaaaatcagatctcacgttagggttgtttgatagatatatttagcccgtaagtttaaggggctgtttgaattcaaagttttttaatacta

SEQ ID NO: 98924 - DNA, 947 bp, Zea Mays
gtccgcatcaccatcaccacctatcgtcggagaaccacagaatccaccgcatcgcagagacgagtagaggttagatttaggctgaggtaagatggtgtgcatccggcaggcgaccatcgaagacctgctggcgatgcaggcgtgcaacctgatgtgcctgccggagaactaccagatgaagtactacttctaccacatgctctcgtggccgcagctcctcttcgtcgccgaggactacggaggcagcatcgtcggctacgtgctcgccaagatggaggaggacccctccgagccctgccacggccacatcacctccctcgcggtcctccgctcccaccgcaagctcgggctcgccactaagctcatgtccgccgcgcaggccgccatggaccaggtcttcggcgctgagtacgtgtcactccacgtccgccgatccaaccgcgctgccttcaacctctacacctctaccctcgggtaccagatccaggacatcgaggccaagtactatgccgatggggaggacgcgttcgacatgcgcaagctgctccggcagccacagcccaagaagcaccaccaccaccaccatcacggccccggtgggtgctgctcccacgacgcaccagttgcggcgactggttcttctccccagtcttctggttcacccgataagaaggctatcacttgatgtagggtaagccttttcctttcaagctctagatgttatgctctctactaacatattgctagtcaccaccgcgttttcggtgtgattatactgtgattttgtttgacagatcaaactagtagtttcgttgtagaatgtgtagtatgtaaatgtgcctctcctcacctttggtttcttgagaatgttcactctcaaggcagcccagtcatggaggcacatagcaattattggtgagtttaacgtggaagcttactgttttgtt

SEQ ID NO: 98925 - DNA, 1007 bp, Zea Mays
gtccgcatcaccatcaccacctatcgtcggagaaccacagaatccaccgcatcgcagagacgagtagaggttagatttaggctgaggtaagatggtgtgcatccggcaggcgaccatcgaagacctgctggcgatgcaggcgtgcaacctgatgtgcctgccggagaactaccagatgaagtactacttctaccacatgctctcgtggccgcagctcctcttcgtcgccgaggactacggaggcagcatcgtcggctacgtgctcgccaagatggaggaggacccctccgagccctgccacggccacatcacctccctcgcggtcctccgctcccaccgcaagctcgggctcgccactaagctcatgtccgccgcgcaggccgccatggaccaggtcttcggcgctgagtacgtgtcactccacgtccgccgatccaaccgcgctgccttcaacctctacacctctaccctcgggtaccagatccaggacatcgaggccaagtactatgccgatggggaggacgcgttcgacatgcgcaagctgctccggcagccacagcccaagaagcaccaccaccaccaccatcacggccccggtgggtgctgctcccacgacgcaccagttgcggcgactggttcttctccccagtcttctggttcacccgataagaaggctatcacttgatgtaggactcgtatctacagagaggaatcaccaagccaattgtactcatctttcctctcactgggtatacaatatagtagttgtagcggtctttccgtagtagaacggagaaagacctgtgcagtgagtatttgtgtacttggccgatggctcgaatcgtctgacctaatcagcgagaatggcaaccaaatatgcttcgtacttgaaacctgtgttgtttttagacatgtgcgaattttcacagttcatttgattggtgatgcctgacaatttggtcagatctgataccgcggaatatataatgcaagtttgaaacctgtaa

SEQ ID NO: 98926 - DNA, 1603 bp, Zea Mays
gtccgcatcaccatcaccacctatcgtcggagaaccacagaatccaccgcatcgcagagacgagtagaggttagatttaggctgaggtaagatggtgtgcatccggcaggcgaccatcgaagacctgctggcgatgcaggcgtgcaacctgatgtgcctgccggagaactaccagatgaagtactacttctaccacatgctctcgtggccgcagctcctcttcgtcgccgaggactacggaggcagcatcgtcggctacgtgctcgccaagatggaggaggacccctccgagccctgccacggccacatcacctccctcgcggtcctccgctcccaccgcaagctcgggctcgccactaagctcatgtccgccgcgcaggccgccatggaccaggtcttcggcgctgagtacgtgtcactccacgtccgccgatccaaccgcgctgccttcaacctctacacctctaccctcgggtaccagatccaggacatcgaggccaagtactatgccgatggggaggacgcgttcgacatgcgcaagctgctccggcagccacagcccaagaagcaccaccaccaccaccatcacggccccggtgggtgctgctcccacgacgcaccagttgcggcgactggttcttctccccagtcttctggttcacccgataagaaggctatcacttgatacaactccaagtcgctgctctccagggagaacctacttggagtcctacaatcaaatgagatctgaggcattttctgatatgtattttttgcgtgcactgtagttcttgtttaaattttcgctgatgttatgttcagctctttcttatctttcactgttacatttgaaagattgtgaaacttggacgccttcaattttcaccatcacagtagccaatgacgagttgtcccaacatgtgaggtgtaggtaactccaagccctgtttcagggagaacctacttggggtcctacattcaaatgagatacctgggcatttactgatgtttataaataaggcctaatgttttgtcttggtttgttgcatgcattattctgtttgagaattgttctttgatgactgatttagtatgcttaggtagctgtgtgttattgttcatgtaatgattatttgttgttgagatgtttatgccttttcttgtgtctagtgttttatcagcaaaacaaattactttgtggcactgccagtgatgatttgtctgcaaaatggatgtcctgtggactcaagtcccctgtttcagggagaacctactcgaggaaacatgactcgtatctacagagaggaatcaccaagccaattgtactcatctttcctctcactgggtatacaatatagtagttgtagcggtctttccgtagtagaacggagaaagacctgtgcagtgagtatttgtgtacttggccgatggctcgaatcgtctgacctaatcagcgagaatggcaaccaaatatgcttcgtacttgaaacctgtgttgtttttagacatgtgcgaattttcacagttcatttgattggtgatgcctgacaatttggtcagatctgataccgcggaatatataatgcaagtttgaaacctgtaa

SEQ ID NO: 98927 - DNA, 1608 bp, Zea Mays
gtccgcatcaccatcaccacctatcgtcggagaaccacagaatccaccgcatcgcagagacgagtagaggttagatttaggctgaggtaagatggtgtgcatccggcaggcgaccatcgaagacctgctggcgatgcaggcgtgcaacctgatgtgcctgccggagaactaccagatgaagtactacttctaccacatgctctcgtggccgcagctcctcttcgtcgccgaggactacggaggcagcatcgtcggctacgtgctcgccaagatggaggaggacccctccgagccctgccacggccacatcacctccctcgcggtcctccgctcccaccgcaagctcgggctcgccactaagctcatgtccgccgcgcaggccgccatggaccaggtcttcggcgctgagtacgtgtcactccacgtccgccgatccaaccgcgctgccttcaacctctacacctctaccctcgggtaccagatccaggacatcgaggccaagtactatgccgatggggaggacgcgttcgacatgcgcaagctgctccggcagccacagcccaagaagcaccaccaccaccaccatcacggccccggtgggtgctgctcccacgacgcaccagttgcggcgactggttcttctccccagtcttctggttcacccgataagaaggctatcacttgatgtaggacaactccaagtcgctgctctccagggagaacctacttggagtcctacaatcaaatgagatctgaggcattttctgatatgtattttttgcgtgcactgtagttcttgtttaaattttcgctgatgttatgttcagctctttcttatctttcactgttacatttgaaagattgtgaaacttggacgccttcaattttcaccatcacagtagccaatgacgagttgtcccaacatgtgaggtgtaggtaactccaagccctgtttcagggagaacctacttggggtcctacattcaaatgagatacctgggcatttactgatgtttataaataaggcctaatgttttgtcttggtttgttgcatgcattattctgtttgagaattgttctttgatgactgatttagtatgcttaggtagctgtgtgttattgttcatgtaatgattatttgttgttgagatgtttatgccttttcttgtgtctagtgttttatcagcaaaacaaattactttgtggcactgccagtgatgatttgtctgcaaaatggatgtcctgtggactcaagtcccctgtttcagggagaacctactcgaggaaacatgactcgtatctacagagaggaatcaccaagccaattgtactcatctttcctctcactgggtatacaatatagtagttgtagcggtctttccgtagtagaacggagaaagacctgtgcagtgagtatttgtgtacttggccgatggctcgaatcgtctgacctaatcagcgagaatggcaaccaaatatgcttcgtacttgaaacctgtgttgtttttagacatgtgcgaattttcacagttcatttgattggtgatgcctgacaatttggtcagatctgataccgcggaatatataatgcaagtttgaaacctgtaa

SEQ ID NO: 98928 - DNA, 835 bp, Zea Mays
actcccaagccccaatacacagcacaggagcatcaacacaacctcagaggagcactactgcgagtcaatcagcgaccagcacagcaaccgaactcaaaagcaagagcccaagatccgagcggtaggagaatccggacatggcggcggcagcgagggcgtcgtggatggtggcgatgagcgtcggcgcggtggaggcgctcaaggaccaggcaggcctctgccgctggaactacgccggcgtggtcggtggaggagtggacgtggaacacgaacagctcctgcgcgaagagcgctgccaggaggagcatggagagcgtcgtcggcgccggcgccgcgtggcgcggtcgtcgtcgtcgtccaggtatatgttggagctggtgtagacgaggagcgaggcgtagatgatggcgtgctcgtggttcggcagccgctcaggcgggatggagccgtcggcgcggaacggcatcggcgagtaggcgagcatctgggtggccagcccgtacgctcccgcggccagcatggcgatgggctcgaggcgacgcaccccgtggcgccgggaaccatgctgccggcgcgaggacgacgacgcgcgacgatgaggacgacggggtcggggcgagggagaccaagagcctcatgtggttgaagaggtgccataggccgaggcctgagagcatcgcgcctgccagggtgtggctgatgattttatccgcggcgccgcggggcagcatcgtcatgcggatcgatgtcagtcgtctaaactgttgatgctggcttgctgatttctttgtttgcaatgcatgctcgatcgggaaggatttattctctatattaa

SEQ ID NO: 98929 - DNA, 510 bp, Zea Mays
tctcattaaccattccatattttataatacattttccttttttacatctacaatctcattaaccattccatatttcatcttctatacaagatgataaaaaattcacttatgacaacatcatgaatcctgaatagatgtacgtggtttccactacgtattacaaaatattgctaaacgaaacgtaatgaacccacaaccctatacaataacatatttgctgtcacatgcaagtcacctcccggcgaaaaacgtgcgcagtgcgcgcgcccttgactagtatccatgaaagaagagacaagctagagagcgaggaggatttgctcgcatgggcttgttgtttgattgtgatagatgtccattacaaaatctcagttctgaagatacggttaggttagctgctgtaggctgtcacatcaaagtcaacgattgtaatactactacatcagtgtaggaggaaaaaaatacgattttaatttataaatattcttgattaaatcaagtgttcaaaga

SEQ ID NO: 98930 - DNA, 2389 bp, Zea Mays
caggcaggcagatcaacaagtcgcagcgcagtcaagcaaggcacgtcggtccaagagcacgacgagcagacgacgctgccggcccggccgtgctgctcctctgagtccgagatctgaaggcgcggcaggaaggaaacgggcgggcgagaggatccagcagccctcccccacgcgcgcgcgacggttagcgcgtcccagatctcggtgcggcgcctcccgcccggccctgccggcgagagcgcggcccgatgaggcggcggccgttcctggaccagcggcggccttcgttcaagcgccggtggcagcagcgcccgtggtgggtgcgcctcgcgctttccctcctcctcgccctcgcatgcgtcctcctcctcgccgtcctcctcggctcccccgaccccggcgcctcgccgtccacctccgccgcgtcctccggatctgagaccacctcctcacctctcctccgtcagagaacttacctggagggaatcacggatgcgctcaacatgactgacgaaatgctgagcgcccgctcgttctcgaggcagctcatggaccagatttatctagccaaaacatatgtcgtcgttgccaaggaggccaacaacctgcagtttgtggcggagcttagtgcccaggtacggcgggcgcagagcatccttgcgcatgctgcagcctatgggggcacggtgatggagcaggaagcagagaaggcgatcagggatatgtcggtgctgctcttccaggcgcagcagcttcggtacgacagcagtatcacaatcatgaagttgaaaggccagattcagtccctagaggagaagtcgaaagttgaggtggagaaaagcacaaaatatggccagattgctgctgaggacctcccaaagggactttattgccttggtgtccggttaaccatggaatggtttaagagtcccgagcttcagaggaagttttcggataggagcccagcagtgcagagcaatctgagggataacagcctctatcatttttgtgtcttctcagacaacatccttgctgtttcagttgttgttaattctacggctataaactcgaggcaccctgacaaggttgtttttcacttagtgactgatgagttgaactatgctccgatgaaggcatggtttggcatgaatgactacagaggggtcactgtggagatacaaaaggtggaggactttacctggctcaatgcatcgtatgttcccgttcttaaacagctacagaatgctgctacacagaagttctacttctctggcagtggtagtcgtggaacaccaattaaattcaggaacccaaagtacttatcaatgcttaaccacttgaggttttatattccagaaatatatcctgaattgcagaaggtggtatttcttgatgatgatatcgttgttcagaaggacctatcagaattgtttactatcaacctcaatggcaatgtgatgggtgctgtagagacttgcatggagacattccacagatttcataagtatcttaaccattcccatcctctaatccgtgctcattttgaccctgatgcttgcggctgggcatttggtatgaacgtgcttgatctggttgaatggaggaacaagaatgtgacaggcatatatcattattggcaggagcgcaatgctgatcatactctatggaagcttgggtctttaccacctggacttcttgctttctatggcttggttgaagcattggatcccaaatggcatgtcttgggacttggctacacaaatgtggatcttgctactatcaaggaaggtgcagtactgcactacaatggaaatatgaagccatggctcaaaatcggaatggagaagtacaagagcttttgggataactatgtggactattcacaccctttgattcagcagtgcttcatgcgttgattgatgtgtatcaacattagaatttttgtaagcttcatggtagatatgttccgagcacatgctccaactgccacacggaaacattgtagttaaatcagttggcttttctctcaagttacaatctctgacaaaacatcagtggatgtctatagcatctgtagttgatggagcacaacaattgcatatctctagccacaggtaaacagcacatgagctgagaccgctatgcagtaggctgctactcgaactacatccactacacagatcataacttgcgaccatcgatgtaatttttccattttttattttttgggtgagacatagccacagaatggagatggtgtagaattgattttaaattattgatgtgttacaacaagttttgtgttacctatccatatttattggatgttaaagacttatggcagctaagcccttttctgtttatttatttatacatgttgagaagtaaa

SEQ ID NO: 98931 - DNA, 222 bp, Zea Mays
tttttgacaatgggataccccctatttcattaaaaaatagaaaccaaacacagttcttacagaattcacgacaaatccaacagtcacaagccgataagcctaccacattatcagctacacagaggtatgaaacccaactgaaggaacacagcaaaccagaagaagtccgacagtctaacagacttcactgaatatctacaaaggatagatcccaaaagcagc

SEQ ID NO: 98932 - DNA, 2115 bp, Zea Mays
aaagaagggggcgcaaaccaatcaagcgggccaaaaggaaagcaaggcgacgaaggaatcaggcaggcacagccacagccaccacgaccactgctgcaacgcattctcattctcactccaaaaccccaaaaggagggagggagtgaaaaccacccagctgatgtagacacgcatgaagaacagcttcaacttcaataatgctggcatcagcaaagcaaagcagacccgggcccctttgcattaaggtcgcccgtcgaaaggctcctcttctttttattgcgcctttttggcaaaggtgggggggaggaactcttcgtcgtcgcgcaccagcagcagcgttacgcaattcacgaaagaacatgctttaagcagggagaccattttttatttcgagcgcgctacgatggagctctactccggataccttgacgaccatttcaacccccacaagctaagcatcgccggcagcgccgtctcgccgccggagtacatggcgtcggcgtcgccggcgcagttcgcggcggcgcccctcaggatggggtacgggaggccggcgccggcgccgcccccgcccgtgatgggcatgtggagcagcgagccgttcagggtcgacagcggcagcgcccacgccaccagcgcgtccaccgtcaacaccaagctggaggagacaaggttagaagacgacgcacaggtagcacttgagccggcaagaagtacggagcaggaaaccagtaggccgccagagagggcccagagaaggctcgcgcagaacagagaggctgctcggaagagtcgcctgcggaagaaggcctacatccagcagctagagacaagccgcatgaagctgtcgcagctagagctagagcttcaacgggcgcggcagcagggtgcatatgcgaatagtgggagcatgggagactcggctctcggctacagatgcccgatagatccaggtgtttctgtgttcgagatcgactacagccactgggtggacgagcagaagagacacacggcggagctgacgtcggcgctccaggggcagcagacatcggagctggagctccgcctgctggtggagacgggactcagcaactacgagcacctgttcaagatcaaggcggcggcggccaacgcggacgtgttctacgtcatgtcgggcttgtggaagacccccgccgagaggttctttctctggatcggcgggttccggccgtcggaagtcctcaagatcctgagcccgcagctggagccgctggcggaggcgcagcgcatgctggtgggcggcctgcagcacacgtcggcgcaggcggaggacgcgctgtcgcagggcatggagaagctgcagcagaacctcgcggagaccctgacggccgaggccgacccgttcgggccccccgacccctacatgctgcagatggccaccgcggtgggcatactgaaagagctcgtcaacttcgtgacccaggcggaccatctccggctgacgacgctgcagcagatgcacaagatcctgacgccgcggcaggcggccaggggcctcctggcgctcggcgactacttccagcgcctccgcacgctcagctcgatgtgggcggcgcgcccgcgggaggcggcggtcagctagatgcgcctgcggcgtggcaggccaaaagctcgctcactggtgaggcgaccgtaccaaagaacacgacgccgacgacgacgaagactaaagatgagtggtagcagttcgctgtatacttgccccccaatgcaaggtgtaaagcccagtggaggacgaagagatcgacctcgctgtacgagtacgacgaacggaagggacgcttctcggtcagcggcggcggcgacctcgctgtacaaggcgattagtagacatacaaaatgtaaatggaaatcgatcgatgggcggaggatatgtacgtatcttgttttgatacccgcggccggggccctcctagaggcgtactgtatgattgattatgcgggccttctacaactactactggtgttgggctatatgtatatctctacaactattaagactcatctatagactgcccccgctccttcccaatgaaccccccgctcccgcacgccccgccgacctctgctgcc

SEQ ID NO: 98933 - DNA, 1935 bp, Zea Mays
gctgctggctactggcttggctccttatataaccctgcaccacttcctccagccaaccggtagtgtcgtcgtcctttggagctgcacacacatctgtgagtagaaaccttgtgcttggcgatttggcaccctcaagttaattatccttggtttgaggaagaacaacacttcagccagacatgctttaagcagggagaccattttttatttcgagcgcgctacgatggagctctactccggataccttgacgaccatttcaacccccacaagctaagcatcgccggcagcgccgtctcgccgccggagtacatggcgtcggcgtcgccggcgcagttcgcggcggcgcccctcaggatggggtacgggaggccggcgccggcgccgcccccgcccgtgatgggcatgtggagcagcgagccgttcagggtcgacagcggcagcgcccacgccaccagcgcgtccaccgtcaacaccaagctggaggagacaaggttagaagacgacgcacaggtagcacttgagccggcaagaagtacggagcaggaaaccagtaggccgccagagagggcccagagaaggctcgcgcagaacagagaggctgctcggaagagtcgcctgcggaagaaggcctacatccagcagctagagacaagccgcatgaagctgtcgcagctagagctagagcttcaacgggcgcggcagcagggtgcatatgcgaatagtgggagcatgggagactcggctctcggctacagatgcccgatagatccaggtgtttctgtgttcgagatcgactacagccactgggtggacgagcagaagagacacacggcggagctgacgtcggcgctccaggggcagcagacatcggagctggagctccgcctgctggtggagacgggactcagcaactacgagcacctgttcaagatcaaggcggcggcggccaacgcggacgtgttctacgtcatgtcgggcttgtggaagacccccgccgagaggttctttctctggatcggcgggttccggccgtcggaagtcctcaagatcctgagcccgcagctggagccgctggcggaggcgcagcgcatgctggtgggcggcctgcagcacacgtcggcgcaggcggaggacgcgctgtcgcagggcatggagaagctgcagcagaacctcgcggagaccctgacggccgaggccgacccgttcgggccccccgacccctacatgctgcagatggccaccgcggtgggcatactgaaagagctcgtcaacttcgtgacccaggcggaccatctccggctgacgacgctgcagcagatgcacaagatcctgacgccgcggcaggcggccaggggcctcctggcgctcggcgactacttccagcgcctccgcacgctcagctcgatgtgggcggcgcgcccgcgggaggcggcggtcagctagatgcgcctgcggcgtggcaggccaaaagctcgctcactggtgaggcgaccgtaccaaagaacacgacgccgacgacgacgaagactaaagatgagtggtagcagttcgctgtatacttgccccccaatgcaaggtgtaaagcccagtggaggacgaagagatcgacctcgctgtacgagtacgacgaacggaagggacgcttctcggtcagcggcggcggcgacctcgctgtacaaggcgattagtagacatacaaaatgtaaatggaaatcgatcgatgggcggaggatatgtacgtatcttgttttgatacccgcggccggggccctcctagaggcgtactgtatgattgattatgcgggccttctacaactactactggtgttgggctatatgtatatctctacaactattaagactcatctatagactgcccccgctccttcccaatgaaccccccgctcccgcacgccccgccgacctctgctgcc

SEQ ID NO: 98934 - DNA, 2329 bp, Zea Mays
cgccgctgctctccatctccagttcccccatgccactggccgctgcgctgcgctgcctctccttccggaagaaaaaagcgacgaaacccaccggctggctccacgctacaagagccggattccaggatccactcgaggtcgagcgcgaaggcgattggcgggcgacggcatccgtccggccacactgacgattctgttgtctcgtatcctgagccgccaatgcgtgcgggtgcggcagatcagatgcgccccgttggcagcacagaggttctcgcatcccggtagccggtagggaaaggcgacgagacgacgacgatggaggcgcgcccgggcccggccgtggaccgtggacggtagggtaggattgattttcgtctagtgcgcggcgtcacgtaacgtacgtcctctcagcgcgccaccgccacccatcgccatgccaatcatctgtcagcctccctccgctttgcccaaagtgctcgctcgccggggccgcctttccttttgggccgcccgcacttgccatttcggagagagctagcggctagcgcagcgcattatttgccttcccgtcctcgcgccgattccatcccgcgaggctagctgctccgtcgacccgtctgtcgtttactcacgccgccggctcttgactctgccgccttgcctcggccagcatcgccggcagcgccgtctcgccgccggagtacatggcgtcggcgtcgccggcgcagttcgcggcggcgcccctcaggatggggtacgggaggccggcgccggcgccgcccccgcccgtgatgggcatgtggagcagcgagccgttcagggtcgacagcggcagcgcccacgccaccagcgcgtccaccgtcaacaccaagctggaggagacaaggttagaagacgacgcacaggtagcacttgagccggcaagaagtacggagcaggaaaccagtaggccgccagagagggcccagagaaggctcgcgcagaacagagaggctgctcggaagagtcgcctgcggaagaaggcctacatccagcagctagagacaagccgcatgaagctgtcgcagctagagctagagcttcaacgggcgcggcagcagggtgcatatgcgaatagtgggagcatgggagactcggctctcggctacagatgcccgatagatccaggtgtttctgtgttcgagatcgactacagccactgggtggacgagcagaagagacacacggcggagctgacgtcggcgctccaggggcagcagacatcggagctggagctccgcctgctggtggagacgggactcagcaactacgagcacctgttcaagatcaaggcggcggcggccaacgcggacgtgttctacgtcatgtcgggcttgtggaagacccccgccgagaggttctttctctggatcggcgggttccggccgtcggaagtcctcaagatcctgagcccgcagctggagccgctggcggaggcgcagcgcatgctggtgggcggcctgcagcacacgtcggcgcaggcggaggacgcgctgtcgcagggcatggagaagctgcagcagaacctcgcggagaccctgacggccgaggccgacccgttcgggccccccgacccctacatgctgcagatggccaccgcggtgggcatactgaaagagctcgtcaacttcgtgacccaggcggaccatctccggctgacgacgctgcagcagatgcacaagatcctgacgccgcggcaggcggccaggggcctcctggcgctcggcgactacttccagcgcctccgcacgctcagctcgatgtgggcggcgcgcccgcgggaggcggcggtcagctagatgcgcctgcggcgtggcaggccaaaagctcgctcactggtgaggcgaccgtaccaaagaacacgacgccgacgacgacgaagactaaagatgagtggtagcagttcgctgtatacttgccccccaatgcaaggtgtaaagcccagtggaggacgaagagatcgacctcgctgtacgagtacgacgaacggaagggacgcttctcggtcagcggcggcggcgacctcgctgtacaaggcgattagtagacatacaaaatgtaaatggaaatcgatcgatgggcggaggatatgtacgtatcttgttttgatacccgcggccggggccctcctagaggcgtactgtatgattgattatgcgggccttctacaactactactggtgttgggctatatgtatatctctacaactattaagactcatctatagactgcccccgctccttcccaatgaaccccccgctcccgcacgccccgccgacctctgctgcc

SEQ ID NO: 98935 - DNA, 673 bp, Zea Mays
tctcgtgcaggtgcagctagccctcgcctcgcgcagcagcaaaggagctatatcagctgcctctgcctgcttcgctcgttcccatatagagccttcgttccggccggcctctcgatcggtgctccgccgccgccaccgtaccgtcgtcacacgccgcgcgcgcgacgtcgtcgtctcagctagtagccgacactgtcaagcgcgcgcgccgggctcgtgcggtttctctgggccgatggggaggcacactggtgctggaattcactgctccgtccctctcgctctgacggtagtagtgctgctgctgctcgcctccgtctcagtgagtcatggcatcagaccagctcctgttgctggggcgaatggactggtgcatgactcgacggcagagatggtcgtcgtcgccacagcaccgtcagctcctgcgcaggggaggcagatgagcaggggcggcaagaaggacgacgacggcgacgacaacgtgctgctgcgggaggaggtggtgcgcgcgacggggtcgagcctcccggactgctcgcacgcgtgcggggcgtgctcgccgtgcagccgcgtcatggtcagcttcaagtgctccgccgccgagccgctgccgtgccccatggtgtaccgctgcatgtgcaggggcaaatgctacccggtgccgtccagctga

SEQ ID NO: 98936 - DNA, 3813 bp, Zea Mays
gcccagctgcccctgcctcctcctaccgccgccgtttcgctccattcgcctcccggaggccgccgaatgcccgcgcccagcgccacccgccctcaaacctagactagacgtgtgcctcgcccgcgccgtgcggtctggtccaagacggcgccctgcgggctcggctgctgcggcgggggagcgaggggagggggcgggaggctgaggcggctcgtggggtccatggcagtggccggattggcgccctcaccggcgcccgcgctgctccggaggttcccgtgctctgcgcctccctgggcgccctcgcccttccgcccccgccgcccccgccgcggccgctccatgatgtcgccgttcactggcgccagaaggcaggagtactcccatagctcagtccttggaattcaagacaaccgagctcttaagcttccagtatgtgtcaactttaatctgcaaaacggcggcgcacaagaatgggctgacgagagcaggaggttatcattaagcaaagccggcaatagtaatggttccactcatctagggtctggtattttccatcatgaacccttggaagatttcaagagctccaaccaatctctattgcacagtgtaagacaaagaatggcaccaaattctcttgcgaataggcacgtcaacacggaattggcaaagcatcatgcgattaagcatgctgcagttgctgtgtcagcactgaccagtgttgttaatgatgaccttaaatcagtgaagaggcctaaggaatctgaagtggaggttcattggtctaatggccccaagtttcattctcatattccgaaaatctctgaagttgaaacaagcctgcgatttgatgaaaatgctacagatggctatgctaaagatgtgaatgaatgctcacctgaggagacagtacaaccctctcgaactagagcgccctcatcccaggagtctctagatgcacggaaggcactcagtaccatatatgacaaagttctggtggttgacaatgtcatgtcagctaggagtgttgttcaactgcttactacgaagtacagaaattatattcatgcatgtgacacagaggtagctaatattaatgttaaacaagagacaccagttggccatggaaaggtcacatgctttagcatttactctggcactaaaggtgctgaggctgattttggaaatggcaagacatgcatttgggtggatgtgctagatggtggaccagatgtactcatggagtttgtcccattttttgaggattcatcaatcaggaaggtttggcacaactatagttttgatagtcatgttatagagaactatggaattaaagttgctggatttcatgctgatacaatgcatcttgcacgactttgggattcttcaagaagaacagatggaggatattctcttgagggacttacaaatgatcatagggtcatgggtgttgttccaaaggaattacaaaagattgggaagagatcaatgaaaaccatctttggtcggaaaaaaataaagaaggatgggtcagaagggaagattactgcaattgagcctgttgaaattttacaaagagaagacagagaattgtggatctgctattcttcgttagattccatgagtaccttgaggctttatgagagcttgaaaagcaagcttgaaaggaagccctggacttttgacggttaccccagacccggaggttcattgtacgatttctacgaggagtattggtgtcctttcggtgctattcttgtaaaaatggaaacagctggaatgcttgttgaccgtgcttacctttcagagattgaaaaggttgctgttgcacagcgcgaatcagctgcagataaatttcggaagtgggcatctaagtattgccctgatgcaaaatacatgaatgttaatagtgacactcagattcgacaactcttcttcggtggtatagagaacatatacaaatctggtgattttttgccgaagagtaaagctattaaagtgcctaacaatgaaactgctgtttcagaaggcaagaaggttccaaagtatcgcacaattgaccttttcagcattgtggaagacctgaaaactgatatatttactgcaagtggttggccttcagttagtggggctgcattgagaaatttggctgggaaggttccatcagatcttgtttactcaacagatgatgtaaatgatgatgaatgtggtattcattctgaaatttcccattgtgatctagaagacacctcttcttatggtactgcatatgatgcatttgggggaggaaaggaaggaaaagaagcatgccatgccattgcagctttgtgtgagatctgttctattaactcgttaatatccaacttcattcttcctctacagggaaatcatatatcatgtaaggaagggcggattcactgttccttaaatatcaacacagagacaggacgtttatcggcaagggcaccaaatttacagaaccaacctgcacttgaaaaggataggtataaaatccgccaagcttttgttgcagctccagggaacactcttattgttgctgattatggtcagctggaactcaggatcttggcgcatcttgctgattgcaaaagcatgttagatgcttttaaagctggcggcgacttccattccaggacagccatgaacatgtatcagcatattcgtgaggctgttgaagaagagaaagtaattcttgagtggcatcctcaacccggtcaagagaaacctcctgtgccgttgttgaaggatgcttttggtgctgagaggaggaaagctaagatgctaaatttctccattgcatatgggaaaacggctcatgggcttgctcgtgattggaaggtttctgttaaggaagcaaaagatacactgaaactctggtatagcgatagaaaggaagttctggcttggcaaatgaagcagaaacagctagcacatgagaagcgtgaagtttatactttgcttgggcgatcacgccgttttccaaatatggctcatgcaacttctggccaaaggggtcacattgagcgtgctgctatcaatgctcctgtacagggcagtgcagctgatgttgctatgtgtgcaatgcttgagatagacaggaatactcgtcttaaggagcttggttggacgctactcttgcaggtgcatgatgaagtgatactggaagggccttcagagtctgcggagctggccaagtccatagttgttgagtgcatgtctaagcccttctatggcaccaatatcctgaaggtcgaccttgctgttgatgccaagtgtgcacagaattggtatgcggccaaatagacctgttaagtgtcccagaagggcgtcaattccttcggtgaaactcggtggattttgaactggtatctgctggctgctgctagtagcctagtgagctcatctccacgtggatgccatgcactgattatttcgctgttgatctggacagtgaggggtcagcactgagcagcgaaggcactgtacactattccgtattccctataggtcgggtagcttcaccttccacactccctgttaggatctctcgatcattcatgcctgatgtagttggtcgtcctggatagcagtgaagactaagcatgccgtgttcataagatttatttagcatgctgatgtgttgagttgctgaccagttctgctgacgtctaacactgttgcacgcactgcaacaatgttttgatcacaagagaatgtagttgattgtgagcgttcttaatctccttatttctgctgttgaactgtgcgtcttgttaattgtatcttctctaa

SEQ ID NO: 98937 - DNA, 502 bp, Zea Mays
cgcactcgccgagccaagcaatacacagtagtgagcaatagtaggcagcgcagcaggatacatagcagttagcaccacagcgagcagctgcccgtacgcacgcttgatggcgatggcgatggcgagcttcgtcgctcagctcaaggacatgttcctcggcctcgtcgaccgcgtcaccggctgccgcggctgtggcggagacaagcaggacgtgccggaggcaaccaagttagcaagcctccagcccgttgagatcaggtcgagagaccccgttgtgggcggaggatccgtggctggggccaattgattgctaatactgccagacaagctgcacgagattgctgtggcgttccagcaaattccaagctttttttttatttgttatttttcgtcaaaggaagctgttctttccacacacaaaaaagcgcataatgcgtgtgcagtgttattgattgatttctcctctatgattgtaattgaacccggtatttttttttctttt

SEQ ID NO: 98938 - DNA, 907 bp, Zea Mays
ggtcgtaatatgttggatgattgggaggagaatttggctattattactgcaaacagaacaaaaggtgacgttctagtaatcacccatcttggtgattgcctctggaaagaaaaaaatgaggttgcagctgcccattcatgctatttagttgctgaactaaacattgattcatactcggaaagtgcaaggttatgcctcattggtgcagaccatttgaagtgtcctcgaacatttgccagcccggaagccattcagaggatagaggtttacgaatatgcgaaggtgcttggtaattctcaatatatcctactatcctttcagccatataagctgatatatgcatacatgcttgtggaagtggggaaagtttctgattctttgaggtattgccaggcgtctataaaggtactgaaagcctctggtcgtgcccctgaattggaggtttggaaacaattattttcttcgctggaggagaggatacacactcaccagcagagattggaagagattggaagcaagacctgggggatcatgagaggagttatggcaatggcctcacaaaaggtcgaggaatatactgagcggctggggagaggattggcaacgcagcgagcagaacggtgagccttaccaaaggtttgagcacatggccaacagcaacagttggaattcctcccaaaattcttcatcgaagaacaacaattccagttcttgggacgattgggacgaccaaggcaagaagggtgaacctgcgaaaccgcaccaaagcagttactcctgggctggctaggatgatgggaaggacgatggttttgatagtcctggttacaacaaccacaacagctctaacaaggggagcaaccacaacgggacttccggtggctcattttggaggcgaggcccattc

SEQ ID NO: 98939 - DNA, 408 bp, Zea Mays
atggcaaggggtcctcggacaaagtggtggtgcggtgagagggggcttgatgggctcatgaatgagaaaggcctagagaaggctgaagttacaggtaatcagtgtcctaacactgaaacaattttttatagtttttgtttgcagttacatgctgcctttgcatattcgaaggatgacaggtcatatgcttcttaccttgctgaggaggggaaacattatcgagaactgggtcgcatagaagacgagaaggccagcaggaatatatttgaagccagaaataagcatataacgaacacagtaaccatcgacttgcatggccaacatgctatgaaccttctcaaaattcacatgatgatttgtatttgtgttccatatgtacttagtgaggctgaaagatgggtcaaataa

SEQ ID NO: 98940 - DNA, 785 bp, Zea Mays
tgctggagcacacaccaccaccgctgctgctcgccctcatacatatataaccggagctagaagcttattactcggattagcatttgagcttaaggctcgattcgtgaggagtaaagctagcaagaagctccaatagtcgagatcgaacgaacacggaacacatggccaacttggctgctcagatcaaggacaagttcctcggcctcgtcgaccgtgtcaccgacgccgccgccggatttggccgcgctgccggaggcaaggacgacgacgtacaggaccccactactactaagctgcacctgcacgccgtccaggtaataattgtctacttcgatcgcctcgcctcttgctagtagctaattaaccaacgaactcattactcatctgacattgctgctggactttgttcttgtttgcagcgtgctgaggttattattagatcgcgaggaggagaacccgtcgtggacacaggatcgactgcgggggccaattaacaatgccgcccgtttttatagattgttgcgcgtgtgccatggaagttcatatagcagatagcccagcagaatgcaatggcacttgctagctagtgcctctgttctacttgcaaaacatttctcttattatttgtagctggtgcatgtcagcgggtatatctatcttgcagttctatatattatgttcctttcagtgggctctctagtctagctccctgatgttattaggcaaggctctttttgttgcaagttgtaatatgttatagagctctctgctccaatactctaaat

SEQ ID NO: 98941 - DNA, 696 bp, Zea Mays
tgctggagcacacaccaccaccgctgctgctcgccctcatacatatataaccggagctagaagcttattactcggattagcatttgagcttaaggctcgattcgtgaggagtaaagctagcaagaagctccaatagtcgagatcgaacgaacacggaacacatggccaacttggctgctcagatcaaggacaagttcctcggcctcgtcgaccgtgtcaccgacgccgccgccggatttggccgcgctgccggaggcaaggacgacgacgtacaggaccccactactactaagctgcacctgcacgccgtccagcgtgctgaggttattattagatcgcgaggaggagaacccgtcgtggacacaggatcgactgcgggggccaattaacaatgccgcccgtttttatagattgttgcgcgtgtgccatggaagttcatatagcagatagcccagcagaatgcaatggcacttgctagctagtgcctctgttctacttgcaaaacatttctcttattatttgtagctggtgcatgtcagcgggtatatctatcttgcagttctatatattatgttcctttcagtgggctctctagtctagctccctgatgttattaggcaaggctctttttgttgcaagttgtaatatgttatagagctctctgctccaatactctaaataaaaaaagttttgtcg

SEQ ID NO: 98942 - DNA, 729 bp, Zea Mays
ataaattgggtacactctgatagcgagagaactcaccagacttgcagctccacaccagcaacagcgcgacgatagctagctagtagtagaagcaggcagcggctctagttgtcgagcgttccacaggtcatcaagcaccggcgtttaattagccatccgctccgatcgtcccctcccctattcccatggccagtttcgctgctcaggtcatggacatgttcttcgtgctcgtcgagcgcgtcaccggctacggcggccacgctgaggacgaccagaaggacgcttcaggtgcacatgagcccaccaagctgctgacatcgtctggcgtttctgaaaccgaacaaggagaagaagaggtggtcgttgcggtgcagaatgttcagataagagcaagagggggcggcgaaccctttgtgcaaggtggctcgatgcctcaggttaattagcactgcatgcatgcgggttttgtagaggttattagttgccgctgcctcaggtgatcgagcttcgcagacgatgatgcgtttaatttgcagccagtgttttaacctttttcatgcaaggatgtgtgtgtgtgtgttgtctggatcgtgtttcgtcgtttccttcttctgattgaattaagagtatgtctgtcgagttctatcaagttggttgtaattccagtatcctatgtgcaagcaatgtgtgagcttgctgtcaagtttgtggtgccatcggatcagtcca

SEQ ID NO: 98943 - DNA, 955 bp, Zea Mays
acgtcgcggattccaagaacccaactcgtcaagtccagcggtgccgtccagagagagagcctagagcacagctagccccgccagccatggcggccgcggcgcgcgcgatcatctgcgagctggcgccgcagaaggtgtcgtcgacggcgccgaagaaacgtgacgccgggacaaaggtggtgctccagccccgtctctgcacgctgcggtcgtacggcgccggcagcggcgttgtgacgcggaggattctgaccggggaggaggacgggagcggggccgccgactcgggcgggtcctcggcgtcaccgttcttcgcctcgctcgccaactacatcgagagctcccgcaagagccaggacttcgagaccatctccggccgcctcgccatggtggcgttcgcggcggcagtggccgtggagacgacgacgggcagctcgctgttcaagaagctggacacgatggagatcgaggaggccgcgggggtgtgtgtggcggtggtcgcctgcgccgcggcgttcgcgtgggcgtccagagcgcgcaacaggatcggccagatgttcacgctggggtgcaacgccttcgtcgactccctcatcgacaacatcgtcgaggcgctcttctccgagggcgagctgcaggactggtccgatgacatgtaaacaaatatgcacatatgtatacgcagatggagaataatagtattagtagatagactcatagtcatagacagcacgtatatagtgtcaagtatatatagtaagtagatgaagctgtcaagtatttatagtaactggttcaagctaaagagaaggaagctcatagaatcaatactagaaattacaagtaaccctttataagtgatcatctccatcaaagtgcagtgtcttttcagtattcaaatgatgtctatccgaacttttaagtatctatatgttaagtggtgtcactttttatg

SEQ ID NO: 98944 - DNA, 630 bp, Zea Mays
gatccttgagtgttatggcttattggttcaggatagaaatgtttagccatctaggatatatggttgttagctggtagtcaacttacagtttactaacattggctggctttaaaagtttgtgttggattgttttctagtttagaattttgtggattcagtcgagaagtggggaacacgttctactacttttcactttcatcagggaagcagatcagtatctgtcaattattttgtagaaatccagtgggcagcttgtgttcttttttatacatagtttagataattcttgaataattctgagagcatttacatcccttagttatttgttgatatatgatatagtatttttctgctctttttgtatgccatatttatcttctaggcttcaagttccaagtaacagtattggattcaccttgaaggcttcccaccgatatggcatgtttcaagaatatgttctggtgagtgtatggtatatacgagtagtcacttatgcctctacgatataagataatgttttatcagtttctacataatactttgcatgccaaccatctcaatgtatttatagtagtatggtgtataaatgctgctggtcataaagccacgcttgataaggtgttctaaact

SEQ ID NO: 98945 - DNA, 363 bp, Zea Mays
tgaataaatgatgtgacaggttgttgtagagcagcattgatctaattgaatgcataactctactcttatattatatcattcctctcaatccatgtcttttaactggtgaattattttaggtttctgtttgatttacttatgcttgttatgacgtgtctttatgctttatacaggcttacacagacctgttttgacaagagccgagcagcgatgcttccatttcggaccacgacctacctaaatgctaatggttccaaatgtctgaagtaccaaagacagggctagctcctcgttttttgtcatgtcaaaaaatcgtgtatgattgcaacaatattggcaaaatatcgttgtactttatatttt

SEQ ID NO: 98946 - DNA, 1661 bp, Zea Mays
ccccactccaactccaagcatgcagccccgctcggcttccgttgccaggctgccacgccgtcgccgtctcgccgcctaaaacctccctcccccccctcgcaccactccgctcacctctcttcacgccgccgtagccggcgagtagcagcgggtacgtgcctttgcggtgtaccttattggctgagccttccctttgccgaggaagagcacagaagcagggaggtcggcatggcggaggtgcatctaggtctgccaggtccctgggcggcggattacagggagatggccgaccactacaccactaagatcggtggagtccctgattggccaactggtgatatgggcttcaagcccgagactcttcagtgcagcttatgtgggaccaagctttgtcttgttgctcaggtacatgcgcctgtggcaaagctaaacattgaggagaggataatctatgtgcttgtttgcccgacaccagaatgtggacctaaacctcaaagttggaaggttctaagagttcaaaaatgccataatgttatgcaaacagaaggtggtggtgatgaattaggtcaaccgaatggaccttcttctacaagtcttccagaagaacagaatgataaaaataaaattcctgagacaaatgatgacgattttgatctagatgccttagccgaagcacttgaacaagctgcaactttggcatcaaactcaaagaagaagaacaaatcgaagcatgctaatgctcctgtaaaacgtcctgtattgaaggagcaagcatgtgatctgagcatacctgtccttccttgtttttacatacattataataaggaactatatgggggcaaaggcgctgtgggttcaagtagcagtgagttggttttggacaaagaaatcatggatgccgcaaatgacgaagaagaaaaatgggaaggagaaaagtatgagtacgatagagctattggtgctgacagaacttttttaaaattcaagaaacggctggatgcatatccccagcaatgctttaggtattcttatggtggcaagccactgttggctacaacaaaattacaagatcctggcacctgtaggctgtgtggttcaccacgccagtatgaactgcaattgatgtctcctttatcatactttctccatgaagctggagacggttcctcaaattatgcacccagcagctggacttggctgactgttataatatacacctgccccaagagctgctgcccgtcctcatgcggtggaaagccccagagctgttgttggggagcagcggaggaggagatcctgattcaggaggatgaagtcctttaggatctaaccagtgctggttgagaaactattcccgatttgaacatgtaatatgcagtttttttttgttctccaatggttagagttgtaaagctatctgaaattttgaagtgtgttttgttattgtgccctggtatactgcagaactgtcatacttcacacagtatcatatcagactagtaagatttttttttctttgtggctgttgttttccgctgcaaaatcatttttttctaggtgcctggattgtcaactccaatcaagggtggccatgttacgcttgagcatcaagggatatgatccgctgaacctggtttaatgttgggcctttcaagatgcag

SEQ ID NO: 98947 - DNA, 1536 bp, Zea Mays
ccttgatccccgctaaggtactcaccatgaaaagccgtatctgtctcggcggacaggacccgctcgtcactgagaccgggacccgcagagcattgcttgaccgctggcccgcctccgcctgttagaaccaccgggcatcgtcgacgccgccggttgcccattaaacccccgtccccgtctcgaggtgatcatcccgcagcgctacaacgcccgaactctccgtccctcactctcagtctccgacacattctacgaaccgcctcccactaccgctcattgccgccggtcgccggagacgcgctgcaccgccagctgtccgccttcgcccgccgaccccggcctgccgcagcttccccttcacccgccagggtataagctgccagtgcttgtgtcatggaagagctacagaaagacagtgcgctaccatcaaatagctctgattctgagccagaagctatggaattggatgacaatggagcaggaaaatcccatagcatcgagggaaacagggattctcctatagacactgatgaaggccagccatctatggatgttgatattaagggaaaatcatctctcaacgatgatgttaatggaaagtcttcttctgagccattttccaatcctccaatcaacatgagtgtggaaagcctagagaagttttgcaaagaagcgtcgaggtccttctttgatgaagttggtctgattagccatcagataaattcctacaatgagtttgtctcgcatgggctccaggagctttttgattcgctgggtgaagtgattgttgaacctggctatgatccttcaaagaaaggatcaggtagctggaagcatgcaatcatcaagtttgggagagtgaagcttgaaaagcctgtgttttggactggcaaagatgaggtttctgttgattttaaaccttggcatgctcgtctccagaatatgacatatgcttcaagacttagagtagaagtgactattcaggtttattctttggagaaaagtgacaaatctaaaacagggaatgatggttttgttcaaaaaaggaacttcatgaatgaaactcactggatatttattggcctccttccagttatggtgaaatcaaacttatgtttgttgcatagtcttaaggaaagtgagtgcctgtttgatgcaggtggatactttttggtcaagggaatggagaaggtataactctgtgttctctgttgttaatgtattagtatgtaggaactttcaagtgtccttttgttgctggcatgggactatagctttcttagaacccattcagaaaacatgtacatgctcataagaggggggggggtccaaatatgattgtagctatgtaaaataggattctattgtatcgaaggatactttggcacagcatccgtttgagttggtctcctggtgccatatgccgcttcttgtgtttaaactatatataggtctaaatgccgaagtaccgatatgtgtatcagtattggaaggatatggatgcacggatacagcagtttttcaaaaaaaaaaaaa

SEQ ID NO: 98948 - DNA, 2488 bp, Zea Mays
agataaccccgcatcgtcagccatggccaacagggtcaccgtcgcaagcgtcatcgccgcggtgggcatcgtcgccgtgatcggcaccatggccacggtgaccagcgccgacgacaacgatggcaacatgctctccagcgtgaaggtctccacggtgtgcgccttcacgcggtacccggagaagtgcgagcagagcctcaagcatgtcgtgagcgacacctccagcccggaggacgtcttccgggacgcgctcaacgtggcgctggacgaggtctccaccgccttccagcggtccgcgcacattggcaaggacgcccaggacaaactcagcaggaacgccatggacgtgtgcaagaagctcctggacgacgccaccgaggacctcagggccctggcacgggtcaagcccgcggacgtggtgcgccacgtcaaggacctccgggtctgggtctccggtatcatgacctacgtctacacctgcgccgacgggttcgagaagcccgagctcaaggaggccatggacaaggtgctgcagaactccaccgagctcagcagcaacgcgctcgctatcctcacccgcctcggcgatctcatgccggggaaagccaaagatctgcaggccaccctggcgggtgctgtggggcacgaccgccggcttcttggctggcagataggcgatgccgaggaggtgaccagcggcggccgcgggcttctggacgagatcgtgggcgtggcaaacgcaaaccggaagctcctgtcggatacgctggacgagatcaccggcatgtcccacggcgcaaacggccggcgcttgcttagctccttggggtctcggatttccagcgcccagggagacgacgtcctcgcccgccaccagctgctgggcgtgtcgcccgacgacgagaccgataacgctgcccggcgcaaccttttgtccaccgagctcgagagcatcgccagcacgtccgccgaggcaaaccgccagcttctcgcggcggaggagctccccgacgagctcgccggtaagcgagagctgctgtcccggacgctcatggggatcgacgaggcggccaccgaggccaagcgccagcttgatgaggcgacgacggagaacaccatgtccggcgaccacagggtactgaccacgggcctcatcggcacgttcgatgagatccaagacgggcgcagcggggtgccgcccagcgacttccccaagtggctgccggccacccagcggaggctcctgcagcagacccagaagcctaacacggtggtcgcccaggacgggagcggcgacttcaagaccatcaccgaggccatcaccgccgtgcccaacaccttcgaggggcgcttcgtcatctacgtgaaggccggcacgtataaggagtacgtcaccgttcccaagaacatggccaacatcttcatgtacggcgacgggccgacacagacggtggtcaccggcgacaagagcaacgcaggcggcttcgccaccttcgcctcagccaccttctctgctgagggcaacgggttcatctgcaagtcgatggggttcgtcaacacggcggggccggaggggcaccaggcggtggcgatgcacgtgcagggcgacaagtcggtgttctacaactgccggttcgaggggtaccaggacacgctgtacgtgcacgccaaccggcagttcttccgcgactgcgaggtgctgggcaccgtggacttcatcttcggcaactcggcggcgctgttccagaactgcctcatgacggtgcgcaagcccggggacagccagtccaacatggtgacggcgcaagggcggacggaccccaacatgcccacgggcatcgtgctccagggctgccgcatcgtgccggagcaggcgctcttccccgaccgcctccagatcgccacctacctcggccggccgtggaaggagtacgcgaggacggtggtgatggagagcaccatcggcgacctcatcaggccggaagggtgggcggagtggatgggcgacctcggcctcaagacgctctactacgccgagtacgccaacaccggcccgggcgccggcaccagcaagagggtcaactggccaggctaccacgtcatcggacaggccgacgccacgccattcaccgccggcgccttcatcgacggcgcgtcatggctgcagagcaccggcacgcccaacgtcatgggattcaccaaagggtaatgatcgggggattgcagtatgcgtgcgatgatgatacgcgcgcgtgtcttcatgcatgcaacatgcttttgggtttatctggaaactgctagcatttttgtgcgcatatatatatagctggaagctcctgtgcacgcatgcacggtgaataggatgacctgtctatatggttagtacgtggagctaacgcaagtgtgtgtttggcacggctccggctacttttaaattgactccggctccaacatttttacaagaggaatttttaataaattatttggc

SEQ ID NO: 98949 - DNA, 918 bp, Zea Mays
tggaccaaaagagttgcatttcatggtagtacatcccatcccagggagaagatacagatcacacatgttccaagtttatgcataagaacacagcacggtttggcctagtatctacatccgcacgacaggaccaccgcccaaccaacccaagaaaccgaagaagaacccgccacctcgcccaggcctccaaaccgaagatttttatcatcagagggaggagaggctcgtcgtcgtcacacacggtggtgctgcaactgcagcagccgcgagtacgcgccctccggccgggccaggaggtcggagtggctgccgtgctccacgacccgcccgtcctgcacgaccgcgatgcggtccacccctcggatcgtcgacagccggtgcgccaccaggacggtggtccgccccttcatcagccgctccagcgcctcctgcagcacgcactccgactccgcgtccagcgcgctcgtcgcctcgtccagcagcaggatggccgggtccttgagcaccgccctggcgatggcgatccgctgcttctgcccgcccgacagctgcatgccccgctcgccgaccgcggtcctgtacccatcgggcagctggctcacgaagccgtgcacgttcgccgtcttcgccgcctcgaccacctcctcctcgctcgcgccttccttgccgtacgcgatgttttccaggatgctcgacgcgaagaggactggctcctgctgcaccaggccgatcttgcgccgcagggacttcaagttcagcgtccggatgtccttgccatcgatggccactttccctccgcacgggtcgtagaaccgctcgatgagagcaatgatggtgctcttccctgagccgctggctccgactagcgcctggctgcgcccagcttggattttcaggttgaagtccttgaagatttgg

SEQ ID NO: 98950 - DNA, 720 bp, Zea Mays
atcagttaatggatgaggcacaaaagatgtatgcaaatggtagtaacggcaaacctttcacgttagttcattggtggaaagctctcagaaatgaacctaaattttgtgcacaaatctcacagatgattaaggaaaaaggtcagagccataccattgacatcactaaagacaaagatcagcttcccttacaacgtcctataggaagagatgcagccaaggctcaaaggaatggtaagcgcaaggcagaagaggttttggatggtattgctcgccttggtgatagcataaacaaaattattgaagtgcaacatgaccgtaagcaagagcgtaaaaaggtggctgaaactcaactagaaatctcaaggttacaactcaaagctgcacaggagcagaaggaggtaaaattgcttgaagtatatagctcactactgcagcaagacactagccaattatctaatcaaggaaagataaaccgagagaaggcattgcaaaagatggagctgaaattatttggtgatagtgaaaatatgatgtgagctgaattatttggtgacattcaagggtgaagtcaagggtgaactgaaaggaaaatatgatgtgaattgaaatgaaagtgttcattttctgagtttgcattcaaatctatttgtgtgtcctgtatgaactgaaatgaaagtgtccatttttatttatatatggcagcacatttatctcaaggaa

SEQ ID NO: 98951 - DNA, 2057 bp, Zea Mays
cgtgtgcttggtgttgctatttctggcatggctgttttggaggcgcggctgcaggtcgacccccctccgtgaccgtctccgtccgccccccgccaccaccgcactcccatccagatgggagtgcgcaagaggagctttcggcattccggtctcgctcgaccaaccggatccccgtgagagtccccacccacaccccgagggcggcgtcgggtcgtcggggacagctgatttcacacgacgagccggcgagccggccggcatttcgtcgtcggatggcgccggcctcctcctcgtccgccggcgtcgcgtgcctcgtcctgctcctgctcctgctcctcgccggcgcctccgcggcgcacggctcgttccaggctaggcgtgctctgtcagatgaccatgggagcggtatagtggcgcgatggcggaggttgctcgccgacgctgcgactccagcgaacaactctcttgtgctggctgcggcgaggactcaccggagcgaccccttcgccaaccttaccgcgtacagcggcggctggaacattagcgacgagcactactgggcttccgtgacgtacaccgcggtgcccctcttcctcatggccgtgctgtggttcgtcggcttcggcatcgtgatgctcgtcatctcctgctgctgctgctgcttctgccggggcaagaacgacgcctactcgccggggtgctacctcagctccctggtgctcctcatcatcttcaccatggccacaatcgccgggtgcctgatcttgcacggcggcagcgacctgttccacgggagcaccatcaggaccgtcgagtacgtcttcgggcagggcaacctgacggtggaccacctgaggaacttcgccgacagcttggcggcggcgaaggacatcacgatcaaccagatcttcctcccggccgatgtccagcagaagatcgacgtcgtcgaggagaagctcaactcctccgcgggcgtcttctccactcgcctgcaggagaactccaggaagatcaagggagtgctgaaccacatggagcacgaactgtttgctgttgcagctgttatggctggcctatcaatactcggattcttgttctccgtactggggttgcggtttcttgtctccctactggtgatcgctgcttggatccttctcaccaataccatcatcagttctggtcttttcctcctcttgcacaacgtggtggcggacacgtgcgtcgcgatgggcgattgggtggcgcacccgcaggcgcacacggcgctggacgacatcctcccgtgcgtggacgtggccacggcgaacgagtcgctgtaccggagccaggaggtgacgtcgcagctggtggcgctggtgaacaacgtcgtcgtcaacatctctaaccggaacttcccgccggggctccgcccgctctacttcaaccagtcggggccgctcatgcccgtgctctgcaacccgttcaacccggacatgagcccccgccggtgcgcgcccggcgaggtcgacttcggcagcgcggcgcgggagtggaagcggttcgagtgccagaccacggggccgccggggtcggagctgtgcgccacgccggggcgcgtgacgcccgcggcgtacggccagatgacggcggcgacgagcgtcagcaaggggctctacgagttcagcccgttcctggtgcagctgcaggactgctccttcgtgcgagagacattcacgtccatcaccaactataactgccccggcctcgagcagtacagccgggacgtctacgtcggcctggtcgtcatctctgccggcgtcatgctgtccgtcgtcttctggatggttcacacacggcaccgacggcggcgcgccatgcgcaagcagctgtgactgagatcttgatggcgcgccaggccacgccacgattgagctttagctgttacaaccgtggtccacgcatccgtttcaaatttgtacaatactcactcggttctaaaattaatcgttgtcgtttaatttctaattctgaaggagtcaaatattttcagtttaattaaatatatacatattaatatc

SEQ ID NO: 98952 - DNA, 711 bp, Zea Mays
atggcgccggcctcctcctcgtccgccggcgtcgcgtgcctcgtcctgctcctgctcctgctcctcgccggcgcctccgcggcgcacggctcgttccaggctaggcgtgctctgtcagtgcaaagatctctgcacgtatgccctgacgaccccgctcgtttccttgtacaaactgccgatcccagcgccgggtgcctgatcttgcacggcggcagcgacctgttccacgggagcaccatcaggaccgtcgagtacgtcttcgggcagggcaacctgacggtggaccacctgaggaacttcgccgacagcttggcggcggcgaaggacatcacgatcaaccagatcttcctcccggccgatgtccagcagaagatcgacgtcgtcgaggagaagctcaactcctccgcgggcgtcttctccactcgcctgcaggagaactccaggaagatcaagggagtgctgaaccacatgtgcgtatggatggatggcagctttgacacgatttgctattttgctatggattttcctggtctcagcaagatcatcagattgaggggggcgtttctgataaccgtagtaaagaacgtactttcgttttgctgatttcagggagcacgaactgtttgctgttgcagctgttatggctggcctatcaatactcggattctgtaagcattcacctctccatgattctgtattcagctacatgac

SEQ ID NO: 98953 - DNA, 602 bp, Zea Mays
gcggagccatgtggacaaacaatataatagcatagcatagggacatgacgacgagctgtgcggcatcttcgatcgtgtcaccactggcgatggacatggcggcgagcggcgcgctccccgtggtggacctggcgccgttcttcacggacggcgacgagggcggcgcttcccgcgccagagccaccgaagccgtgcgccaggcgtgccggacgcatggcttcttccgcgtcgtcaaccacggcgtgccggcacacctcatggcgcgcgcgctcgagctgtcgtccgctttcttcgcgctgccggacgacgacaaggccagggctcgggcgcccgagggctccgaagcaccgctccccgcgggctacgcgcggcagccggcgcactcggcggacaagaacgagtacctcctggtgtttggtcccaagcttgggttcaacgtgtaccccgccgagccatcaggattcaggtcagtcgatcgagaacccaactcgagatgcaagatttagtttgcacgaaggaattggagtattgtttgatcatcaggatttatagaaagtgttatctcataatcagtcgacaatcttcaatatcgttagaaaatt

SEQ ID NO: 98954 - DNA, 1197 bp, Zea Mays
gcggagccatgtggacaaacaatataatagcatagcatagggacatgacgacgagctgtgcggcatcttcgatcgtgtcaccactggcgatggacatggcggcgagcggcgcgctccccgtggtggacctggcgccgttcttcacggacggcgacgagggcggcgcttcccgcgccagagccaccgaagccgtgcgccaggcgtgccggacgcatggcttcttccgcgtcgtcaaccacggcgtgccggcacacctcatggcgcgcgcgctcgagctgtcgtccgctttcttcgcgctgccggacgacgacaaggccagggctcgggcgcccgagggctccgaagcaccgctccccgcgggctacgcgcggcagccggcgcactcggcggacaagaacgagtacctcctggtgtttggtcccaagcttgggttcaacgtgtaccccgccgagccatcaggattcagagaggcagtggaggagtgctacaccaagctcaccgagctggggctgctcgtgcaggaggtcctgaacgagtgcatggacctcccgccgggcttcctcacggactacaacagcgaccgcagcttcgacttcttggcggcgttgcgctacttcccggcgacggaggaggaggacaacggcatcagcgcgcacgaggacgggaactgcatcaccttcgtcatccaggacggcgtcgggggcctcgaggtcctcaacgacgacggcgactgggtcccggcggagcccgtcgagggcagcatcatcgtcaacctaggcgacgtcatacaggtgctgagtaacaacaagctcaagagcgcgacgcaccgggtggtgaggaagcccgtgcacaggcactcgttcgtgttcttcttcaacatccacggggccaagtggatcgagccgctgccggagttcacggccaagatcggcgaagcggcgcggtacagagggttcgtgtacaacgagtacatgcagctgcggatgaggaacaagacccatccaccggcgaggcccgaggacgtcgtccacataacccactacgccatctagcttgctaggcgcagaaactgcataaacaagcaacctgcacacaaatggctgtgtctactcttgttaagattgttgtagtctggccatcgcacgcaccatgcttgctatcattaaaatcgagattaaataaacaacaaatccagct

SEQ ID NO: 98955 - DNA, 760 bp, Zea Mays
atgaagatgagggctcctgccgtggcctttgctgctcttctcatgctgctggtggtggctacaagagcacatggaatcaggctggacaggcagttacatgatgcaatcaacagcagcaaggagatggccgatcccaggaggaccggcgatgccgaagcgtcgtccattgctgctggcgactcggtgaaggagcactgcactcgcgacgggcgttgctcaggaacgaaggcggaaaaggcactggcgcacgctgaagcagcagcggaagcgaagcagcagcagggcgactcgacgggaaacgatcaccgcggcacaacggtgggcggcgaggccgccacgcagcaagggcggcgtcacgaagaggaggcggcggcggcgcccacggattcttattcgtcttcttccccggaggcgccgggcgtggcggcccggcagcggcagacgtacccggacatcatggacatcgccggcatggactactcgcccgccgcgcgaaagcctcccatccacaactgaaggccggccgggcttggtggtggcgcacgtgagtggtgcacgcagcacaagtactagctagagctagagctagtagctagctctatacaggcctatgaagctggtggtgcttgcgatcgactggactggcctattagctttccttgtttgtttgttcattaggttagttgctattagctagctgtcgtagtagcaggtagctagcgagcgagtgctcgacccggtcagtcctgctagctgatcc

SEQ ID NO: 98956 - DNA, 189 bp, Zea Mays
gtagagcattagattaaagcagcttacgtagaagatgacatacgatacatacatacatcagcattacagatgctggggactagagactactatgcacacacacacacagtcttcactgatttcggcttaccaagctcagatgtgcagcaagaacatccctgattctctccccctccctatccttgtcac

SEQ ID NO: 98957 - DNA, 524 bp, Zea Mays
ttctatatatggttccctgctctgtaatcagaagacgaagaagtcaagtagacaaagcgaggcatataaggcattacgtagagcatctggccgacattgccgtcctcggcgggaaccgcgggcagctggatggcgctgcggctggaggggttgtccgtcacgaacccgaacggattgaacgccggggcgtcgtcttctcccttctcccctccagccgtgccgccgctcccgccgtccttgctgcctgccgcgactgtcgcttgcccgcgcctcggcccgccgccgcaccgcagcttgctccgaccaacagcagcgctgaaggcgccaccgctgccgctcctgcaggaagaggagtcggggatagaagggaggaagaagggcgcggtggaggaggaggcactcgcgcaggggcagcagtgagacatggcgggccgcggcagccggtgtgtgtccctaactccctgcgatggtggtgcactggtggctggtgctccggtggctcggtgggcggatcccggcccggc

SEQ ID NO: 98958 - DNA, 143 bp, Zea Mays
cttaattggaccatacactcgaaatgatattttgttaagtatattgtttttgtgtatgaattatatatttaaaaacattttcctaaatggatattataaataaaggacttactccttttatgaatattatttgtgaataaaat

SEQ ID NO: 98959 - DNA, 1448 bp, Zea Mays
tccactcgtgaaccgggacacacgtacgttgaacaaacacccaaggcctgacgagacgagatccggacctccgtcctcccaactagggcgcgcgcgcgacctcggcaccggcggcctcgatccatcgttctctcggatccccgccagtgcatgccctggaacggacggacggaatggcagcgtcgccggaccacctcttcggcctgcgcaacagcttctacgtcggcgcataccacgccgtcatcaccagcagccagtccctccccgcgcacgcgctctcccccgacgacctcgtcgagcgcgacgccctcatgtaccgctcctacatcgccatcggctcctaccagctggtgatcggcgagatcgggcccagcgcggccacgccgctccaggccgtcaagctgctcgccgtgtacctctccggcgacggcgggaacagggaatcggtggtctcgaggcttcgtgagctcctgtcagacgcggcggtcgggagcaatccgattctccgggtgatggccggcaccgtcttcatgcacgaacgcgattacgccgaggctctcaagcacaccaactccggtggcagcatggagctgcttgcgctgaatgttcagatataccttcaaatgaacaggacggaccacgcagagaagcagctcagggtgatgcagcagctggacgaagaccacacgctgacgcagctcgccaacgcatgggtcgaccttgtgctgggtggttccaagatccaagaagcgcgcctcatcttccaggacctgtccgagaagtacccgacgacctgcacgattcttaacgggaaagccctgtgctcgatgcacatgggcaacttcgaggacgcggaggggttgctgctcgagtcactgaacaaggacgccaaggatactgagactctcgccaacctcacggtgtgcagcctgaacctggggaaacccgcaacgcgctacctcaaccagctgaagctcgcacacccggaccacgcgctggtgaagcgaatgtcctccgctgcagagagcttcgacagagcctgccaagcaatggcgtgaacctcgtttgcgaaaattacatttgttttccctaggatgagtcggaataacatcgtgatctactctgaagcaaagcagctagtgcatggctttctcatgggcagcttggactccaccgtcggcatgcttttccactggtctcggatagtacattcggcctcgctggtgcgctggaaaggcccaggtgtttcctttaccttttgggctatgctctctctctctctgacgccttgttgcgatgggagtgactgaggggaagcaatccttgaaatcctaaacaggagatagcatgaaacagtatttggttcaggtactgcaatgctgggggtcatatctcatatgcctgttccgatctgcatataataatagggtgtttggttcaatgagact

SEQ ID NO: 98960 - DNA, 5637 bp, Zea Mays
ctcacatcctatatcctctccagtctccaccctcgcggcgcgccccctcaagttctcattccttctcctcgctcgctcgcctcctcctctcctctcctctcctctgcggtgggaactgcggcggcggcttaaaccctcgcgccggcggcttccggcgctccatcagcgccgcgctcgaaggccgcccgtcgctggtcgagcgcgcgaggcagcaggcaccggctaggcaggcagccaataatggcccccaaggccgggcgtggcaagggcaggggcggcggcggcagaggcggcgacaggaggaagaaggaagagaaagtggtgcccagcgtggtggacgtcacggtcgtcaccccctacgaatcccaggtgacactcaaggggatatcgacggaccgtgtgctggacgtgcggaggctgctggggtcgaacgtggaaacgtgccacctgacaaactattcactctcccatgtggcgcgcgggcaccggctggaggacggcgtggaggtcgtggcgctcaagccctgcgctctccggatcgtcgaagaggagtacgcgacggcggagcaggcggaggcgcacgtgcgccgcctgctggacatcctcgcctgcaccaccgcgttcgccaagccccgggacggcgccgccaagcacaggccgtccaagcacggccgtcccgcgtcgcccggggcccatggcgccgtcagcggcgaggccgccgcgccgccgccgatatcggaggcgcacgacatggccgccatccggccgccgccgaagctgggggagttctacgacttcctctccttcgcgcatctcaccccgcccgtccaccttatcaggaggaaggaggcgagcggcgcttctcgggaaggcgtctacttcgaaatcgagtggctaatccaatttgatttgcgctttagtgttaaatcacaaccgtgcaatagccaatctactaggcgtgtaggtatgagcatacgcctaatgaaggagttcatctgtgcccaggtgaaggtttgcaacgggaagcttctgcacgtagttgcttcacgaaagggtttctacttggcagggaagccacaaaacgcatatgaggcgttgatgaaagcttttgtggaccacaataagtttgggaatttgccatatgggttccgtgcaaacacgtggcttattcctccaatatatgttgatcccgccacaaagtgcccagcactgccagttgaggatgagaattggggtggaaatgggggtggctgtggtcgtgatggaagatatgatcgcagatgctggtcaaaagagttctctgttctgtctagaatgccatgcaaatctgacgaagaacgggtgatcagagaccggaaagcttttcttttacacaatctgtttgtagatacagcaatttttagagctgcatcaacaatacggcgactcattgatcagtctatgaactcaattggttcccgtggtactactcatggttcaaacgtatttgaggaacatatcggcgacatgaatataactgtgaagaaagatgaggctgatgctagttcaaaggtggacgacaaggttgatggtgttgccttctgtaaaacaggtgctatggatattgcacaaaagaatcttctgaaaggtttaacttctgatgaaaatgttcttattaaggattcttccacactcggagtggtgattgtcaagcattgtggatatacagcaactgtgaaggtttctggacgtgcaaaggacagtaatgatgttaaacaaacacatgacgtctctgataattttgatggaatgctgaacattgatgtgcctgaccatccagatggaggttctaatgccttgaatgtcaacagtctaaggataccactccaaagtgttacgcatccagaaactgttgttggtaagcagaaccctagcccaaagtctcatgcttataaccccgcaaggaaactggcatgcaaaatacttgaggacagcttggtaaagcttgatagcatgcctagcataaattctagaattatcagatgggaacttgggtcctcctggctacaacagttacagaaaaaggattctccggcatctgagaatgttaagcggaatgcaacaaaggctgataaagaatcagctgtcaaaggtcttggaaagcattttgaacaattaaagaaaattaaaaagaaagaatgcaacattgacggttccagttctgagaaggaagaatgtaacagtaactgctcgtcaatgaatggtatgcaagtatcagataagatatctgttgatgaaacgaataagggagctgattccctcgaagagctcacaaagatggcccataatttctatgatgagactgcactcccaaagctggtggctgatttcgcgtcccttgagctttctcctgtggatggaagaaccatgaccgatttcatgcatacaaggggacttaatatgtcctctttaggtcgtgtggtagagctagcagagaagctcccacacatccagtctatatgcattcatgaaatggttattagatcctttaagcacatcgtccgagctgttattgctgctgttgatgacatgcaaaatatttctgcagctatagctgaaactctaaacatattacttggatctcccagacttgaaaatggtgctgacacagatgcccatattgacaataatttgcgtttgaaatgggttggactggagctagttgcaagagattatgatatgaatagccctaacccatttgacaaatctgacattgtcagcattgttcctgtatgcaagcatgtggtctactcatctattgatggtcgaaacttactggaatcatcgaagatggcattggataaaggaaaattagatgatgctgtgagctatggaacaaaggcattgtccaaaattatagctgtttgtggtccataccatcgactgacggctaatgcatacagccttcttgctgtggtgctttatcatactggagattttaatcaggcaactgtatatcaacagaaggcacttgatatcaatgaaagggagcttggtcttgatcatccggaaactatgaagagttatggggatttatctgtcttctattatcgccttcaacacattgaaatggctctaaagtatgtcaaccgtgcactatatctgcttcagttctcgtgtgggctttcacacccgaattcagctgccacctacataaatgtggctatgatggaagaaggcatgggaaatgttcatgttgctcttcgatacttgcatgaagccctgaagtgcaacaagaggttgctaggagctgatcacatccagactgctgcaagctaccatgccatagccatagccctttcaatgatggacgcgtactccctaagcgtgcaacatgaacaaacaaccttgcagatacttcaggagaaactagggcaagatgacctccgaactcaggatgctgctgcatggctagaatattttgagtcaaaagcattagaacaacaagaggcggctcgaagaggcatgccaaaacctgattcatctattgcaagtaaaggacatcttagtgtatcagatcttcttgacttcataagcccagaccaggaaagaaaagaaagggatatgcaaaggaaatgcaggcgtgcaaagaataatatcagagctcatcatggtgaatcagttgaagagaaggagaattttcagcttgtttcaggatctcctcttgaagcaagcaaagacagttttcaagaagaaaaactggatgtgcatcctcctgctgtattagaagaaaattatgctgcccatgatgagcataagcaatgtgatgttttatcaccagaagaatattctgatgaagggtggcaagcagctagtatgagaggaagatctgcaaatgtaaggaagaaaagcagtcgcaggaaaccggctcttatgaaattaatggttgatcattttgaaggtagtcatacaggttctgtgtataggactggtttacaacctcaaacaaaaggagacaaagaagattctgtaagtgctcctagccagctttcatttggaagttttttgaaaaccgacaagttgaatggggattccagcattgctgaagataagacgtgcaatggtagcgctaaccaagaacaacggacaaagctaacaggaattaacaggccaaccagtatcgcttccaaattcatatcatacaaagatgtggctgtttcgccccctggcacagtattgaaacccattttggagaagaaggaagcaaaggagaaagatagtggacgtgatattgacctagcactgtcatccgaggaagaagataaaaagtttacagaaaaagagaaagaaaagccaagtgaggacagtagcaaagagattctttcaattcagcgagatttagagagtcatgcagaaatacctcctgacagcaacagtgatgaaggcccatctgcagctagtaaagcgtctggaagcaaactgtcagcttcagctcctccattcaatccaggatcagtgttatcaatgtcccagccatacagcacggtggcagtatatgatgccagtgctatccttcaggcaataccaagtcaagcaatggagattctcccttctgccattgacactagagtgcctcgtggtcctcggtccaccttgtactatcgtactgggcattccttccaaaggaaacaaggttacacgcacagccagagcactattgtaaggggtagctactcccccacaaccatgaatccacatgctgctgaatttgtgcctggaaaaacttcgcaacaatctgatgtggctgacagagaacccagtcctgctaatcctgtggccaattctgatctggatgttgtatcgcagaccacagatgaagcgagggccgaaacgcctgccacagaaaaggcaggtcaggttgagaaagtcgtttcaggtaaaggaaaggaaaacagggggaaagacatcgtgagaaactcatacaaaacagaacttgcaaggcaaattttactcagtttcattgtgaagtcggtgcacgacagtttaggtccctcccgggctgaaccagagaggaagccaagtggatcagatgaagctagtaatgaacagaccagcgtcttaggcaagaacgcttctggttctggtcgcaaagatccagataaacaagagaaagcgacggaggttactaagggcctgaaggatacagagggattcactgtcgtttcaaaacgccgaaggcgtccccagccgttcatgaaccccataaatggcctatattctcagccgtctatttgcacctctgtcagttaaggtcattgcgttttcgaagacctgcaatattttgagagatggacctttgccttcgcctttgcctttgcttagaggattggtagcagagattttccctatccaagtgagctgtgagcagcgagcatttagttaaactgtacaaaaggtttccgggataccctttttgtaataaaagaaactgatgtattccgcagtagctgtagcgctggatataatgttcctttgtatgttatatatgacagaatcataggaaatagcagatgttaagttaatccgatattcagtggagcgcccttgtgctttatgatgttcctcatgttgtgagccccagttaatcattgcaatttg

SEQ ID NO: 98961 - DNA, 714 bp, Zea Mays
atggacgcgctgtgcccgcaggtcctgcacgtagccgtggccgggcgcgcgctggcggtggtggagcgcgacggcacgagcgacccggccacgggccgcgtcctcaccggctcctggctgtgggagtcgtccctggtcctggccgcgcacctcgccgcggacccccgcgccaggcgccgcctccgtggcgccaccgtcgtggagctcggcgccggcacggggctcccgggcatcgccgccgtggcctgcctcggcgccgcgcgctgcgtgctcacggacgtggccgcgctgctgccgggcctcagggccaacgcggacgccaacggcctcagcgccgcgcgggcccgcgtgcgcgagctccgctggggcgacctgctcccgctcgacgacggcgacgggagggtgggcgtcgtgctcttgtccgacgtcttctacgatcccgaggacatgccggcgatggcggccacgctgcggggtatgtggtggacggacgagggcggcggcggcaccgcggggtgggcggcgagcgaggtgcgggacagcgtgctggactgcatggacgtgctgcgggagcatggttttgaggtggtcgaggtcgacagggtcaccacgccgctgctgcgcgaccccggacagagtgccgccttcgccgtctatcgcatctcgctccgacatggcgactatgagaacttcagttgctcgctaagctgctag

SEQ ID NO: 98962 - DNA, 821 bp, Zea Mays
accgcgaccgctccgctcgccacgccacgccacggtctcgtgaggccggcgcccggagccagcgggccatgttcaccgacggcatgtcgaggctggcggtggcggtgagcgtcacggtggcgttcagcctggccatcttcctcaccatcctagtgctcctcctcgcggacctcatctgcgcgcacctccggcgccggcggctccgcgccgaggcgtcctggtcgaagctcggcctggcgctggcgacgccgccgtccccggcgcgcgacgccgccgcgtcgtcgtcacgcgaggcgttcgccggcacgccgcccttctactacgcgcacggcgtcctgcacgcgcccagcaccaaggacctcctcgtcgccatccccaggctggagggcgccgtgtggcggtggtcgccgccgccgccgtcgcgctcgggctcgtcgggagccacctcggcgtgcggcgacgcgttcatgtgcatctccaacccggtgtacgaccgagggcagaccgcggccgccggcggtggggagacgccgccgttcgagacgccgggctcgtcgccgtacggggtcacggaggaggaggcgtgcgcgtacgacgagaaggatgccggcgggttctcgccgccgctgtcggctatgaggaagctcccgccgttgggcgtcctggccgcgtaccccccgccggcgctgagcttcgccgatggcgggccgtcgccgcaggcaacggtgggcgacaccaaccgggcctcctcctcctcatcgtccgcccactttttctcttattggtcgtcgaagtaagagatcacttgtaccgtgcgcgaa

SEQ ID NO: 98963 - DNA, 2685 bp, Zea Mays
acctcctgtcaccaccaccacacccctcctcctcccctgtctttctccctctccctcttgacaaaatttcctccacccattctcttcctcctcttcttccccaccgactccaccgatccacctctttctatctgaatttcctctcgtcttgcccaccgctccatctgtctgttgcctctctctctcgcaaccaatcggttcttgtttcctccgtctgctgggttgattctctctctcttcctctccgtggagaggagaggatcgagaaacaggagacaggaaagaagagaaatcagaacggagcctgttcttttgcctggattgcggttctcgcgagttgttcagaaactctgggccagtttctggtcctttaaaatactggaacgaggaaccatcagagatgctaaggcaacagaccaattgatgttatctcgctaccctagtttggatcatcacaatgcaaggacagaggaattctgtggagcattttgctgatgtttttggattcgacattgcatctagttcaggcaaccctgtgatggatcagcagtcatattggaacaatgttcttggatcagtagaatcgcagaatcttcaaggttatcagatgaatcacagtgatgctgccatgccatatgggaatgagacacagcaagatggtacatttcttggtttctgggaatcaggcgaagcaagtgcaagtggcagctctaacaatgccaaaacagagcatcttagtattggcggtggtctgaggattggtgaaaggcgactggtagctgacaatggcatttctctggatgtggatatcaaccttaacgccaacgttaacgatctatgtggtcaaagttcaaatgttaactgtacatctcagggccctgagcactatggtggcggtgatcgtagtgttgtaaattctcagccaactgacctgagattacacccatacaggactttcctactagatgcagagcaagcagattcttttactttgaaccctagtgaaaaccctttgtgtgatttttcactgatgcaagaaagcattgaccaaagacccggtagttccctggatggacgccggctagcctgcaagagaaaaaatgttgaaggacccaatggccagagttcagcaggtgctagcactagtttttcccacaggaacgacaatgctttccataacattgcttcttcaagttacaatcctgcacctatcagaaatccgtcctcacccaattgcttgccggttccaagttctatcgatgatcaactcccacgatatggaactaatgcagggctctcagccggtacctatgaccttaatggaggggtcaacaatgctgggaattcgcagagaagtttccgggcaagaattactacgtctcaacagattgctccctgtagtgtatggccctcttcaaatgctatcagacttcctaattcatggaatcatcagccacctcattttcaaagtgcatttgatgatacccaggaggttattcctgtggtcagcagcctcaacttgcaataccagcatccagtgaatgtttctagtgtgccaccggctgcaaaccgtttcactggccatggagcttcatcatcgagagctggcagtttggagaacagaattcttggtagtcaagaggctcctacaaggaatgtggtgcctgccaactactctgatttagttcccccgtctgtagtagacccgagacgtttgctgccagaaccatctaattggagttctgatgtccgaggcactgcaatatcaggaagtattcctcctgtatcaagagctaataacagtgcaactgttaatccgccagcaggattcagtcaccaaaacctcacccggcgccatcctcgaaatttatcagaggagattggtcggctatctggagcacttcgcggccatcaacccccacgcttaaggccggggtttctgttggagcgccagggcgatggtgtttggggtgttcctttatcaacaaggggtagagaaggaagaaggttaatggagattcggaatgcacttgaaatgatccatagaggggagaatgtaaggcttgagtctatcttctatggcggtgttgacattcacgatagacacagggacatgcgccttgacattgacaatatgtcctatgaggtttgtgttccttagtgaagcattacctgcacctttgcgaatctaaaatctaatctaagatggttgccctactttcaggagctattagcactcgaggaaagaataggaaatgtcggcactggcctcagcgaggaagctgtgataaggttgctcaaacaaaggaaattttcatcttggacactaaaagcatctttggaccctgaaccatgttgtatctgccaggaggagtacgctgatggagacgacctcgggaagctggactgcgggcacgacttccacgctggctgcatcaagcaatggctggtggtgaagaacgtgtgccccatctgcaagagcaccgcattgaagaagacctgaaacccgaacaaaggctcgtgtcagagacatcccccatgtttctatgttcactcgatggttcgcgagatcatttgccgattcgtattgctacgcttttttttttttggtcgggaaaattttgccagccaccttttggttaatgtctttcctgcttgatgtagtgaatttggactatgcctgat

SEQ ID NO: 98964 - DNA, 317 bp, Zea Mays
ccccctcctttcctctccctttccccattgccaccgtgcgccattgcgaaagaaagtagccgccgtacttgttcccagaccaccgcgccacccgtggccgaattggagtgcagggagtttcgcctgacaccactggagccgctcatcacatcgctggacgagaagggcccctggacctccataattgctcgacggaggccgctactgccgccaaaccccgtcgtcggctctctacaccgatcaaccaccgaagagcccgtgaccgaggaccctggtgagcagcaggttgaagtagctgagcaggagctcattgaagg

SEQ ID NO: 98965 - DNA, 1406 bp, Zea Mays
gtccccgtcccctgcctctctctctctctcacatccccatgctctctgcttgtgcttgtggcaatgcagggattgcggcaagcaggtctatctgggcggatttgacaccgcccatgcggctgctcgggcgtacgatcgagcggcgatcaagttccgcggcgtggaggccgacatcaatttcagcttggaggattaccaagacgacatgaagcagatgtgccacctgagcaaggaggagttcgttcacgtgctccggcggcagagcacggggttcccccggggcagctccaagtacaggggcgtgacgctccacaagtgcgggcggtgggaggcgcgcatgggccagttcctcggcaagaagtacgtctacttgggcctgttcgacaccgaggaggaagccgccagggcgtacgaccgcgcggccatcaagtgcaacggcaaggacgcggtgacaaacttcgatcccagcatttacgccgaggaggaggtcgcgccggcggcggcgacgggcggcgccgccggcgacgagcacaacctggacctgtcgctgggaagctcggcggggaacaaaaggggcagccttgacggcggcggcggcggcggcggcgacgacaagtcctcggaccagcgcgtccccatggcgttcgacatcgactggcagacggccgcacgtcggagcaccaaggcaaagctcctgagcaacggcgatccggggaccgcggcgggaggcctttccctggcgatcggcggcggaggcgggcactggcctccgcagctgcagcatcagcagcagcagcagaggctccacggcgccaggaacaacggcggcggcacgagctggccgccgccgccgcacccgtgcccgccgccagtaccggccgccgccgcgaccgcagctgcagcatcatcacgattccatccctacgttgttacgagtacgacgcaaagcccggccggctgggtccagaagaatgggttccattcgctggccaggcccacgtagaccaagaaccaggactgggcgttcgtccttcgatcgtattccacggcgaaggtccatcatttgacccaagggcaaacggctcgtcgatccaccgatttacaccccctccccctttctttcccttttccattctctgtgttcttgattgggtgagacatggatccgaggatggatgggcctgctgcccccctgctgtaaatgaggagtttccgggaagaagacgagtgctttggtaggcgactaggcgtcgcgtcaggcagtgcgtccttttgccgctttttgttctctctcccccccttctgcattcactcaccaatcaccattggcaagcaccgatgaatggtggcatggggtgtcaacatcgcagctcattttgtttggtctcatgttgcatcactcgctg

SEQ ID NO: 98966 - DNA, 1551 bp, Zea Mays
atgcctaggctctccctcaccgtcactgacgacgccgctgccatgccctttgcgcttcggcttggtggttccccagcgcttcgcccgggctcgcagtccccatcgtggctgcgctttggcggcagggccggggtgcggaaggcgctgttctgctccgccgaggacgctaggcggtgtggctcggacggaggggaacgggagcacatgccgagggcgtgctacggcgagaggctgcgcggcggtggtctctgtatccaccgggaggccatcgactggatttggaaggcttacacacactacagcttccatcctctcactgcctacttggcagtgaactatctcaatcgtttcctctcactgtctgagtgtctgagctactggaacaaggactggatgacgcaactcctctcggtggcgtgtgttttacactttcgctttcgctggctgccaaagatggaggaaatccccgtcatgcaatctctggaccttcaggtgggagatgtgtgttatgtgtttgaggcgaagacggtccatagaatggagctccttgttctaaccaccctcaactggaggatgaaggccatcacacctttctcctacatggattacttcctgaacaagctcaatggtggaaacacgaacatgattgtcattttattgagggagattggaaccggctgcttagggtttcggccgtctgagattgctgccgcagttgcagccacagtggccggagaagtggacgcgacaggcatcgagaacgcctatgctcacatagataaggagcctattgatgaaacacatgttcctgaggtcataaatgaagtgccgaagaagttccaatttcatctccccctgtaccactggaggagacaccaaagaagtcatatgcttcaattgtttggacgcgactggaagaagatcgaggagcatgtcggcaccaagacgacggtccagatacggagccacgcccagaaatacttcgtcaaggtccagaagcttgggctggctgttgggctgccgccgatgtacccgaggcgccacttcgccatgcagcagcagcagcagagctcggtagccggtggtagcagcgcggccgccatgccgctgctgcacggccggcaacctacttgcgcgccggtcgccatgccaggtctggccgagcccgacgccgtcgcccatcacggttccatcggatggagcagccccagtgtggtcgtccccgcggccagcagcgacggcggcggcaaggatgcaaggcttggacttggagtgggtggcaggcgcttcggttccaggggcaaatatttggttttacacatgcaggtggatgtgttctcttttgggatagttttatggaagatcttgactggtgaggaaccgtatgcaaatatgcattgtggtgctatcatagctgcttctgatgagatcctcgcagttgacactccttcagaaggaggcgatgctgttattgtcagtagcagtgacaattctacatctactccatcagcttgtaaccttgcccggttcattgggcaaggttacaagcag

SEQ ID NO: 98967 - DNA, 790 bp, Zea Mays
atctccaaggtcagttgctaatttatttgttggattggactccgtcgtccaaaacaagatgacaatcagacaaagcaaatcataaagggtatgcaatcattatttctctcgatctgtgagtcgtgaatgaatcggattttacttcatcgacgaactggcatcctgcaccatgtgacaactgacaaggcgacagcagttgcacctatagacgcgccgtcaggccagggtatcgcactgaggctgctagggccggacgcctacgagccgctggggctgctggtgccggacgccaggccgcgcgcccacggggctgctggggccggacgcgccgtgccgaggccgccccatggccggatcctgcgacggtgtggcgcgcgctcaccggggcctggccagagcgcccgccccgccgggggcccagcctactcgccgcctgggggccacgcgccgagtccgtgcccgcctgccgccgcgaggctgcgttcctggcaccgccgcagaaccgcgcaggccggatccacgcgccgccgcgaaaaatgccgtcagggctgccggcggctctgggaaaggaggagcggttagggttttaccctaactgccactcttgtatggccggttgggccgctgcctgaccgcctgggccgcgctggccggctaggccgcatgggctgttcgcccacatgtttgaatgggctaaatttactcatttttattttctgtatttttaaatacatgactatgattatttgtatcacagttttaatcagtatttattatcaatatttaaata

SEQ ID NO: 98968 - DNA, 86 bp, Zea Mays
atggtttgtcttttttatatatataacttcaacattgcattttacaacttctctttgatatttaaaagctcaaaaatgcttcattg

SEQ ID NO: 98969 - DNA, 4290 bp, Zea Mays
accaattgattttcttcacccgtccacctcgtcttgcgctcctctgtctcggcgacgactgtgctaccgccgccgccgccgcaagacttcgtcgggcactttgccggcgacgatttcccaccagaggaggtgatggcgaggagtgacagctgcctggcgcgcgtgggtgccggaattgctatcggtggcgcggtcggcggagccgtcggtgcttgctatggaacttttgaggcgttcagatacaagatccctggattgctaaagatcagatacattgggcaaaccaccgttggcagcgctgcgatttttgggcttttcttgggggctgggagcttgattcactgtggaaaatcctactagtttgtttccctttttttttctgaagtctgaacacacctttgtcgatgggcttcagtgaaaactattcaatgcctgtttcatgtaacagctaatagctcagggttggaaaagaacaatcaagttatgtcctagttttggtgtggatggaaatagaatcaacgttcatctgcacgagaatcgtcaatttctcatctagcgtcttatgttctcatctcattttctttaaaaacgtaaggaattctttactcaccatatactttagctcggcagggcgccgcgaagcgcgcaactttttgtttactagtacttattagcagccggtgaagtaataaaagtgcgtacagcttttgctttactttttgtttacctattgcatccctactttggctctgaagtgtcctgccagcggcctgcgtacttaggcctaatttgataggccatgagtatgtggccagctgagtggcgcgcaggccataaatgcgctgcagtcagaggggctacttctaccgtcgcgagtactgcaccgcgtgcgcgtcctccacgaccagacacgtgtcccgccagtcctcgaccgcgccggcaacacggttcactccaccacgtcctcgcgcgagtgcgtgtctcaggtgttagccacgacgactggccacccggctgctccggtccgtcagttaagacccagcactcgtccttcatcgctctcggtccatcagcacgagcccgtatgaccttcacctcggccgtcgaccaccatccctatgctccacacctacacaccacaagccgaccgatatggttgcacaaaacataatctcacactctggtcagtccacagactaccacagagtgctattcgttgataatcactcatcatcaacccgaaccacaagggaagagacaaatcaaccttgtgttcgcacttttccaaccctatttctccacaagccgaccacaaaggtcaaggcaaatcctttccttaaacttgctcaacgagcgggagatacaaacttcttggggtcttccacaagttggagactcccaagcacacacaaaccgtcaaggaaccaaagttccaagagtaataaattcgcacaagtgaagtttgcaaaacgagctcaagtgagggagagggaggaggagagtgaaaaaccaacaacaaatcaacgaacgtcacctcacaccgaagatcctccaaccgttggaagaggatgcgatttgaggtgtgggagatagagttagagcgcttgttttgagtttggtgagcagtaaagtcagggagagtggctgaagtaaatgaggagagagagggaaaggggagtatatataggtgtccctctctcagggcagaagatttgaaaaatctgtgcaaaggtcggttgaaccgcacccagggccggttcaaccgtctgataggtcagacctatcagaacggccttctgactaaaggtcggttgaaccgcaccctagggccggttcaaccgctattttccagagaggtctgagtataaagtccggttgaaccagccaacagggcgaggttcaaccgcattttgtcagagaggtttgcgaggccggttcaaccgctttttaccagagacttccggaacagagtccggttgaaccgcaccctagggccggttcaaccacacttttccagagacttcttttggagaagtcaggttgaattgcccctgaggtaggttcaacctttcttcctagagagggtatcaaatgcaaattctctggagcggattgaacttttgcaaaccaaattcgaaatgcggttttcaaaatagattttgaagagtagagattttgagctcttgcaaacattttatacctttgtgcgaatccctcttgattgtacggtgaatcctatgactcaagaaaaagtaaatttcgaagagccttctcttggaaacaccagaaacacagtgcgatgtatgaaccaagttttagtagttatcgccttgatccgtgtttcttcctcttttaaaatgtattctgtttatctacctaatttgcaataactaaatatacacttggagcaaacttgttagacaccttatttgttttgtcatttaatgaccaaaaccttcaaaaaggttgattgtacttacaccttcggcggttgcgcagaggaaagcggttgcccgacagcgctcctctcggtatgttgggcttctgcttctccttcgcattcggctctttcccttgttccatgtttttttgagattcctctggttagcatgtacgtatcgagcaagtctgtgaacgacgcggctttggcggcgaagggggcgccccgtcccctcgggtcctcttactgccggcgccggatggggcggctcctttcgctgtcgccttcgtcccaccagctgaggcggcgactgctcctcgcgtggcagacgctccagcctccttggtcgtcctggaggtgccaggagtggttgcccctggtgcggccttctttgagccgccgccttctgcacctggcccggggcaggtttcggtcgccgaggaagtcgttgtcggcgcgcgctcggtggcggcagggtcggtcgccggtctgccgccgccgcccccgccccgtgaagggggttctgggttggcgctgttgcccgcggaggtcgccgcgccctaggtgccaccgccgcctgccgctattgccttgacttccgcaggtgccgcggtacccatgggatctgaggaaatccacggggggcttcccctctccctccctgaaggacggggggcagaggcagaagagtggcagcggaccgagtcagcctcgtctcgggccaactcgagcttagaaactatcgagcgcatgttcggtagcttcgaggaggcgatttcgattgcttgggcgtcgatgacgcgggatctgattccttttggttagcgcctccttatgcggtcggtggctcgagaggaagcgctactagccgcccaacaggaggtggagcagttgcgtgctggggccattcggctcagggagtgggagcgcgagctcaccaccctttgttctgaggctgtccggcttcggagcgagacgccgctcctacgcgtggagcatgacgatgcttagggcaacatggatcacctacgggaggaggggtcccgactctaagaggccctcgatgggatgagccttggggccgagggggccacgccgaaccttggggaggtcgacgcctgtctaggggaggcaaactcggagctccaaagggaacgcaatgcaactggaggtcagcgcttctccttcctctttgcttgtgttgcctgatgcaccgaggtgctttatcttcctttctttctcagagctctaaaagatgatttcccaagctgaggtcgccaggaaggcagcagaagaggcgaagacggtggcagaaggaaggatacgagagctctcgcttgcttgtgatggcaccgttgtttcgagactccaggcggagacctcactttcggagcggagcgccgagctccaagtgcttcacccgatcgtcggctcggtgtgcactcacctttcttctccaccgccgatcgaggtccctctaatcaatcggctgcgagcgctgtccgatcatgtggagcacgtggtcgtcgagggagcatatcacgggagcatccttgccctgggacagatggtctcccatttcgatgaaatcgactctggtgtgatcgcggaaggcttcgccgccggttgaagtgacgaggagctgggtgccattgaggtgcaggtccatccccacgcccggtcgatcgtgggccgggtcaatgtgaagttcctcctgatcgacccctggagcctgggaccactcgccggtggtccgtccacccattcttagtcggcgttcattgtaatgttttgtaatgactatctttagatgtcctgactgtgatcttatgtataatattatctgtttt

SEQ ID NO: 98970 - DNA, 4296 bp, Zea Mays
accaattgattttcttcacccgtccacctcgtcttgcgctcctctgtctcggcgacgactgtgctaccgccgccgccgccgcaagacttcgtcgggcactttgccggcgacgatttcccaccaggatcagaggaggtgatggcgaggagtgacagctgcctggcgcgcgtgggtgccggaattgctatcggtggcgcggtcggcggagccgtcggtgcttgctatggaacttttgaggcgttcagatacaagatccctggattgctaaagatcagatacattgggcaaaccaccgttggcagcgctgcgatttttgggcttttcttgggggctgggagcttgattcactgtggaaaatcctactagtttgtttccctttttttttctgaagtctgaacacacctttgtcgatgggcttcagtgaaaactattcaatgcctgtttcatgtaacagctaatagctcagggttggaaaagaacaatcaagttatgtcctagttttggtgtggatggaaatagaatcaacgttcatctgcacgagaatcgtcaatttctcatctagcgtcttatgttctcatctcattttctttaaaaacgtaaggaattctttactcaccatatactttagctcggcagggcgccgcgaagcgcgcaactttttgtttactagtacttattagcagccggtgaagtaataaaagtgcgtacagcttttgctttactttttgtttacctattgcatccctactttggctctgaagtgtcctgccagcggcctgcgtacttaggcctaatttgataggccatgagtatgtggccagctgagtggcgcgcaggccataaatgcgctgcagtcagaggggctacttctaccgtcgcgagtactgcaccgcgtgcgcgtcctccacgaccagacacgtgtcccgccagtcctcgaccgcgccggcaacacggttcactccaccacgtcctcgcgcgagtgcgtgtctcaggtgttagccacgacgactggccacccggctgctccggtccgtcagttaagacccagcactcgtccttcatcgctctcggtccatcagcacgagcccgtatgaccttcacctcggccgtcgaccaccatccctatgctccacacctacacaccacaagccgaccgatatggttgcacaaaacataatctcacactctggtcagtccacagactaccacagagtgctattcgttgataatcactcatcatcaacccgaaccacaagggaagagacaaatcaaccttgtgttcgcacttttccaaccctatttctccacaagccgaccacaaaggtcaaggcaaatcctttccttaaacttgctcaacgagcgggagatacaaacttcttggggtcttccacaagttggagactcccaagcacacacaaaccgtcaaggaaccaaagttccaagagtaataaattcgcacaagtgaagtttgcaaaacgagctcaagtgagggagagggaggaggagagtgaaaaaccaacaacaaatcaacgaacgtcacctcacaccgaagatcctccaaccgttggaagaggatgcgatttgaggtgtgggagatagagttagagcgcttgttttgagtttggtgagcagtaaagtcagggagagtggctgaagtaaatgaggagagagagggaaaggggagtatatataggtgtccctctctcagggcagaagatttgaaaaatctgtgcaaaggtcggttgaaccgcacccagggccggttcaaccgtctgataggtcagacctatcagaacggccttctgactaaaggtcggttgaaccgcaccctagggccggttcaaccgctattttccagagaggtctgagtataaagtccggttgaaccagccaacagggcgaggttcaaccgcattttgtcagagaggtttgcgaggccggttcaaccgctttttaccagagacttccggaacagagtccggttgaaccgcaccctagggccggttcaaccacacttttccagagacttcttttggagaagtcaggttgaattgcccctgaggtaggttcaacctttcttcctagagagggtatcaaatgcaaattctctggagcggattgaacttttgcaaaccaaattcgaaatgcggttttcaaaatagattttgaagagtagagattttgagctcttgcaaacattttatacctttgtgcgaatccctcttgattgtacggtgaatcctatgactcaagaaaaagtaaatttcgaagagccttctcttggaaacaccagaaacacagtgcgatgtatgaaccaagttttagtagttatcgccttgatccgtgtttcttcctcttttaaaatgtattctgtttatctacctaatttgcaataactaaatatacacttggagcaaacttgttagacaccttatttgttttgtcatttaatgaccaaaaccttcaaaaaggttgattgtacttacaccttcggcggttgcgcagaggaaagcggttgcccgacagcgctcctctcggtatgttgggcttctgcttctccttcgcattcggctctttcccttgttccatgtttttttgagattcctctggttagcatgtacgtatcgagcaagtctgtgaacgacgcggctttggcggcgaagggggcgccccgtcccctcgggtcctcttactgccggcgccggatggggcggctcctttcgctgtcgccttcgtcccaccagctgaggcggcgactgctcctcgcgtggcagacgctccagcctccttggtcgtcctggaggtgccaggagtggttgcccctggtgcggccttctttgagccgccgccttctgcacctggcccggggcaggtttcggtcgccgaggaagtcgttgtcggcgcgcgctcggtggcggcagggtcggtcgccggtctgccgccgccgcccccgccccgtgaagggggttctgggttggcgctgttgcccgcggaggtcgccgcgccctaggtgccaccgccgcctgccgctattgccttgacttccgcaggtgccgcggtacccatgggatctgaggaaatccacggggggcttcccctctccctccctgaaggacggggggcagaggcagaagagtggcagcggaccgagtcagcctcgtctcgggccaactcgagcttagaaactatcgagcgcatgttcggtagcttcgaggaggcgatttcgattgcttgggcgtcgatgacgcgggatctgattccttttggttagcgcctccttatgcggtcggtggctcgagaggaagcgctactagccgcccaacaggaggtggagcagttgcgtgctggggccattcggctcagggagtgggagcgcgagctcaccaccctttgttctgaggctgtccggcttcggagcgagacgccgctcctacgcgtggagcatgacgatgcttagggcaacatggatcacctacgggaggaggggtcccgactctaagaggccctcgatgggatgagccttggggccgagggggccacgccgaaccttggggaggtcgacgcctgtctaggggaggcaaactcggagctccaaagggaacgcaatgcaactggaggtcagcgcttctccttcctctttgcttgtgttgcctgatgcaccgaggtgctttatcttcctttctttctcagagctctaaaagatgatttcccaagctgaggtcgccaggaaggcagcagaagaggcgaagacggtggcagaaggaaggatacgagagctctcgcttgcttgtgatggcaccgttgtttcgagactccaggcggagacctcactttcggagcggagcgccgagctccaagtgcttcacccgatcgtcggctcggtgtgcactcacctttcttctccaccgccgatcgaggtccctctaatcaatcggctgcgagcgctgtccgatcatgtggagcacgtggtcgtcgagggagcatatcacgggagcatccttgccctgggacagatggtctcccatttcgatgaaatcgactctggtgtgatcgcggaaggcttcgccgccggttgaagtgacgaggagctgggtgccattgaggtgcaggtccatccccacgcccggtcgatcgtgggccgggtcaatgtgaagttcctcctgatcgacccctggagcctgggaccactcgccggtggtccgtccacccattcttagtcggcgttcattgtaatgttttgtaatgactatctttagatgtcctgactgtgatcttatgtataatattatctgtttt

SEQ ID NO: 98971 - DNA, 4304 bp, Zea Mays
accaattgattttcttcacccgtccacctcgtcttgcgctcctctgtctcggcgacgactgtgctaccgccgccgccgccgcaagacttcgtcgggcactttgccggcgacgatttcccaccagcccaacaggatcagaggaggtgatggcgaggagtgacagctgcctggcgcgcgtgggtgccggaattgctatcggtggcgcggtcggcggagccgtcggtgcttgctatggaacttttgaggcgttcagatacaagatccctggattgctaaagatcagatacattgggcaaaccaccgttggcagcgctgcgatttttgggcttttcttgggggctgggagcttgattcactgtggaaaatcctactagtttgtttccctttttttttctgaagtctgaacacacctttgtcgatgggcttcagtgaaaactattcaatgcctgtttcatgtaacagctaatagctcagggttggaaaagaacaatcaagttatgtcctagttttggtgtggatggaaatagaatcaacgttcatctgcacgagaatcgtcaatttctcatctagcgtcttatgttctcatctcattttctttaaaaacgtaaggaattctttactcaccatatactttagctcggcagggcgccgcgaagcgcgcaactttttgtttactagtacttattagcagccggtgaagtaataaaagtgcgtacagcttttgctttactttttgtttacctattgcatccctactttggctctgaagtgtcctgccagcggcctgcgtacttaggcctaatttgataggccatgagtatgtggccagctgagtggcgcgcaggccataaatgcgctgcagtcagaggggctacttctaccgtcgcgagtactgcaccgcgtgcgcgtcctccacgaccagacacgtgtcccgccagtcctcgaccgcgccggcaacacggttcactccaccacgtcctcgcgcgagtgcgtgtctcaggtgttagccacgacgactggccacccggctgctccggtccgtcagttaagacccagcactcgtccttcatcgctctcggtccatcagcacgagcccgtatgaccttcacctcggccgtcgaccaccatccctatgctccacacctacacaccacaagccgaccgatatggttgcacaaaacataatctcacactctggtcagtccacagactaccacagagtgctattcgttgataatcactcatcatcaacccgaaccacaagggaagagacaaatcaaccttgtgttcgcacttttccaaccctatttctccacaagccgaccacaaaggtcaaggcaaatcctttccttaaacttgctcaacgagcgggagatacaaacttcttggggtcttccacaagttggagactcccaagcacacacaaaccgtcaaggaaccaaagttccaagagtaataaattcgcacaagtgaagtttgcaaaacgagctcaagtgagggagagggaggaggagagtgaaaaaccaacaacaaatcaacgaacgtcacctcacaccgaagatcctccaaccgttggaagaggatgcgatttgaggtgtgggagatagagttagagcgcttgttttgagtttggtgagcagtaaagtcagggagagtggctgaagtaaatgaggagagagagggaaaggggagtatatataggtgtccctctctcagggcagaagatttgaaaaatctgtgcaaaggtcggttgaaccgcacccagggccggttcaaccgtctgataggtcagacctatcagaacggccttctgactaaaggtcggttgaaccgcaccctagggccggttcaaccgctattttccagagaggtctgagtataaagtccggttgaaccagccaacagggcgaggttcaaccgcattttgtcagagaggtttgcgaggccggttcaaccgctttttaccagagacttccggaacagagtccggttgaaccgcaccctagggccggttcaaccacacttttccagagacttcttttggagaagtcaggttgaattgcccctgaggtaggttcaacctttcttcctagagagggtatcaaatgcaaattctctggagcggattgaacttttgcaaaccaaattcgaaatgcggttttcaaaatagattttgaagagtagagattttgagctcttgcaaacattttatacctttgtgcgaatccctcttgattgtacggtgaatcctatgactcaagaaaaagtaaatttcgaagagccttctcttggaaacaccagaaacacagtgcgatgtatgaaccaagttttagtagttatcgccttgatccgtgtttcttcctcttttaaaatgtattctgtttatctacctaatttgcaataactaaatatacacttggagcaaacttgttagacaccttatttgttttgtcatttaatgaccaaaaccttcaaaaaggttgattgtacttacaccttcggcggttgcgcagaggaaagcggttgcccgacagcgctcctctcggtatgttgggcttctgcttctccttcgcattcggctctttcccttgttccatgtttttttgagattcctctggttagcatgtacgtatcgagcaagtctgtgaacgacgcggctttggcggcgaagggggcgccccgtcccctcgggtcctcttactgccggcgccggatggggcggctcctttcgctgtcgccttcgtcccaccagctgaggcggcgactgctcctcgcgtggcagacgctccagcctccttggtcgtcctggaggtgccaggagtggttgcccctggtgcggccttctttgagccgccgccttctgcacctggcccggggcaggtttcggtcgccgaggaagtcgttgtcggcgcgcgctcggtggcggcagggtcggtcgccggtctgccgccgccgcccccgccccgtgaagggggttctgggttggcgctgttgcccgcggaggtcgccgcgccctaggtgccaccgccgcctgccgctattgccttgacttccgcaggtgccgcggtacccatgggatctgaggaaatccacggggggcttcccctctccctccctgaaggacggggggcagaggcagaagagtggcagcggaccgagtcagcctcgtctcgggccaactcgagcttagaaactatcgagcgcatgttcggtagcttcgaggaggcgatttcgattgcttgggcgtcgatgacgcgggatctgattccttttggttagcgcctccttatgcggtcggtggctcgagaggaagcgctactagccgcccaacaggaggtggagcagttgcgtgctggggccattcggctcagggagtgggagcgcgagctcaccaccctttgttctgaggctgtccggcttcggagcgagacgccgctcctacgcgtggagcatgacgatgcttagggcaacatggatcacctacgggaggaggggtcccgactctaagaggccctcgatgggatgagccttggggccgagggggccacgccgaaccttggggaggtcgacgcctgtctaggggaggcaaactcggagctccaaagggaacgcaatgcaactggaggtcagcgcttctccttcctctttgcttgtgttgcctgatgcaccgaggtgctttatcttcctttctttctcagagctctaaaagatgatttcccaagctgaggtcgccaggaaggcagcagaagaggcgaagacggtggcagaaggaaggatacgagagctctcgcttgcttgtgatggcaccgttgtttcgagactccaggcggagacctcactttcggagcggagcgccgagctccaagtgcttcacccgatcgtcggctcggtgtgcactcacctttcttctccaccgccgatcgaggtccctctaatcaatcggctgcgagcgctgtccgatcatgtggagcacgtggtcgtcgagggagcatatcacgggagcatccttgccctgggacagatggtctcccatttcgatgaaatcgactctggtgtgatcgcggaaggcttcgccgccggttgaagtgacgaggagctgggtgccattgaggtgcaggtccatccccacgcccggtcgatcgtgggccgggtcaatgtgaagttcctcctgatcgacccctggagcctgggaccactcgccggtggtccgtccacccattcttagtcggcgttcattgtaatgttttgtaatgactatctttagatgtcctgactgtgatcttatgtataatattatctgtttt

SEQ ID NO: 98972 - DNA, 4336 bp, Zea Mays
accaattgattttcttcacccgtccacctcgtcttgcgctcctctgtctcggcgacgactgtgctaccgccgccgccgccgcaagacttcgtcgggcactttgccggcgacgatttcccaccagctatttctactcggatccgatctatttacaagcccaacaggatcagaggaggtgatggcgaggagtgacagctgcctggcgcgcgtgggtgccggaattgctatcggtggcgcggtcggcggagccgtcggtgcttgctatggaacttttgaggcgttcagatacaagatccctggattgctaaagatcagatacattgggcaaaccaccgttggcagcgctgcgatttttgggcttttcttgggggctgggagcttgattcactgtggaaaatcctactagtttgtttccctttttttttctgaagtctgaacacacctttgtcgatgggcttcagtgaaaactattcaatgcctgtttcatgtaacagctaatagctcagggttggaaaagaacaatcaagttatgtcctagttttggtgtggatggaaatagaatcaacgttcatctgcacgagaatcgtcaatttctcatctagcgtcttatgttctcatctcattttctttaaaaacgtaaggaattctttactcaccatatactttagctcggcagggcgccgcgaagcgcgcaactttttgtttactagtacttattagcagccggtgaagtaataaaagtgcgtacagcttttgctttactttttgtttacctattgcatccctactttggctctgaagtgtcctgccagcggcctgcgtacttaggcctaatttgataggccatgagtatgtggccagctgagtggcgcgcaggccataaatgcgctgcagtcagaggggctacttctaccgtcgcgagtactgcaccgcgtgcgcgtcctccacgaccagacacgtgtcccgccagtcctcgaccgcgccggcaacacggttcactccaccacgtcctcgcgcgagtgcgtgtctcaggtgttagccacgacgactggccacccggctgctccggtccgtcagttaagacccagcactcgtccttcatcgctctcggtccatcagcacgagcccgtatgaccttcacctcggccgtcgaccaccatccctatgctccacacctacacaccacaagccgaccgatatggttgcacaaaacataatctcacactctggtcagtccacagactaccacagagtgctattcgttgataatcactcatcatcaacccgaaccacaagggaagagacaaatcaaccttgtgttcgcacttttccaaccctatttctccacaagccgaccacaaaggtcaaggcaaatcctttccttaaacttgctcaacgagcgggagatacaaacttcttggggtcttccacaagttggagactcccaagcacacacaaaccgtcaaggaaccaaagttccaagagtaataaattcgcacaagtgaagtttgcaaaacgagctcaagtgagggagagggaggaggagagtgaaaaaccaacaacaaatcaacgaacgtcacctcacaccgaagatcctccaaccgttggaagaggatgcgatttgaggtgtgggagatagagttagagcgcttgttttgagtttggtgagcagtaaagtcagggagagtggctgaagtaaatgaggagagagagggaaaggggagtatatataggtgtccctctctcagggcagaagatttgaaaaatctgtgcaaaggtcggttgaaccgcacccagggccggttcaaccgtctgataggtcagacctatcagaacggccttctgactaaaggtcggttgaaccgcaccctagggccggttcaaccgctattttccagagaggtctgagtataaagtccggttgaaccagccaacagggcgaggttcaaccgcattttgtcagagaggtttgcgaggccggttcaaccgctttttaccagagacttccggaacagagtccggttgaaccgcaccctagggccggttcaaccacacttttccagagacttcttttggagaagtcaggttgaattgcccctgaggtaggttcaacctttcttcctagagagggtatcaaatgcaaattctctggagcggattgaacttttgcaaaccaaattcgaaatgcggttttcaaaatagattttgaagagtagagattttgagctcttgcaaacattttatacctttgtgcgaatccctcttgattgtacggtgaatcctatgactcaagaaaaagtaaatttcgaagagccttctcttggaaacaccagaaacacagtgcgatgtatgaaccaagttttagtagttatcgccttgatccgtgtttcttcctcttttaaaatgtattctgtttatctacctaatttgcaataactaaatatacacttggagcaaacttgttagacaccttatttgttttgtcatttaatgaccaaaaccttcaaaaaggttgattgtacttacaccttcggcggttgcgcagaggaaagcggttgcccgacagcgctcctctcggtatgttgggcttctgcttctccttcgcattcggctctttcccttgttccatgtttttttgagattcctctggttagcatgtacgtatcgagcaagtctgtgaacgacgcggctttggcggcgaagggggcgccccgtcccctcgggtcctcttactgccggcgccggatggggcggctcctttcgctgtcgccttcgtcccaccagctgaggcggcgactgctcctcgcgtggcagacgctccagcctccttggtcgtcctggaggtgccaggagtggttgcccctggtgcggccttctttgagccgccgccttctgcacctggcccggggcaggtttcggtcgccgaggaagtcgttgtcggcgcgcgctcggtggcggcagggtcggtcgccggtctgccgccgccgcccccgccccgtgaagggggttctgggttggcgctgttgcccgcggaggtcgccgcgccctaggtgccaccgccgcctgccgctattgccttgacttccgcaggtgccgcggtacccatgggatctgaggaaatccacggggggcttcccctctccctccctgaaggacggggggcagaggcagaagagtggcagcggaccgagtcagcctcgtctcgggccaactcgagcttagaaactatcgagcgcatgttcggtagcttcgaggaggcgatttcgattgcttgggcgtcgatgacgcgggatctgattccttttggttagcgcctccttatgcggtcggtggctcgagaggaagcgctactagccgcccaacaggaggtggagcagttgcgtgctggggccattcggctcagggagtgggagcgcgagctcaccaccctttgttctgaggctgtccggcttcggagcgagacgccgctcctacgcgtggagcatgacgatgcttagggcaacatggatcacctacgggaggaggggtcccgactctaagaggccctcgatgggatgagccttggggccgagggggccacgccgaaccttggggaggtcgacgcctgtctaggggaggcaaactcggagctccaaagggaacgcaatgcaactggaggtcagcgcttctccttcctctttgcttgtgttgcctgatgcaccgaggtgctttatcttcctttctttctcagagctctaaaagatgatttcccaagctgaggtcgccaggaaggcagcagaagaggcgaagacggtggcagaaggaaggatacgagagctctcgcttgcttgtgatggcaccgttgtttcgagactccaggcggagacctcactttcggagcggagcgccgagctccaagtgcttcacccgatcgtcggctcggtgtgcactcacctttcttctccaccgccgatcgaggtccctctaatcaatcggctgcgagcgctgtccgatcatgtggagcacgtggtcgtcgagggagcatatcacgggagcatccttgccctgggacagatggtctcccatttcgatgaaatcgactctggtgtgatcgcggaaggcttcgccgccggttgaagtgacgaggagctgggtgccattgaggtgcaggtccatccccacgcccggtcgatcgtgggccgggtcaatgtgaagttcctcctgatcgacccctggagcctgggaccactcgccggtggtccgtccacccattcttagtcggcgttcattgtaatgttttgtaatgactatctttagatgtcctgactgtgatcttatgtataatattatctgtttt

SEQ ID NO: 98973 - DNA, 1645 bp, Zea Mays
tgcccgacagcgctcctctcgcatgtacgtatcgagcaagtctgtgaacgacgcggctttggcggcgaagggggcgccccgtcccctcgggtcctcttactgccggcgccggatggggcggctcctttcgctgtcgccttcgtcccaccagctgaggcggcgactgctcctcgcgtggcagacgctccagcctccttggtcgtcctggaggtgccaggagtggttgcccctggtgcggccttctttgagccgccgccttctgcacctggcccggggcaggtttcggtcgccgaggaagtcgttgtcggcgcgcgctcggtggcggcagggtcggtcgccggtctgccgccgccgcccccgccccgtgaagggggttctgggttggcgctgttgcccgcggaggtcgccgcgccctaggtgccaccgccgcctgccgctattgccttgacttccgcaggtgccgcggtacccatgggatctgaggaaatccacggggggcttcccctctccctccctgaaggacggggggcagaggcagaagagtggcagcggaccgagtcagcctcgtctcgggccaactcgagcttagaaactatcgagcgcatgttcggtagcttcgaggaggcgatttcgattgcttgggcgtcgatgacgcgggatctgattccttttggttagcgcctccttatgcggtcggtggctcgagaggaagcgctactagccgcccaacaggaggtggagcagttgcgtgctggggccattcggctcagggagtgggagcgcgagctcaccaccctttgttctgaggctgtccggcttcggagcgagacgccgctcctacgcgtggagcatgacgatgcttagggcaacatggatcacctacgggaggaggggtcccgactctaagaggccctcgatgggatgagccttggggccgagggggccacgccgaaccttggggaggtcgacgcctgtctaggggaggcaaactcggagctccaaagggaacgcaatgcaactggagatgatttcccaagctgaggtcgccaggaaggcagcagaagaggcgaagacggtggcagaaggaaggatacgagagctctcgcttgcttgtgatggcaccgttgtttcgagactccaggcggagacctcactttcggagcggagcgccgagctccaagtgcttcacccgatcgtcggctcggtgtgcactcacctttcttctccaccgccgatcgaggtccctctaatcaatcggctgcgagcgctgtccgatcatgtggagcacgtggtcgtcgagggagcatatcacgggagcatccttgccctgggacagatggtctcccatttcgatgaaatcgactctggtgtgatcgcggaaggcttcgccgccggttgaagtgacgaggagctgggtgccattgaggtgcaggtccatccccacgcccggtcgatcgtgggccgggtcaatgtgaagttcctcctgatcgacccctggagcctgggaccactcgccggtggtccgtccacccattcttagtcggcgttcattgtaatgttttgtaatgactatctttagatgtcctgactgtgatcttatgtataatattatctgttttaaactctgcatccttcctttttcctt

SEQ ID NO: 98974 - DNA, 1656 bp, Zea Mays
tgcccgacagcgctcctctcgcatgtacgtatcgagcaagtctgtgaacgacgcggctttggcggcgaagggggcgccccgtcccctcgggtcctcttactgccggcgccggatggggcggctcctttcgctgtcgccttcgtcccaccagctgaggcggcgactgctcctcgcgtggcagacgctccagcctccttggtcgtcctggaggtgccaggagtggttgcccctggtgcggccttctttgagccgccgccttctgcacctggcccggggcaggtttcggtcgccgaggaagtcgttgtcggcgcgcgctcggtggcggcagggtcggtcgccggtctgccgccgccgcccccgccccgtgaagggggttctgggttggcgctgttgcccgcggaggtcgccgcgccctaggtgccaccgccgcctgccgctattgccttgacttccgcaggtgccgcggtacccatgggatctgaggaaatccacggggggcttcccctctccctccctgaaggacggggggcagaggcagaagagtggcagcggaccgagtcagcctcgtctcgggccaactcgagcttagaaactatcgagcgcatgttcggtagcttcgaggaggcgatttcgattgcttgggcgtcgatgacgcgggatctgattccttttggttagcgcctccttatgcggtcggtggctcgagaggaagcgctactagccgcccaacaggaggtggagcagttgcgtgctggggccattcggctcagggagtgggagcgcgagctcaccaccctttgttctgaggctgtccggcttcggagcgagacgccgctcctacgcgtggagcatgacgatgcttagggcaacatggatcacctacgggaggaggggtcccgactctaagaggccctcgatgggatgagccttggggccgagggggccacgccgaaccttggggaggtcgacgcctgtctaggggaggcaaactcggagctccaaagggaacgcaatgcaactggagagctctaaaagatgatttcccaagctgaggtcgccaggaaggcagcagaagaggcgaagacggtggcagaaggaaggatacgagagctctcgcttgcttgtgatggcaccgttgtttcgagactccaggcggagacctcactttcggagcggagcgccgagctccaagtgcttcacccgatcgtcggctcggtgtgcactcacctttcttctccaccgccgatcgaggtccctctaatcaatcggctgcgagcgctgtccgatcatgtggagcacgtggtcgtcgagggagcatatcacgggagcatccttgccctgggacagatggtctcccatttcgatgaaatcgactctggtgtgatcgcggaaggcttcgccgccggttgaagtgacgaggagctgggtgccattgaggtgcaggtccatccccacgcccggtcgatcgtgggccgggtcaatgtgaagttcctcctgatcgacccctggagcctgggaccactcgccggtggtccgtccacccattcttagtcggcgttcattgtaatgttttgtaatgactatctttagatgtcctgactgtgatcttatgtataatattatctgttttaaactctgcatccttcctttttcctt

SEQ ID NO: 98975 - DNA, 537 bp, Zea Mays
aaagccaaaaacatcatccccctcgccaagaaagaaggcagacgaaggcaaaccctagccaacgcgtacgcctcgccccccgcgcctcctcccccagatccggccgatccgtcgttgccatggcgctgcgagctctcgccggcaagctgagggtcctcccttcacgagcggcggcctctcgctccttcgcctcccagatggagaagaaatgcagcaagtgtgctcttgaagagcaggctggatccttctctcaatggttggatgaaaggaagaggcgtgatatggaagagcttgcaaggttcagaaggaagagctacgtgcacaatgtgctagttcttgctggtagtgttggctttgtggcattcacgttgtcatgcgttgctgatgttatagcagatgaaatgaactagggagaaggggaggggagcacggcggcagcaaatgctccatggttggttcttttggcacctatcaattacacaatataaaccaccttccaatcaattacaagagacacagtaacaaagatgaggtgat

SEQ ID NO: 98976 - DNA, 650 bp, Zea Mays
aaagccaaaaacatcatccccctcgccaagaaagaaggcagacgaaggcaaaccctagccaacgcgtacgcctcgccccccgcgcctcctcccccagatccggccgatccgtcgttgccatggcgctgcgagctctcgccggcaagctgagggtcctcccttcacgagcggcggcctctcgctccttcgcctcccagatggagaagaaatgcagcaagtgtgctcttgaagagcaggctggatccttctctcaatggttggatgaaaggaagaggcgtgatatggaagagcttgcaaggttcagaaggaagagctacgtgcacaatgtgctagttcttgctggtagtgttggctttgtggcattcacgttgtcatgcgttgctgatgttatagcagatgaaatgaactagggagaaggggaggggagcacggcggcagcaaatgctccatggttggtttatattgtgtactaaagagggctgaagagtttttgacagattggactggtagcttccccagggtcagaaaaaagaatgtgactcactgactgtaggggaatgccatggaagtgtagatgtgatgtttcttctcaattgtatatgccattggattgatgtttggaaattttacgtgtagtatgtctaagataa

SEQ ID NO: 98977 - DNA, 662 bp, Zea Mays
aaagccaaaaacatcatccccctcgccaagaaagaaggcagacgaaggcaaaccctagccaacgcgtacgcctcgccccccgcgcctcctcccccagatccggccgatccgtcgttgccatggcgctgcgagctctcgccggcaagctgagggtcctcccttcacgagcggcggcctctcgctccttcgcctcccagatggagaagaaatgcagcaagtgtgctcttgaagagcaggctggatccttctctcaatggttggatgaaaggaagaggcgtgatatggaagagcttgcaaggttcagaaggaagagctacgtgcacaatgtgctagttcttgctggtagtgttggctttgtggcattcacgttgtcatgcgttgctgatgttatagcagatgaaatgaactagggagaaggggaggggagcacggcggcagcaaatgctccatgattggactggtagcttccccagggtcagaaaaaagaatgtgactcactgactgtaggggaatgccatggaagtgtagatgtgatgtttcttctcaattgtatatgccattggattgatgtttggaaattttacgtgtagtatgtctaagataagtccttttatgtactggttccgtgaacctataaaaatgcttcagctagttcttgagca

SEQ ID NO: 98978 - DNA, 249 bp, Zea Mays
gaggtctaggccgtcgtctcccagtcaactatggttatggaggatcgtcatcgtcatatggtgtaatttatttagttattttatacagaattcctattatataataaagatgtgacattgatttctgtaccatgagtcatcatatgtgtgagactttatcctagcacacatttgagacgcacccgggtttgcccttaaatctgggtgtgacacctataatgaatgaaatgtgatggatcaacttattct

SEQ ID NO: 98979 - DNA, 89 bp, Zea Mays
aatatggtatgagtaatatccgtccgtattcaatccgattacaaccctattgctgcgtatggtgtgtactgagggtggagctggtgcag

SEQ ID NO: 98980 - DNA, 3140 bp, Zea Mays
cggctttgctctgacactttgaagcggcaccgcgcgccgtgcggtactccgcgtcatccgcgcttcattttctaccctcccctccactaccgccgactccgtggcgacatcctgagtcggagcgccgtgctcgtccggattcgagacaccgagcacaacgcgagctctttctgtagtgttcggagctgaaaatgagtgaggtgaataatactcagctggaccttgagaaaggattttctcaagtgtctcatgataatgattcgagtagccctgtaacggtgcacaagatgaaagttgagacagaaggtggaagtgaaatcgaatcacccactccagaaaaacgtgaatctagaagcaaaggggtcgttgtgagttcactggcaaggaatttgcttgcagagaggtacaaagacagacttgcaaatcagctggtggaagatgagagtgagacagatgatgaagactataatgaaagtgtttcgcctagtggtagccgatctctttttttagaaagcattgaacttcttgagaaacacaaggatttgctgaatcttttcaatagaatggagagttctataagattgcttcacctacggaagaagatggctacatttaataatattgccacccaggtggagatactcacaaaaaggaagttattatacagccatttggcccagatgaagcatttgttcccagaagcaatccagataaagaggatactagtacatgacgagaagagcatatgcatgtatgctgatatggaaatcacacttgtaatggatgttgtggaatgcacaagccctgatcactctctatccatgacaatttgtgaggctttttactcaaagcttttgagatttttggatgctcatcataagggtgcagacattcctgaggcaatcctaccggaaccctttaactcaaggccaagggagaagttatatcttgaggcagtacataacggacatgctgctgagccacctctgcatggtgccgttgaggagggattctcaaatgcttcccacttcccacaatcttttcaaaaattcatgtcgaaaaaaatcattgctgatggaactgaaaagactcaattgctatccgacccagcagaactgagctctgtgagtgcttatggtacaaaagggtcaaacagaaaccctaaaaagcaagatgaacatgctccagttccagtgaactctgaaatttctgctactccaagccgccatttgatctcttgttgtcaagagagtacgccaaaacaacagacctcagagtcaccattgttgtctggaacacctgcaatgcagacaccaaaaaggccattgctggctccgcttgagaaacccaaggccacatgtggacacattagtgaaccacgttcagccagttctgcccgcagatcactaaatacatccttaacatatgaaggaggaagcccttcttattatgatggaatggaacatacggctacagctaaaaagtgcatgatctcagaagacttgtcaagttttaacaagtcatttgaggaagatagccatgtcttctttactgataaagacaaaatcaatgaagtggagtcagtggatagccaggaaaggatagcttctctacgtaccacatttgacattgtctatgatatttctcattctaccaagaatccacttatcacgaaacaggaacttttccacaatattcttgccaacaacttggagatagaagagattggggagatagaagagcagctgcatattttagaggatctggctcccgatttgatatcaaagaaggtgataaatggaggagaaatactttatagcatcgaacctataacagataagaattcagttcgggctaggcttgtagtagaacctgtatgagatagctgcaattggttcaaagctgaagaaatttgaagagattctctatatgcatgtaccactaatggaacccagattagctgatttattcaaccatggaagcatctgcatcgctcatgtagtcatgtctgattcgagttcaaatctgtgtttttattgacctgctcagtgccgaaatttctatggaacttaaattcgcaccagctgctctgtgagcttactgtggtaatcccatgaacttgtgtggagttcagatgcccatcggcatctgctctgtgacgtttaactcatgaaaagtgcacaagaatatttattcaatattcaataatgacatatatacatcctccatatacagtaatgacatggcatgcatacagtacactagttaaggcaatgagcccacgacctgtatcctctaatcatatgtaatgtatcatgtatgtacacggcacgtatcaagtggcaacagacggagcaaacgcagtcctctcgtcactgctcggaccaggtgatgtccaccatgccgacgttctggtcgagtcccagggcgtcccacaccgccggcgaggcgtcgacgatgttgttgtcgcacggcggctcgaagttgtgctcgtcgtcgcagccgtgcacggagtcgcactcgtccaccaccttggcgtacacggagttgccgttggcggcgctgatcttgatccggtggccgcagcgcgccatgttgctgaaccagcccgtggagagcgccaccaccttctcctggtcgctgtggtacgcgttgtcgcactccgaggggccgccgccgtccttgcccttctcgaagctgttgagcgtcagcacggccctggtgctcgccgtgaccggcggcgagcagcggtactgcgggtacatcttgccgtcctcgcagcagtccgggtcgttgctcttctcgcagttgccggagcggcccgggaggtacccgctggcgcggcacgtgccgaggctggcgccagggcggagagaggacgccgtgtggggtgcggagagcgcgaccaggaggaacatgaacatggcggcggctacagctcctacaccggccatctttgcttgcctgcagattttgtgctcgaggatcgagccccttctcactctgttctttttccttccttccttccttcctttctttctttctttctttctttctttcttgtgctctgctttgcttgatggttttgttagattactcgtgcatgggattatatatagtggccgtgccctcttgttaca

SEQ ID NO: 98981 - DNA, 1996 bp, Zea Mays
ctaccctagaagttcacccatgtacttctgtgcattcaggatttgtgtttgtagcatattacttatggtcccattcttgtagtgttcggagctgaaaatgagtgaggtgaataatactcagctggaccttgagaaaggattttctcaagtgtctcatgataatgattcgagtagccctgtaacggtgcacaagatgaaagttgagacagaaggtggaagtgaaatcgaatcacccactccagaaaaacgtgaatctagaagcaaaggggtcgttgtgagttcactggcaaggaatttgcttgcagagaggtacaaagacagacttgcaaatcagctggtggaagatgagagtgagacagatgatgaagactataatgaaagtgtttcgcctagtggtagccgatctctttttttagaaagcattgaacttcttgagaaacacaaggatttgctgaatcttttcaatagaatggagagttctataagattgcttcacctacggaagaagatggctacatttaataatattgccacccaggtggagatactcacaaaaaggaagttattatacagccatttggcccagatgaagcatttgttcccagaagcaatccagataaagaggatactagtacatgacgagaagagcatatgcatgtatgctgatatggaaatcacacttgtaatggatgttgtggaatgcacaagccctgatcactctctatccatgacaatttgtgaggctttttactcaaagcttttgagatttttggatgctcatcataagggtgcagacattcctgaggcaatcctaccggaaccctttaactcaaggccaagggagaagttatatcttgaggcagtacataacggacatgctgctgagccacctctgcatggtgccgttgaggagggattctcaaatgcttcccacttcccacaatcttttcaaaaattcatgtcgaaaaaaatcattgctgatggaactgaaaagactcaattgctatccgacccagcagaactgagctctgtgagtgcttatggtacaaaagggtcaaacagaaaccctaaaaagcaagatgaacatgctccagttccagtgaactctgaaatttctgctactccaagccgccatttgatctcttgttgtcaagagagtacgccaaaacaacagacctcagagtcaccattgttgtctggaacacctgcaatgcagacaccaaaaaggccattgctggctccgcttgagaaacccaaggccacatgtggacacattagtgaaccacgttcagccagttctgcccgcagatcactaaatacatccttaacatatgaaggaggaagcccttcttattatgatggaatggaacatacggctacagctaaaaagtgcatgatctcagaagacttgtcaagttttaacaagtcatttgaggaagatagccatgtcttctttactgataaagacaaaatcaatgaagtggagtcagtggatagccaggaaaggatagcttctctacgtaccacatttgacattgtctatgatatttctcattctaccaagaatccacttatcacgaaacaggaacttttccacaatattcttgccaacaacttggagatagaagagattggggagatagaagagcagctgcatattttagaggatctggctcccgatttgatatcaaagaaggtgataaatggaggagaaatactttatagcatcgaacctataacagataagaattcagttcgggctaggcttgtagtagaacctgtatgagatagctgcaattggttcaaagctgaagaaatttgaagagattctctatatgcatgtaccactaatggaacccagattagctgatttattcaaccatggaagcatctgcatcgctcatgtagtcatgtctgattcgagttcaaatctgtgtttttattgacctgctcagtgccgaaatttctatggaacttaaattcgcaccagctgctc

SEQ ID NO: 98982 - DNA, 2388 bp, Zea Mays
gaaacacagcagacaggagcaacattcacggacggaaacccctcaaccccgaccccctcgaggcctcgacccgacccgacccgcctccaactccaagccaagccaccatggcggctccgcccgcgaccaccgccacgactcaccaccgcgcgctcctcccgcccacgcgcacccacgccgccgctacgcactccgcgctccgcctcccgctccgcgcgcatccccacgcccacgcccagcgcgcgcgcctcaccgccgccgctgccccggcccccgcggcgtcgacggcctccctcgagtcctccgccgcggggaagcctacggtgctcgtggccgagaagctcggcgccgcggggcttgcgctgctgcgggaattcgccaacgtcgactgctcctacggcctctcccccgaggacctccgtgccaagatctcgctctgcgacgcgctcatcgtcaggtccgggaccaaggtcggccgcgacgtcttcgaggcgtccgggggcaggctccgcgtcgtcggccgcgccggcgtcggcatcgacaacgtcgaccttgccgccgccaccgagcacggatgcctcgtcgtcaacgcgcccactgccaacaccgtcgccgccgccgagcatggcatcgcgctgctcaccgccatggccaggaacatcgcgcaggcggacgcgtcactcaaggctggtaaatggcagcgcaacaagtatgttggtgtatctcttgtgggcaaaactctcgcgattcttgggttcgggaaggttggttcagaagttgctcgtcgcgctaaaggtttaggaatgcatgtgattgcacatgatccatacgcttctgctgatcgggcccgtgcaattggagttgagctagttagtatggaggaggccatgacaactgctgacttcatctcattgcacatgcctcttacccctgcaacaaacaagatgctcaacgatgaggcctttgctaagatgaagtatggtgttcgcattataaatgttgcacgcggtggtgtgattgatgaagatgctctagtcagggctcttgattcaggaatagtagcacaggctgctcttgatgtgttcactaaagaacctccagctcctgataacaagttggtgctgcacgagaatgttactgtcacacctcaccttggtgccagcacagtggaggcacaggaaggagtggctattgagatagctgaagctgtcattggagctctgaaaggggaacttgcagcttctgcagtcaacgctccaatggttcctgctgaggtgctgtcagagcttgcaccttttgttgtgcttgcagaaaagcttgggcatttagctgtgcaactagttgctggtggtggtggcatcaagtctgtgaaagtgacctatgcatctgcacgggcccctgatgatcttgacacgagacttctccgtgcaatgatcaccaagggattgattgagccaatctccagcgtttttgtcaatcttgttaatgctgacttcaccgcaaagcagaggggagttcgcatcactgaggagaggatcatcttggacggctcacctgagacgcctatcgactacattcaagttcagattgccaatgtcaagtccaaatttcctagtgcgatatctgagactggagagatcacagtggaggggagagtgaaggatggcgttcctcatctaacaaaggttggagcattccaggtggatgtgagcttggaaggaagcctgatcctttgcaggcaggttgatcagccaggtatgattgggtcggtaggaagtgtcttgggtgaggagaacattaatgtcagtttcatgagtgtcggaaggattgctcctcgcaagcatgctgtcatggcaatcggtgttgatgaggaaccaagcaaggtcacactgagaaagattggggagattccagcaatcgaagagtttgttttcctcaagctttaggcaactaagcgcaaatgtatgtttcaagttgcaagcatgctgtgcaattttgatgtagcttagcaatatagaggacggatggttctccttaaataagcttttaggattatttttgtagtggcgctcttgaatttggtgcaatattgatgccatcttttgaacggggtgttattctcagctactgtttcccaggttataaaaaataatatgtactccacgttccaatttataattcgtttgactttttttatctaatttataattcgtttgatttttttatctgaagcttgaccacctcgttttattcaaaaaaatatctaattattaatattttttattatgatattgttttgcatataatatactttaagtatgtctttaattttttttttaaaattttgcagtcgatcaaatttgataaaaaagtcaaacgaattataaa

SEQ ID NO: 98983 - DNA, 1119 bp, Zea Mays
aacgccagtcagtacgtcgctgcctttcctctcccgactcccgttcaccacactactttccctcgtgcggccgccgccctacaacaggtgccccaggtcttcgctgcgccattcgccagcgacgagcacccaacaggctcagaaacatcgctgacatccacatgcaccacagtagttcagtagagtagctgttggaacccacacaccggcgatggcaactgctcctgtgacatcctccatggctacgaactccacctgtgtgcggctgcctagcatgcccctgaggcgtgcacccgccatcgtctcctttgcctctcgtccatggtcaaccgcaatgacctcatgtactggattgtcgcggcactctgatgtggttgccgccgcggggcaccagaagttgatggggtctttgaacaacaacgagggactcatgtttggggtggttgtggcacggttcaacgaggtcgtgacaaatttgttactacagggtgccctggaaactttcgagcgatactctgttaaagcagaaaatataacagttgttagtgttcctggaagctttgaagttcctataacggcacaaaagcttgggaaatctggaaaatttgatgcaattctgtgcattggagctgtgattagaggtgacacaacccactatgatgccgttgcaaactcagctgcatcaggtgtactcaatgctggattatctgctggtgttccttgtgtatttggtgttctaacctgtgaagacatggatcaggcactgaaccgtgctggtggcaaggctggaaacaaaggagctgaagctgctcttactgccattgagatggcctcgctgttccggcatcacttaggctgacaccttgtgtattctgattttctatacacgaggcggcagcatttcctcctatcaagagttttggctaatagagagcttttccgccgcggctagtataatttatttccaagtttgttggtccggtgcggattggttgctttccttctgagacctgaaaagctcacaagacatgtctgtaaacctgacatcgtgaataattgtctccacgaacgaaatatggtcatgaataaagctgcacaagtgttttgttacgtatgatt

SEQ ID NO: 98984 - DNA, 1114 bp, Zea Mays
acgtcgctgcctttcctctcccgactcccgttcaccacactactttccctcgtgcggccgccgccctacaacaggtgccccaggtcttcgctgcgccattcgccagcgacgagcacccaacaggctcagaaacatcgctgacatccacatgcaccacagtagttcagtagagtagctgttggaacccacacaccggcgatggcaactgctcctgtgacatcctccatggctacgaactccacctgtgtgcggctgcctagcatgcccctgaggcgtgcacccgccatcgtctcctttgcctctcgtcgtacgccatggtcaaccgcaatgacctcatgtactggattgtcgcggcactctgatgtggttgccgccgcggggcaccagaagttgatggggtctttgaacaacaacgagggactcatgtttggggtggttgtggcacggttcaacgaggtcgtgacaaatttgttactacagggtgccctggaaactttcgagcgatactctgttaaagcagaaaatataacagttgttagtgttcctggaagctttgaagttcctataacggcacaaaagcttgggaaatctggaaaatttgatgcaattctgtgcattggagctgtgattagaggtgacacaacccactatgatgccgttgcaaactcagctgcatcaggtgtactcaatgctggattatctgctggtgttccttgtgtatttggtgttctaacctgtgaagacatggatcaggcactgaaccgtgctggtggcaaggctggaaacaaaggagctgaagctgctcttactgccattgagatggcctcgctgttccggcatcacttaggctgacaccttgtgtattctgattttctatacacgaggcggcagcatttcctcctatcaagagttttggctaatagagagcttttccgccgcggctagtataatttatttccaagtctgttggtccggtgcggattggttgctttccttctatgagacctgaaaagctcacaagacatatctgtaatgtaaacctgacaccatgaataattgtcgccacgaacgaaatatggtcatgaataaagatgcactagtgttttgttacgta

SEQ ID NO: 98985 - DNA, 1759 bp, Zea Mays
gttcaccacactactttccctcgtgcggccgccgccctacaacaggtgccccaggtcttcgctgcgccattcgccagcgacgagcacccaacaggctcagaaacatcgctgacatccacatgcaccacagtagttcagtagagtagctgttggaacccacacaccggcgatggcaactgctcctgtgacatcctccatggctacgaactccacctgtgtgcggctgcctagcatgcccctgaggcgtgcacccgccatcgtctcctttgcctctcgtcgtacgccatggtcaaccgcaatgacctcatgtactggattgtcgcggcactctgatgtggttgccgccgcggggcaccagaagttgatggggtctttgaacaacaacgagggactcatgtttggggtggttgtggcacggttcaacgaggtcgtgacaaatttgttactacagggtgccctggaaactttcgagcgatactctgttaaagcagaaaatataacagttgttagtgttcctggaagctttgaagttcctataacggcacaaaagcttgggaaatctggaaaatttgatgcaattctgtgcattggagctgtgattagaggtgacacaacccactatgatgccgttgcaaactcagctgcatcaggtgtactcaatgctggattatctgctggtatgttgttttctgttcttccctatcatgtgtcatgcagtactgggtaattctaggtacgttcattttcttctatttttaagtgttaaaaaggtggtctagcaagttgaaatattgaactcttaaacatattcccacaggtattgaaacttgttttatatgtttcattgttgtttctcagcgaatatgcatatataagtacaatggcaaaaaaaagtcacaagcatgttggggtagactaaaattttgccagtacagcttacagaaatctacaatagttaatgcgagcaactagtgtgggactggaaggttttggttatatgagagaattgtatagttggtgctataaaagtacttcacaacattaagtgaaactttgcagtgtgctcatcttgttttttctttatgatggttaattcagttaataataaaaattcagattattttggcttttaatggtgatacaggtgttccttgtgtatttggtgttctaacctgtgaagacatggatcaggtacttcatggtttgattatgtacatctttaatccagaatggccacattagcgaagctgaggtttcacacaagtattcccttgtgacgagaaagtttcatgtcaataatgtgacctctttttttgttggttatctggctacttttcaagacctgatcactgttttgctccttatcgaaatcctgctgagaatgctaaatcgcatactgcaggcactgaaccgtgctggtggcaaggctggaaacaaaggagctgaagctgctcttactgccattgagatggcctcgctgttccggcatcacttaggctgacaccttgtgtattctgattttctatacacgaggcggcagcatttcctcctatcaagagttttggctaatagagagcttttccgccgcggctagtataatttatttccaagtctgttggtccggtgcggattggttgctttccttctatgagacctgaaaagctcacaagacatatctgtaatgtaaacctgacaccatgaataattgtcgccacgaacgaaatatggtcatgaataaagatgcactagtgttttgtta

SEQ ID NO: 98986 - DNA, 1120 bp, Zea Mays
gttcaccacactactttccctcgtgcggccgccgccctacaacaggtgccccaggtcttcgctgcgccattcgccagcgacgagcacccaacaggggtgtacatgtcgatgttgcctctttattcggcgctaagaagctcagaaacatcgctgacatccacatgcaccacagtagttcagtagagtagctgttggaacccacacaccggcgatggcaactgctcctgtgacatcctccatggctacgaactccacctgtgtgcggctgcctagcatgcccctgaggcgtgcacccgccatcgtctcctttgcctctcgtccatggtcaaccgcaatgacctcatgtactggattgtcgcggcactctgatgtggttgccgccgcggggcaccagaagttgatggggtctttgaacaacaacgagggactcatgtttggggtggttgtggcacggttcaacgaggtcgtgacaaatttgttactacagggtgccctggaaactttcgagcgatactctgttaaagcagaaaatataacagttgttagtgttcctggaagctttgaagttcctataacggcacaaaagcttgggaaatctggaaaatttgatgcaattctgtgcattggagctgtgattagaggtgacacaacccactatgatgccgttgcaaactcagctgcatcaggtgtactcaatgctggattatctgctggtgttccttgtgtatttggtgttctaacctgtgaagacatggatcaggcactgaaccgtgctggtggcaaggctggaaacaaaggagctgaagctgctcttactgccattgagatggcctcgctgttccggcatcacttaggctgacaccttgtgtattctgattttctatacacgaggcggcagcatttcctcctatcaagagttttggctaatagagagcttttccgccgcggctagtataatttatttccaagtctgttggtccggtgcggattggttgctttccttctatgagacctgaaaagctcacaagacatatctgtaatgtaaacctgacaccatgaataattgtcgccacgaacgaaatatggtcatgaataaagatgcactagtgttttgttacgt

SEQ ID NO: 98987 - DNA, 1141 bp, Zea Mays
gatattcacatgcgccgtttcctctgtacacccgcgccgcgcccctttccctttctcgcttctgcccctctgcggctctgctgcctgcggcctgcccctttttttattcccaaaaaaactcccatctcgcggcggaaagagagagaggagaggtgcgagctggtaagatggatcggttggaggagcggaacattaagaagggggagagggagatggaggaggcgcgcaaggaagaggagcggaaggaggaggcgggggacaggaatacccaggagccgcagcaaggtcaaggcctcagcctctcactcgccaacggcagcgacagcggcaggtctggaatgttgccgatgtcgaacccttcagctaatcccacacagcttacaattttctatggtggatcagtatgtgtgtatgactcggtgccaccagaaaaggctcaggcaatcatgcttatagctgcggctgcagcagctgcggcagccaccaaaggcagtgctgccactgcttttaatcctccaatggtacatacagacactgtcgccccagcagcagtcttctctcctgtgcttacacggtctccatcactgcagagcacttctgtagcagctggacaagctcaggttgttgctgaccctagctcaataagcaagcttcaggctgatctccccattgccaggaggcactctctccagcgcttccttgagaaacgtcgtgacagggtcgtgagcaaagctccgtacagccccgccaagtcgttcgatggcatggagtcagcgggaatggagatgactgcggacggcaagcagggcgcaaggcccagtatcttgaaaggttggggagccgcgaagtctgaagtctgaacggtgaaaggctggctgacgctgtggggaggaagggacagggacgtgctgttggttttattatattggtatttatgttattatatactgtatgtggtagcagcagcgtggaaccgcactaataatggggaccttaacacctctattttactgtcgttgctttgttgtcgcgtgctaggttgtattctgaagtggattcctcaataccgcataccgtactgctacgcctgttgactttgttacattgattgatcgttgttcacttaaacagaaaaaaaaaa

SEQ ID NO: 98988 - DNA, 706 bp, Zea Mays
aggcgcccctgccccccgcacgcacagacgacgtgctggctaccctcccccaacttaggcctctagcgacgaagcaggcgggatatttggtgcgcgcgggcggtgtgaacaatcagcctgcagcgatcgagcaaaagccagcatcagcgagcaactcggcgacgtcggcgtcgccaggggagcccgggcagagaagcacctgccctctgcatctggaaccccgcgcgggctccgccggccgcggcccgtgccgcgacgactcggcacgcgctagccagctataggtagctgtttcccttcccgccactatcctgccgcccgggctcgcgtggcggatgatgattcctagagagccacggcggccggagcacccttcctcctcctgaccccgagctgccccgcccatcgcagcgggcggctctgccctccgccgcagcgtctgtgtccaggtgaggttgttgcccccacggatttggagccggttgttgagttctcggatttggtagatgcgtggctattcgctgctggattgggtaggctcagtcgtggatctgggagttcgatttagctgcatgccttaactgtgaagtaaatagctttgagaatctgccagacttgattgaagtaagaatacttgaggagcaggaattcgagcctcgtgtcgcttaaatgaaatcaaacttagtccatcttgttggtgcaaaaa

SEQ ID NO: 98989 - DNA, 2014 bp, Zea Mays
aggcgcccctgccccccgcacgcacagacgacgtgctggctaccctcccccaacttaggcctctagcgacgaagcaggcgggatatttggtgcgcgcgggcggtgtgaacaatcagcctgcagcgatcgagcaaaagccagcatcagcgagcaactcggcgacgtcggcgtcgccaggggagcccgggcagagaagcacctgccctctgcatctggaaccccgcgcgggctccgccggccgcggcccgtgccgcgacgactcggcacgcgctagccagctataggtagctgtttcccttcccgccactatcctgccgcccgggctcgcgtggcggatgatgattcctagagagccacggcggccggagcacccttcctcctcctgaccccgagctgccccgcccatcgcagcgggcggctctgccctccgccgcagcgtctgtgtccagactggaggatggagactccgcaagtcgagatgggcggtttcaaggtcaacagcccgcaagtgcccaacggtggcttgcggcccaccgtgtcttcgtcctggaactcgcaagggacggtcgagagggcgctcaggagcatcaggatcgtcatttttacttccaagctcaacttgctcatgccgttcggacctgcctccatcattctccacttcacgactaggagacatggattggtttttcttttcagcatgctaggaattatgcctttagctgagcgattgggatatgcaactgagcagcttgcagtatacactggtccaacagttggtggccttctgaatgctacatttggaaatgcaactgaaatgatcattgcaatatatgctttgaaaaatggaatgatccgagtagtgcagcagtcactattgggttccattttgtcaaatatgctgttggttatgggctgtgctttctttgctggtggtattgttcatcgcaacaaagaccaagtcttcagtaaggcaactgcagctgtcaactcaggtttactgttgatggctgtcatgggattgatgtttcctgccgttctccatttcactcattcagaagtgcggcaaggagcatcagaggttgctctttcaagattcagtagctgtattatgcttgtggcgtatgcaagctacctctatttccaattaagtggacggagcaacatttacagtccaataggcagtgaagaggcgcctagcgaggataacccggaagaagatgaagaagctgagattggcatgtgggaggcagtaacatggcttgcggtgttaacattctgggtgtcttttctttctgagtacctagttaacgccattgagggagcatctgattcattgaacctaccggtggcttttatcagtgttattttgcttcctattgtgggcaatgcagctgaacatgcaagcgcaataatgtttgccatgaaagataagcttgacataacacttggtgttgcaattggttcatcaacacagatatcaatgtttgtgattccattttgtgttgttattggttggacgatgggacaaaagatggacttgaattttcagctatttgagacagcaactctcttcataacagtacttgtggtggcatttatgttacaggatggcactgcgaactacttgaaaggacttatgctgatcctatgttatctaatagttgctgccagtttctttgttcacgttgatccacaatcaagtgaaggctgaagccatatatcctgtaagtaacgcgccaaataccttttgagacttaataatcttgttttgttccgcctgtctcaagccgggttccttcatgaactgcagaaggaatttttgtattttgttttgtggatactgatgtgtactagggtagtctcgatgtatacagaaacaagaagtggcagcatgttatattcgattaattgtatgggttttctgttttccttgaaatttaactattgggctgaatgtaaatttgggtatatgatttgatgatgacagatgctagatctttcatcatttttttgt

SEQ ID NO: 98990 - DNA, 811 bp, Zea Mays
acggctagccatcgggagaggaaagcgctctcatcacttccccatcctcattccttcctccgtccacaccgcagccactacagatagatacgccatccgacgaggtcaactcaagtccccccttcctccaccacgatgagcagcggcggcgcgagcttcgagcagcacgcgaataagcggcggcggccgcccgctgggccgcagcgcctgacgctgtcggtgcaggacgccgacgacgcggccgcggccgtggtcccgcccgtcaccgtggtcctggacgggcgctgcatctgccaccgcgtccacctcaaccgccacacggggtaccgcagcctggcgggcacgctccgccgcatgttcgtcgactccgacgacgacgactccgacgtccacaaccaccaccaccagcagcagcagcagcagcgcggcgaggacgacctcgacctcgacctcgccaatgccgtcccgggccacgtcgtcgcgtacgaggacatggaggacgacctcctcctcgccggcgatctcaagtggaacgattttgttcgcgtcgccaaaaggatccggatcatccctgccaagaagacgacgtcgtcgtcaagccgcgccaagaaatgcggaggaggagatgtcaaccacagcaactagtcgccggcgtccggccgggccgggctagcttttgttagactctcgcatgcaattattactgctagccgctagctgcagctgtcgtctactccatcgttgtgttcttcaattcattcactcagctctctccattatattatacccggccccatgcatgttgtcgtta

SEQ ID NO: 98991 - DNA, 2673 bp, Zea Mays
cgcaagagaaaatttcacgttatcttttctttttcgttaaaaaagaagcaagcgaaaaaaaacacttctagccgtgcgggcttggccgtccgcagtagcagcagcaacgaaccaacgaagcactggttgttggtaggtgcacgcaccccatccccccacccaatccctcgcggcgggcgggcgagagagcgagcggcgatggcggcactggaggcggtgaggtcgtgggcggtgtccgtcatcccgccggagctcgccgccgccgcggggggagacccgctcgccgcgctggcagccaccgccgcggcccttgtcgcggggctgcttatcctcgccgtctggttccgatccggaggcggggcgccgtccaagccggtcgccacgccattacggccgccgccggtgaaggtggacgccgacgccgacgtggacgacgggcggaagcgcgtcaccatcttcttcggcacgcagaccggcaccgccgagggattcgccaagtcgatggcggacgaggcgagggtgcggtacgagaaggccgtgtttaaagtggtggatctggatgactatgctcaggaggacgaggaatacgaggagaagctgaagaaggaaactgtggcgctgttcttcttagcaacatatggggatggagagccaactgataacgcagcaagattctacaaatggtttactgagggaaaagagaaggaagtttggctgaaggatcttaaatatggtatttttggccttggaaacaggcagtatgaacattttaataaggttgcaaaggtggtagatgagctactagaggagcagggtgggaaacgtcttgttcctgttggccttggagatgatgatcagtgcattgaggatgatttcactgcatggaaagaactagtgtggccagagttggatcaattgctccgcgacgaggatgacacaaatggtgcatcaactccatatactgctgctattcctgaatacagagttgttttcattgataaatctgacctgtcattccaagatagatcatggtcactagccaacggtactggtgtgattgatattcaccacccttgcagggctaatgttgctgttcgaaaggagctgcacaaaccagcttcagaccgctcttgtattcatcttgagtttgatatttctggcactagtcttgtgtatgaaaccggagaccatgttggtgtatatgcagaaaattctgttgagactgtggaggaggctgaaagcctacttgacctttctccagatacagtcttctccatccatgcagatgcagaagatgggtctcctcgtaaaggaggaagttccttggccccacctttcccatctccatgtactttgcggactgcgcttctacgatatgctgatctactcaatccaccgaagaaggctgctttgcttgctttagcttctcatgcatctgatccagctgaagctgaacgacttaggttcttggcctctcctgctggaaaggatgagtattctcaatggataactgctagtcagaggagtcttcttgaagttatggctgcattcccttcagctaagccaccactgggagtgtttttcgcagcaatagctcctcgtctgcaaccacgatactactcaatttcatcatctccaaagatggctccctccagaattcatgtaacatgtgcattagtttatgggccttcaccaacaggaaggatccaccaaggagtttgttcaacatggatgaagaatacaattcctctggaatatagcgaagaatgcagctgggctcccatatttgtgaggcagtcaaatttcaagttacctgctgacccatccactccgattatcatgattggtcctgggacagggctggctccttttagaggtttcttgcaggaaaggttagcactgaaacaatctggagcagaactgggcacttcaatccttttctttggatgcaggaaccgtaatatggactacatatatgaagatgagctgcaaactttccttgaggagggggcgctttctgagctaattgttgcattctctcgggaagggccaactaaagaatatgtgcagcataagatggtggagaaggccacagaaatttggaacatcatctcacatggtggttacttatatgtatgcggtgatgccaagggaatggctagagacgtacacaggatgcttcatacagtagtccaagagcagggatctttggatagctccaaaaccgagagctacgtaaagagcctgcagatggaaggcaggtacctccgtgatgtatggtgacacatcacccccattcagccatagctctagcgtgtggaagtaaagctggctttgcgtgtacgacatgcctaatgccaaatgaagcgtgccattgattagaaactgaaatgttcagtcgatcagtgtaattctttgacatctaactatttatcattatatggaatgggaggaactgttgtagatttgtagaactacaaaaaaattgtgtatccctaacaagtttgtagcaaagggggtacattattacagtttgagatgaggacatcatgtatactgtttgagacgaggacattatgtatatacttggtacattagaaggccaccgaaaacaaattttgcatctggtttttgaaagcatgtgctcctatcaactatcgtgctgtctgcaat

SEQ ID NO: 98992 - DNA, 1906 bp, Zea Mays
gtttcatgattcatgattgtggtattccatcttgttgccttgacttccaatttcttatgtatctaggtgggaaacgtcttgttcctgttggccttggagatgatgatcagtgcattgaggatgatttcactgcatggaaagaactagtgtggccagagttggatcaattgctccgcgacgaggatgacacaaatggtgcatcaactccatatactgctgctattcctgaatacagagttgttttcattgataaatctgacctgtcattccaagatagatcatggtcactagccaacggtactggtgtgattgatattcaccacccttgcagggctaatgttgctgttcgaaaggagctgcacaaaccagcttcagaccgctcttgtattcatcttgagtttgatatttctggcactagtcttgtgtatgaaaccggagaccatgttggtgtatatgcagaaaattctgttgagactgtggaggaggctgaaagcctacttgacctttctccagatacagtcttctccatccatgcagatgcagaagatgggtctcctcgtaaaggaggaagttccttggccccacctttcccatctccatgtactttgcggactgcgcttctacgatatgctgatctactcaatccaccgaagaaggctgctttgcttgctttagcttctcatgcatctgatccagctgaagctgaacgacttaggttcttggcctctcctgctggaaaggatgagtattctcaatggataactgctagtcagaggagtcttcttgaagttatggctgcattcccttcagctaagccaccactgggagtgtttttcgcagcaatagctcctcgtctgcaaccacgatactactcaatttcatcatctccaaagatggctccctccagaattcatgtaacatgtgcattagtttatgggccttcaccaacaggaaggatccaccaaggagtttgttcaacatggatgaagaatacaattcctctggaatatagcgaagaatgcagctgggctcccatatttgtgaggcagtcaaatttcaagttacctgctgacccatccactccgattatcatgattggtcctgggacagggctggctccttttagaggtttcttgcaggaaaggttagcactgaaacaatctggagcagaactgggcacttcaatccttttctttggatgcaggaaccgtaatatggactacatatatgaagatgagctgcaaactttccttgaggagggggcgctttctgagctaattgttgcattctctcgggaagggccaactaaagaatatgtgcagcataagatggtggagaaggccacagaaatttggaacatcatctcacatggtggttacttatatgtatgcggtgatgccaagggaatggctagagacgtacacaggatgcttcatacagtagtccaagagcagggatctttggatagctccaaaaccgagagctacgtaaagagcctgcagatggaaggcaggtacctccgtgatgtatggtgacacatcacccccattcagccatagctctagcgtgtggaagtaaagctggctttgcgtgtacgacatgcctaatgccaaatgaagcgtgccattgattagaaactgaaatgttcagtcgatcagtgtaattctttgacatctaactatttatcattatatggaatgggaggaactgttgtagatttgtagaactacaaaaaaattgtgtatccctaacaagtttgtagcaaagggggtacattattacagtttgagatgaggacatcatgtatactgtttgagacgaggacattatgtatatacttggtacattagaaggccaccgaaaacaaattttgcatctggtttttgaaagcatgtgctcctatcaa

SEQ ID NO: 98993 - DNA, 2614 bp, Zea Mays
gatccgccaccgcccacccttccgtcgttttgcccttccgtttcacttactggagcacactgcctcgaatgaggaggttatttctggcgtgctgccgctacctgcagttcacatctgtccctgatgctatcagagctacttcacctgttaacaatgtctacgggtcatggaggaggtatatcttcacaaacgctgataaggttctaccatgggaggcgccatcccgtgaaattctgttgaggaagataaattgtgctatgaaggatgggaatgttgaagaggcgctgcaatctttgagcaattacaagaagcttcacggtcttcctgagccgcgggtactgaatagtataattgtgtcgctgtcctacatgtctagtaggaggtggcttcagagggcatttgacatggttctctcagtttatcaaattaatagaaatcttctcaattgtggctcactgatgaggctagcattggcgctcgcaagagatcagatgcctatcccggcctccacagtcctgaggataatactagagagtagaaagcttcccgatgttgatatgctgaccatgtcgtttctgcatatgttgaagtcacaggtaggctcctaccttgccactgatgttctgattgagacttgcgagagctttttggaccaagttacagataggcgggagatgaaaaaactggacccaataaaaaacaatgccaccttgttcaatatggttttggagtcatgtgtgacctttaaatgcattatcaaggcccagaaaataatggaactgatgtcattgatcggagttgtggccgatgtaaatacagtggtgatggctagccgtgtctttgagatggttgggcaacgggatgagttgatacatatgaaaagaagcatcgattctttaacatctttgacatttcttcagtactacctgcatttttatgacagtctattgagcctccatttcaaatataatgacatggatgctgctgcaaagtttttaatcgatctgcatcagcaaccaaagcctggtgttttattttgcaatggtttgcagaaacaaagtatcatacaaattggctctggcaatctgaaaagcggatataaaataatgtttgatcccaaaaaagttgacaggggttttgtgttgggtacagaaagccaattcggccttgttgttcttactgatggaaaccttcttcatactgaaaaggctcttgctaaacttatcataggctgtgtgaaatcaagaaatatgcatatactgtctaacttttttattatgtcatgtcaatatggtctagagctaatttctcctcaagatgtggttactgcttgcattcaaatgggatggttgcatgctgctcatgatatcatagataacttggagtcagccgggattccagttgggattactggttacgtttctcttctgagagcatatgagaaggagaataagtcagaagaagtcaatggccttcttcaacagatacaaaagatggcatctaccatggatgatgttcatactgattcaccatttactatcaataatattgccgaagtagtgaaatatgaaatgtccttcagtagttcatctttggttgctgctttggctgatgaaattaaacattacaaccctggagagcacttggcattagagctcaataattcggttcttttcttctgcaaggcaaaaatgatggaagatgctctttgcacatataagtgtatgagagagcaaaatatcagacccacatctcatactttttgtcatatgttgtgtggttattcttcaatggacatgcatagggagatcaccatgttgtggggagaaataaagcgcagacatgaatatggagagctagatttggatagggacttgcttgatagcttggttttgaattttcttaaaggtggatatttttcgagggtgatggagatcattagttacatgtcaaaacataacatttactgtgacaagtggaaatacaggcgtgccttcctgaagctacacaagaacctgtataggaatttggattcattgcatgacaaaacagaagctcaaagtaaaaggattgaagatgtccgagctttcaggttgtgggcaagcattaagtagggacagcgaccaatttgatccctctcattttcaaattgggtaaagacacccctttgatgacttgtagtgcggtgccaagcaagcctgccttgttgccacctcaaggattactcctggcttgttgccctgaagcctcccttgagggaaaaaggcaaagaggcatcgatggtgttcgcagcacctgcagcgggggaagagggttgaggctgtggagagctttggggagctcagccttagggaggtggtgatgtttgcgctgggagaggtgggcctctccaagcagacggagatccagttggttgacgtgaccagcggcgtgttcggctcccacaccggctctagaaagacgttcttctacttgctccttgtttattgttcaggtatgaaaccggagaccatgttggtgtatatgcagaaaattctgttgagactgtggaggaggctgatgtgatggcccctggccaccggcgtgcgcagatgccgggacgtgagctctgatc

SEQ ID NO: 98994 - DNA, 3288 bp, Zea Mays
atggctcctcttcagacttcagcttctactacctctgtcactgcttcatcaggtgtgacagctgaaagcctacttgacctttctccagatacagtcttctccatccatgcagatgcagaagatgggtctcctcgtaaaggaggaggttccttggccccacctttcccatctccatgtactttgcggactacgcttctacgatatgctgatctactcaatccaccgaagaaggctgctttgcttgctttagcttctcatgcatctgatccagctgaagctgaacgacttaggttcttggcctctcctgctggaaaggggggaaggtttgcctcctcaatcatgtgggagcctgtggcgctgggtctgctcttttatcgaactgtcctgttcatgccggtgtggcatactatgcttgaggtggtggatggctccctccagaattcgtgtaacatgtgcattagtttttgggccttcaccaacaggaaggatccaccaaggagtttgttcaacatggatgaagggctggctccttttagaggtttcttgcaggaaaggttagcactgaaacaatctggagcagaactgggcacttcaatccttttctttggatgcaggaaccgtaatatggactacatatatgaagatgagctgcaaactttccttgaggcgggggcgctttctgagctaattgttgcattctctcaagaagggccaacgaaagaatatgtgcagcataagatggtggagaagtctgacctgaaaattttggaaccaatggaagaggaagagtatagctctgaaacatctaatgaagaagatggcgaaaaagaaggaaatgctgctgagagtgatgtcttcagaccagttgatgtagatccagcatgtttaccaagagtagggatgatatttgactcggaggaagatgcctttcagttttatgtgacgtatggttgtcacgcaggttttggtattacaagaagatctaacaatacctttgatggtttccgctatcgctctacattcatatgttctaaaggagggcagtctagactgagatctggtgtgacaaaacctgcaagaaagcgaggtgtgaagactggctgcaaggccaagatgattgtgaaggatgcccattttcaaaatcgctgggaagtaattgttcttgagttggagcacaaccatccattggatccgaacttgcttaagtttaagagacatttgaagaactccccttttacgataaatccacctcaaatttgtgagtctgagggacaacagagcaactcagctcttgtacattcaagcagagttgttgatactggtataacttcgtcttctacacagattgaattcaaagccaagatagatagaaataggaaattgaagctcgcagaaggagacttagacgccttgttggattttctcaacaaaatgcaagaccaaaacccttgtttcttttacagtttagatatgaatgagcaagggcaactaaggaatgtcttttggtctgacgccaaatcacgcagttcatacaattactttggtgatgttgttgctattaatgtcacaaacttcagcgatcagtatgatatgcagtttgtgtcattcatgggaactaaccaccatgcacagccagtgttactaggttgtggcctgcttgctggtagatctcttggggcttatgtgtggctttttggtacatggttaagatgtatgaatgccaaaccaccacattcaataattacaaactactgtcatgatgtagcgatagctatcaaaaaggttttccctaacgcacgtcaccgtttttgcctttcacacatcttaaatgtgcttcctgaaaagttggaagaaattgataacaaagatgaaattatttccacattcaccacactagcctatgattatgttactatgactgattttgacagagagtggcaagatactatccaacattttcgtttggagagaaatgaatggctgtccaaactatatgaggtcaggatgcagtgggctcctgtttatgttaaggattcattttgggcaggaatgtctgtcacagacagaagtgatagtgtaactgactattttgatggctggttgatgtcaggaacctctttgaaaatgtttgtagagcaatatgaggaagctgttaaaggaaagttagaaaaggaatcttacgaagatttacgatcagctcagatgaggccaccaatggtgacggggttgcctgtggaagatcaagcagcaaaggtgtacactgcagaaatctttcagaagttcttcaatgaaataggacattcatttcattgcaattataatatacttgaacggaatgagtcagtggttacatacatagtttcggagcatgtcgatcaaacaaacaaggtagactacaaagttgcttatgataatgttcaaggtgacatatggtgcctctgccgtttgtaccaatccaaaggaatattgtgcaggcatgcactcactgtactgagacaggagcttgtgctgatgattccacaaaaatacatcattcatcgctggtgcaaggactgtaaacaaacttgtgcttccatatcccagcctgtctcagcagaagttgtggaatttggttccatgaactcagaatcaaaagaatatgctttgtcaatcatgagggaagtcagggataaagtgatttcatatgagaaatcactaagagatcaaagggttgacagccatgtttcaacagccaactttgcatacaatcctgtgaatgaggattttactgatgatgctttgcctatctctcttagtacaaagggctgggatcttacccaaggccaatctaaacgttcccgaaagaagaagctggcgaccccaactgttcttgatactttgaaaaagaaaactaaaagggcatataacaaaaggaggaatgccactgcaaacaccctgaacacatctgccactgcaactgacggcataactgatggcacaaatgttcagcagaatcctgtaaatgagggatggcagctagcgtcgactagtgctcccgaaactttctcttatggagtggagaacatttcgtttgatttgtcacaatacaacaatgccccaagcttccactggcctgaaagcagcagcaggtctcagctccactgagtaggcagcaatgcaatcgtggatgccttccaaatagactaagttctgacagtcttgtaagggcttgttcggttattcctatcttctgtggattagatgagattggaaaaaaatatgaaagattttgacttgaaagattttgac

SEQ ID NO: 98995 - DNA, 681 bp, Zea Mays
ggggctgagggagtgtccaccaccgaaccgaacagagagagggagagagagagagagagagagagagcatcggtcgggcactagctagctagggagacagcggagcagagtggccatcgccatgccgaagctgcagaggttcaggggagtgaggcagaggcactggggctcctgggtctccgagatccgccacccactcctgaagacgaggatctggctgggcacgtacgagacggcggaggacgcggcgcgggcgtacgacgaggcggcgcggctgatgagcgggccctcggcgcgcaccaacttccccctgagcctgagcggcggcggcggcaccctctccccgacgctgcgcgcgaagctggagaaatgctgcacggcgctggcgcaagagccgcagcacggcgcggacgtgtcgcgggcgggtgggggtcgggacgacgacagtagtagccgcggcgccccacgcccggacgccggcgccgtgaaagtcgaccccgacgccgacggcgaggatcagtacatcgaggagatgatcagggagctcacctactacggccccgtggagatacagcaccacccgtccgcgtcctccggcgccgccgccgccgccgcctgctcgagctcagcgattagctgactgactgacgttcggctggcggctagtcggtgcagtcgtgc

SEQ ID NO: 98996 - DNA, 3365 bp, Zea Mays
acgtggaatagttcgaattcatgccgccaaagaatctccgcgtcccgacaggagatgggtccgctccagcgccggccgaccgccatgggtgggctcgaggagatcaagaatgaagccgtcgatctggagaacatccccatcgaggaggtgttcgagcagctgaaatgcacccgcgaggggctgagctccagcgagggccagcagcgcctcgagatcttcggccccaacaggctcgaggagaagaaggaaagcaagatcctcaagttcctcgggttcatgtggaacccgctgtcgtgggtcatggagatggccgccgtcatggccatcgccctcgccaacggcggcggcaagccccccgactgggaggacttcgtcggcatcatcgtgctcctggtcatcaactccaccatctccttcatcgaggagaacaatgccggcaacgccgcggccgcgctcatggccaaccttgctcccaagaccaaggttctgagagatggccgatggggcgagcaagaggctgcgatcttggttcctggtgacatcgtcagcatcaagctcggtgacatcgtccctgccgacgcgcgtctcctcgagggcgatcctctcaaggttgaccagtccgcgcttaccggagagtcgctcccggttaccaagggtcccggggacgaggtgttctcggggtccacctgcaagcagggcgagatcgaggccgtggtgatcgccaccggagtgcacaccttcttcggcaaggccgctcacctcgtggacagcaccaaccaggtggggcacttccagcaggtcctgacggcgatcgggaacttctgcatctgctcgatcgcggtgggcatcgtcgtcgagatcatcgtcatgttcccgatccagcaccgcaggtaccgcagcgggatcgagaacctgctggtgctcctgatcggcggcatcccgatcgccatgcccaccgtgctctcggtcaccatggccatcggctcgcacaagctgtcgcagcagggcgccatcaccaagaggatgaccgccatcgaggagatggccgggatggacgtgctctgcagcgacaagaccggcacgctcaccctcaacaagctcagcgtcgacaagaacctcgtcgaggtgttctgcaagggcgtcgacaaggaccacgtgctgctgctggccgcgagggcgtcgaggaccgagaaccaggacgccatcgacgccgccatggttggcatgcttgctgaccctaaggaggccagggctggtatcagggagatccacttcttgcccttcaaccctgtcgacaagaggactgctctgacgtacattgatgccgatggccactggcaccgtgtcagcaagggtgcccctgaacagattcttgacctgtgccactgcaaggaggatctgaggcgtaaggtgcacggtatcatcgacaagtatgccgagcgtggtcttcgttcgcttgctgttgccagacaggaagtgcctgagagaaacaaggagtcccctggtggaccatggcagttcgttggtctgttgcctttgtttgatccgcccaggcatgacagtgctgagacgattcgcaaggctcttgttcttggtgtcaacgtcaagatgattacgggtgatcagcttgctatcggtaaggagaccggaaggaggctcgggatgggtaccaacatgtatccttcctcagcattgctcggccaaaacaaggatgctacgctcgaggcacttcctgtagacgagctcatcgagaaggccgacggttttgccggagtcttccctgaacacaagtacgagatcgtgaagagactgcaagagaagaagcacatcgttggtatgactggagacggtgtcaacgacgccccggctcttaagaaggccgacatcggtatcgctgtcgcggacgctaccgacgcggccaggagcgcttccgacattgtccttactgagccaggtctcagtgtcatcatcagcgctgtcctcaccagcagatgcatcttccagaggatgaagaactacaccatctatgcagtctccatcacaatccgtatagtgcttggatttatgctcattgcattgatctggcaatacgatttctcccccttcatggtccttatcatcgccattctcaacgacggcactatcatgaccatctctaaggacagagttaagccgtctccgttgccggacagctggaagctgaaggagatctttgccacgggcatcgtgcttggaagctacctcgctctgatgactgtcattttcttctgggctatgcacaagaccgacttcttctcggacaaattcggtgtgaggtcgatcagggacagtgagcatgagatgatgtccgcgctgtacctccaagtgagtatcgtgagccaggctctgatcttcgtcacccggtcccggagctggtccttcgtggagcgccctggcctgctcctggtcaccgcgttcctgctcgcccagcttgtcgcgaccttcctcgctgtctacgccaactggggcttcgccaggatcaagggtatcggctggggctgggccggtgtggtctggctctacagcatcgtgttctacttccctctggacctgatcaagttcttcatccgtttcgtgctcagcggcagggcatgggacaacctcctggagaacaagaccgccttcaccaccaagaaggactacgggcgggaggagagggaggcgcagtgggccaccgcgcagaggacgctgcacgggctccagccgccggaggccgccaccagcacgctgttccacgacaagaacagctaccgcgagctgtccgagatcgcggagcaggccaagaggcgcgccgagatcgcgaggctgcgggagctcaacaccctcaagggccacgtggagtcggtggtcaagctcaagggcctggacatcgacaccatccagcagaactacacggtgtgagatgtgtgctgtgatgtcgacgaaaacacctttgccatgccacccttgttgttcttgcgacgacggagtcatgtgattgttacagaaaaaaagaagaaaattttccggtgatgtgattggagacaatagaagcgtgtacgtacgtacgtgtggctgatcctgaccccgagcatgcagagcagccctaggtgaggtgaccattgccaccagatatatacccgtctttctagcttagctagggagcttcttcttcttttttttccctcttgttattgtcaagtgtgtgcgcgtgttgtaatggttttactcgcctaactagccggtggtctcgcgaggcgaagaaataatgcaaccgaaagcattattgctctcttctgacttgattgatgctggcagcagaatgtgtagcttgtgtcttgtctact

SEQ ID NO: 98997 - DNA, 3409 bp, Zea Mays
actcgacgcccagcaagcgctactactccaccaccaccactactttgcttgcttgcccctttcccttcccttctcacacgagaagagaagcgagtcggcgttcgcgtggcatatgcccgtgtctgccgccgggcttggcttctagggtccgctccagcgccggccgaccgccatgggtgggctcgaggagatcaagaatgaagccgtcgatctggagaacatccccatcgaggaggtgttcgagcagctgaaatgcacccgcgaggggctgagctccagcgagggccagcagcgcctcgagatcttcggccccaacaggctcgaggagaagaaggaaagcaagatcctcaagttcctcgggttcatgtggaacccgctgtcgtgggtcatggagatggccgccgtcatggccatcgccctcgccaacggcggcggcaagccccccgactgggaggacttcgtcggcatcatcgtgctcctggtcatcaactccaccatctccttcatcgaggagaacaatgccggcaacgccgcggccgcgctcatggccaaccttgctcccaagaccaaggttctgagagatggccgatggggcgagcaagaggctgcgatcttggttcctggtgacatcgtcagcatcaagctcggtgacatcgtccctgccgacgcgcgtctcctcgagggcgatcctctcaaggttgaccagtccgcgcttaccggagagtcgctcccggttaccaagggtcccggggacgaggtgttctcggggtccacctgcaagcagggcgagatcgaggccgtggtgatcgccaccggagtgcacaccttcttcggcaaggccgctcacctcgtggacagcaccaaccaggtggggcacttccagcaggtcctgacggcgatcgggaacttctgcatctgctcgatcgcggtgggcatcgtcgtcgagatcatcgtcatgttcccgatccagcaccgcaggtaccgcagcgggatcgagaacctgctggtgctcctgatcggcggcatcccgatcgccatgcccaccgtgctctcggtcaccatggccatcggctcgcacaagctgtcgcagcagggcgccatcaccaagaggatgaccgccatcgaggagatggccgggatggacgtgctctgcagcgacaagaccggcacgctcaccctcaacaagctcagcgtcgacaagaacctcgtcgaggtgttctgcaagggcgtcgacaaggaccacgtgctgctgctggccgcgagggcgtcgaggaccgagaaccaggacgccatcgacgccgccatggttggcatgcttgctgaccctaaggaggccagggctggtatcagggagatccacttcttgcccttcaaccctgtcgacaagaggactgctctgacgtacattgatgccgatggccactggcaccgtgtcagcaagggtgcccctgaacagattcttgacctgtgccactgcaaggaggatctgaggcgtaaggtgcacggtatcatcgacaagtatgccgagcgtggtcttcgttcgcttgctgttgccagacaggaagtgcctgagagaaacaaggagtcccctggtggaccatggcagttcgttggtctgttgcctttgtttgatccgcccaggcatgacagtgctgagacgattcgcaaggctcttgttcttggtgtcaacgtcaagatgattacgggtgatcagcttgctatcggtaaggagaccggaaggaggctcgggatgggtaccaacatgtatccttcctcagcattgctcggccaaaacaaggatgctacgctcgaggcacttcctgtagacgagctcatcgagaaggccgacggttttgccggagtcttccctgaacacaagtacgagatcgtgaagagactgcaagagaagaagcacatcgttggtatgactggagacggtgtcaacgacgccccggctcttaagaaggccgacatcggtatcgctgtcgcggacgctaccgacgcggccaggagcgcttccgacattgtccttactgagccaggtctcagtgtcatcatcagcgctgtcctcaccagcagatgcatcttccagaggatgaagaactacaccatctatgcagtctccatcacaatccgtatagtgcttggatttatgctcattgcattgatctggcaatacgatttctcccccttcatggtccttatcatcgccattctcaacgacggcactatcatgaccatctctaaggacagagttaagccgtctccgttgccggacagctggaagctgaaggagatctttgccacgggcatcgtgcttggaagctacctcgctctgatgactgtcattttcttctgggctatgcacaagaccgacttcttctcggacaaattcggtgtgaggtcgatcagggacagtgagcatgagatgatgtccgcgctgtacctccaagtgagtatcgtgagccaggctctgatcttcgtcacccggtcccggagctggtccttcgtggagcgccctggcctgctcctggtcaccgcgttcctgctcgcccagcttgtcgcgaccttcctcgctgtctacgccaactggggcttcgccaggatcaagggtatcggctggggctgggccggtgtggtctggctctacagcatcgtgttctacttccctctggacctgatcaagttcttcatccgtttcgtgctcagcggcagggcatgggacaacctcctggagaacaagaccgccttcaccaccaagaaggactacgggcgggaggagagggaggcgcagtgggccaccgcgcagaggacgctgcacgggctccagccgccggaggccgccaccagcacgctgttccacgacaagaacagctaccgcgagctgtccgagatcgcggagcaggccaagaggcgcgccgagatcgcgaggctgcgggagctcaacaccctcaagggccacgtggagtcggtggtcaagctcaagggcctggacatcgacaccatccagcagaactacacggtgtgagatgtgtgctgtgatgtcgacgaaaacacctttgccatgccacccttgttgttcttgcgacgacggagtcatgtgattgttacagaaaaaaagaagaaaattttccggtgatgtgattggagacaatagaagcgtgtacgtacgtacgtgtggctgatcctgaccccgagcatgcagagcagccctaggtgaggtgaccattgccaccagatatatacccgtctttctagcttagctagggagcttcttcttcttttttttccctcttgttattgtcaagtgtgtgcgcgtgttgtaatggttttactcgcctaactagccggtggtctcgcgaggcgaagaaataatgcaaccgaaagcattattgctctcttctgactt

SEQ ID NO: 98998 - DNA, 2951 bp, Zea Mays
ctcgaagaggaaaaaggaaaaaaagaaaacagggagagcccaagcctgagacgaacacgaagaagcaaggagcgaagcagacacgagcgagcccatcccaagttcccaacccacacgaagctgcagcagcaggcagccgcctcgccacgcgcccgagcaacgccgccgagagagccgcccgcccgcccgcccgccggtgagcagcgagggcaattcgtcttcggctggtccccgtcccgctcccgcccgccaaccccaattgctcccctctcggaggtcagctcaattcctgctgtttctcggattcgattcggttgcaccgggcgcgtcgtctccctcgccggagatccagcaggtacgagctcgcctggggccgaggatcatgcccccattgctctagggtttgggtgggtaatccaattggctcgccaggcccgcggcctctatgcttgattcgggcctgccgcgccgctccctgggatctcgcggcggttggtgcggcgccagcggtgatgagatcccctccatggccggcgagctgggaattggggtacgggctcgctctctgcaggaagcggcgcaagccctaatggtttgatcctagctgggtgcggcgtgctatccccaattcattggtttctctactccgggtctgatattggggtttgctgcggtggtaactgcatggacacagtaagggaggaggcatggccagtggctgcaccgcggcagcagccatcagctccccaaccgcagcagcaacagcagaatggccgtattgatctcagggagctcaaagctcagatggagaagcagcttggtccggatcgctcgcggcgatattttggctacttgaatggctacttatcagagaggctcggcaggcaagactttgaaaagctgtgcctgcataccctggggcgggagaaccttcaactgcacaaccggctaatccgtgcaattctctacaatgcctaccagggaaagtgcccgccacctccactggatgcagggagacctgtaggagcatcagtaaagaaggcttatcaggctgctgaagtgttgaatgcttgcaatggtgatgccaggttgttacagattcagagattgaggcctgtggccagagcacaggatcatactttaaaagacagtacaaataacacgggtccaaattgtagggtggctgctgccaatcacaaccaagttactcacgatgcttctggatctctggagaatggtacactaaatcaacttgagttgaagagattgcgttttcaacaatgcgaacctgtagagccagtggcaaagcatccgcgtgtggaacagttgccacccaataatttgcctgtacagagaagaagcatgagcagcactgcagaacagtctgcagaaatattgagaagtcctgtacgagctccactgggaattccattttgttcagcaagtgtgggtggtgcaaggaaatttccacctccactaattgttgcaggtgaggatcacttcaacagctgttctgagcatgatgggctgttcagcactgaactgctgcatagacggatggagaaaacagcagaaacgctgggtttagctggtatcacaatggatagtgctgagcttctgaatattgctctggacaagtacatgaaaaacctgattaggtcatctgttgagttagtaggaggtagtgttcagagggatgcaaggaaagggacaccaacctacaagcagcaagcctatggaaagcagattaatggtgtccggctgccaaaccatgttcatatgcaatcagccagtggatcaccaggagccaagaatgagattggaattaaccatttgatctccatcaatgactttaaggtagccatgcagctaaaccctcaacatctcggggagaactggccagtccttctggagaagatatgtctatgttcttcagaggaaaatgactgacatatggcacttttttacttcacagcgaagttttgtaccaatgtgcttactggtgcccatccgatgtacatttgagctggaagtggcaagattgcaggcacaacacaaaatatgcacatgtggggtcaaggcagaaatctgatcaacgttcagctgtcagagttgtactgaaagaaagacattctttttttcctgatacatcatgctcaaataaaggaaaacatcttctgttctggccatgcagcttaggcctcattagcacttacaaggtggatagtgttacatccaaaagtcccaacttctatgtaacatctggcataagggactggggcagcaaaatgcaagtgctgtcttgtaacttataggaaaatgttctgtaagtttctaggtcaggatgtacattattgattgcaaaaattttctaggtatcttcagtactaatttcagggatctcgaatgttcatttaattcttttgtaactctgctatgagaattatatgttagatctctacctttctaccttgatgtgcgcaagtgtctgccttcgggattaggttggtggtgcccccatacactttttggtgtttattatacccaagaaaaaaaaggagatgcattggatatcacagtgttctgtgatctcaacatgttgtctggacaaatggatcctcgttcaaaaatcttgttacttcggttctttctcttgtccaacttttatttttcattttgaacaatttcaatattttgtttcagagataagaaaagaaatttggtctctggtgtcatttttaggctgtcaaaagcattttcattattcttatactgttatatatcgcgagtatgttgtatctgaactagtgtacttattgatgttggagaggatcagagaaccctggatgctgaccgtctgaattccgaacgttctctgtattttatgtctgcggcaaagaggctcgccggcagtccaatacatcctggttcaatataatatctacttatgc

SEQ ID NO: 98999 - DNA, 916 bp, Zea Mays
cagaagctccatcgatctcggagcagcagacgagcgcatccagctacctagcaggacccgtcggcggtgaccacaccaggacgccgaggtcgtcgctccgatgcctggcggcctcgaggtacgcggcccggcccaccaagccttcggtggactaccgctggtcccacgcgcggtgcacaaccacttgtacctccgcgtcgtccgccgagcgccggccgtgctgccgcgtcgccgccgagtcctccggctcggagtcgtccacgtggcccccggtgacgcggcggcggcagacggggcacgtggagtgcgccagcagccaggtgtcgatgcactcggcgtggaaggcgtggcggcaggcgggcaggacgcggagcagctcggcggcgtcgaaggcgcccaggcacaccgcgcactcggtggcgcggcccacgtcgacgtcaccgtcgccgaaccggaccgccggaagcgcgcccaccgcggagctgctgagccccgagcggcagcggtcgcacgaggagggcgcgaagccgaggcccaggccgccgggccgctcgccggggccgcgctgcttgcagtgcttggcgtagatgaggaagaggaagagcgccagcagcacggccgtgagcacgcccatgatgacggccgcgtccacggccggcagcggcggcggtggcagcggcggtggtcccaccttcgtcggcggcgacggcgactgcatggcctggcgcgcaagcgccggcagcggcgtcggcggggacgtcatcctgtctcgatcatggccggcgctcccatgaatcgctcgcggtcgcgggagaggatctgcatgtcatggggtggaagtgaaacggaaagctggcggcgtgccgggcttccctctgagcttgcacggcttaaaaatagcgcgagctatctttga

SEQ ID NO: 99000 - DNA, 236 bp, Zea Mays
gttaaaaaacgacagaaggaagaacgtgcaaaaccatgagggtgtgttcagcatgcatggagagctcagtagacatacgattacgatcatcaaggcatgaacttgagatgccatactcggttcggcgagcgagccatcattgtttccatcactgtccttccattaaaatccacacgaaaacgattgcggtaaataaactcaatggtaaacagaaaaacaggtgaagaaaataggca

SEQ ID NO: 99001 - DNA, 565 bp, Zea Mays
atgacgacgtcgtccagcgaggtcacggtgtgctcccacctgttcacggtgagaggctacacccacaccaggggcatcggcgtcggcaggtccatcgagtcgcaggcgttcgacgcggccggccaccgctggtccgtcgtgttctacccggacggcgacgaccaggacgcgaggggccacatctctatcttcgtcaggctcatcggcagcggcggcgccggagacgtcacggtgctctacggcttcagcctcgtcgacccgagtggcgccgcgccggcgtcggaggcctccaaggcccccaaggtcgccacgttcagacattcggcgggcggcgactacagaggtatcggccgcttcatggagcaccagaggttcgaggcgtctccgtacctgcgggacgactgcttcaccatcaagtgtatcatcggcgccgtcgagaggcccggcctgccgccgctgccggcggcggcctcggagctgcaccacgatttcgaccgacttgcggtagacggcggccgttcggaggacgccatgtccgacgtcgactgaggaagccatgctgctg

SEQ ID NO: 99002 - DNA, 394 bp, Zea Mays
ttacccatgggtaggctgggctcggtggcgcggtggtgcggcgggtggagggcgcggcggcagaagctgctgctgctgcgccggcgggggcggcagcacagcggcggcacggtgtggctggggcggcgcaggagctgcgggcggctggccgtgtcgcggctggtgcggtggcggctcgtcgcggagctgctgcggcccatcaggaaggcgctgatggagatggtcgcgggcgccgggtcctccgccgccccgggccggcggcagctggtcacgctgccgcagctcaacttccccttcgtcggcactctcacgctcccggccgtcgcctgatcgagacgcgcgtctgcggtctgcgtgcccggcaggcatgcatcgtgtaatgattctgcgtttt

SEQ ID NO: 99003 - DNA, 2377 bp, Zea Mays
gctcgcggcactgcaaccgcagtggtcaaacgtgggaaattgaagcggaggaagatagagagaaaaagaggagacgagagagggagagagatgctgcaggtggaggaggcgctggcggcggtgctgtccgcggcggcgggccacgcggagccgcacgccgtgccgctgcagggcgcgctcgggctcgtcctcgcggaggacgtctgcgcgcccgatccgctccctcccttccgcgcctccatcaaggacggatacgccgtcgtggcctccgatgggccaggggagtatcctgtggtcacggagtcgagggcgggcgacgacgccctcggagtggttgtcgtccccggcacggtcgcctacgtcaccaccggagggccggttcccgatggcgccgatgccgtcgtgcaggtggaggacaccgagcagctccctggcggagcggatgggtccaagagggttaggattcttgcgcgggcctcccaaagacaggacatccgcagtgtgggatgtgacatagagaaggattcgattgtgctcaagtctggtgagcatataggtcctgcagaaattgggctacttgcaacagtgggtgtaaccactgtcaaggtgtaccctcggccaacaatcgctgtattctccacaggggatgagctagtgcagccagccactgccaccctcagccgtgattcgtgattccaatcgagccatgcttctagcttgtgctattcagcagaaatgcaaagtggttgacctaggtattgcagaggacactgaagaaagtctcaaggagcatatggatgcagctttgcgttctaatgctgatataatcattacttctggtggtgtttccatgggcgacagagatcttgtcaaaccttgcctggcaaagatgggtaaaattcactttgagaagatccagatgaaaccaggaaagccgttaacctttgctgagatcaccacacaagacacgccaaagccatctaaaacagttcttgcatttggtttgcctggaaatccagtgagctgtattgtttgctttaatctttttgttgttcctgcaatccgtcttctctctggctggtcaaaccctcatctgcaaaggtagtaatcctcattgttacaatgttgtcagttttgttctcaccttacactattcaacgtattccttataactctataaccagagtgcatgtgcgcatatcacatcctttaagagcagacccacatcgtacagagtttcaccgtgcagcaattagatgggtgcttgatgatggatctggtcgacctggttttgttgctgagagtactggccatcaggctagtagccgtcttcttagtatgaaatctgctaatgccctgctggaaataccatccactggacaaatattggcagctgggacatctatccaagccatacttatttcagacataataacttcttcagataaactgcctactccttcaaatccgtatccatctcgtggtccttctgcaaaaagtatttccgcagatgtatctcagattgcatctccacaggatgctgaagttaaagtcgcaattctgactgtaagtgacactgtttcatcaggtgctggccctgataggagtggcccaagagctgtatctgtagtgaattcttcatcagagaaactgggtggtgcaactgtggttgccactgcagttgttcctgatgaagtggacaagatcaagggcattctggtacaatggagtgatattgaccatgttaacctcattctgacattaggtgggactggcttcacacccagagatgtcacaccggaagcaacaaaaatggtgatacagaaagaagcgcctggtctcacatttgttatgcttcaagaaagtttgaagattacaccattcgcaatgctatcccgggccacagctggaatcagaggatcaacacttatcatcaacatgcctggcaacccaaatgctgtggcagaatgcctggaagcactcctcccagcgctcaagcacgccctgaagcagatcaagggtgacaagagggagaagcaccctcgccacactccacatgccgcagcggcgcctgtggaccagtgggagcggagcttcagagccgcatcatctggtagtggtgggtgctcatgtgatccctgaggagccctgatcgactgtgaaataccaaaagagtggaaccaaatacgagacagtaggagagctctgtgtcctccgtgctccattgcattgcctgcgtgcctgcgtccagttcgatgttgaagttttgatcttgttctttggtatgttatatggagatgcgggagtccttgattgttacttgctcacgaacttctttcactgtgctacaaataatgtataatatgtaatctcattg

SEQ ID NO: 99004 - DNA, 2371 bp, Zea Mays
gctcgcggcactgcaaccgcagtggtcaaacgtgggaaattgaagcggaggaagatagagagaaaaagaggagacgagagagggagagagatgctgcaggtggaggaggcgctggcggcggtgctgtccgcggcggcgggccacgcggagccgcacgccgtgccgctgcagggcgcgctcgggctcgtcctcgcggaggacgtctgcgcgcccgatccgctccctcccttccgcgcctccatcaaggacggatacgccgtcgtggcctccgatgggccaggggagtatcctgtggtcacggagtcgagggcgggcgacgacgccctcggagtggttgtcgtccccggcacggtcgcctacgtcaccaccggagggccggttcccgatggcgccgatgccgtcgtgcaggtggaggacaccgagcagctccctggcggagcggatgggtccaagagggttaggattcttgcgcgggcctcccaaagacaggacatccgcagtgtgggatgtgacatagagaaggattcgattgtgctcaagtctggtgagcatataggtcctgcagaaattgggctacttgcaacagtgggtgtaaccactgtcaaggtgtaccctcggccaacaatcgctgtattctccacaggggatgagctagtgcagccagccactgccaccctcagccgtggtcagattcgtgattccaatcgagccatgcttctagcttgtgctattcagcagaaatgcaaagtggttgacctaggtattgcagaggacactgaagaaagtctcaaggagcatatggatgcagctttgcgttctaatgctgatataatcattacttctggtggtgtttccatgggcgacagagatcttgtcaaaccttgcctggcaaagatgggtaaaattcactttgagaagatccagatgaaaccaggaaagccgttaacctttgctgagatcaccacacaagacacgccaaagccatctaaaacagttcttgcatttggtttgcctggaaatccagtgagctgtattgtttgctttaatctttttgttgttcctgcaatccgtcttctctctggctggtcaaaccctcatctgcaaagagtgcatgtgcgcatatcacatcctttaagagcagacccacatcgtacagagtttcaccgtgcagcaattagatgggtgcttgatgatggatctggtcgacctggttttgttgctgagagtactggccatcaggctagtagccgtcttcttagtatgaaatctgctaatgccctgctggaaataccatccactggacaaatattggcagctgggacatctatccaagccatacttatttcagacataataacttcttcagataaactgcctactccttcaaatccgtatccatctcgtggtccttctgcaaaaagtatttccgcagatgtatctcagattgcatctccacaggatgctgaagttaaagtcgcaattctgactgtaagtgacactgtttcatcaggtgctggccctgataggagtggcccaagagctgtatctgtagtgaattcttcatcagagaaactgggtggtgcaactgtggttgccactgcagttgttcctgatgaagtggacaagatcaagggcattctggtacaatggagtgatattgaccatgttaacctcattctgacattaggtgggactggcttcacacccagagatgtcacaccggaagcaacaaaaatggtgatacagaaagaagcgcctggtctcacatttgttatgcttcaagaaagtttgaagattacaccattcgcaatgctatcccgggccacagctggaatcagaggatcaacacttatcatcaacatgcctggcaacccaaatgctgtggcagaatgcctggaagcactcctcccagcgctcaagcacgccctgaagcagatcaagggtgacaagagggagaagcaccctcgccacactccacatgccgcagcggcgcctgtggaccagtgggagcggagcttcagagccgcatcatctggtagtggtgggtgctcatgtgatccctgaggagccctgatcgactgtgaaataccaaaagagtggaaccaaatacgagacagtaggagagctctgtgtcctccgtgctccattgcattgcctgcgtgcctgcgtccagttcgatgttgaagttttgatcttgttctttggtatgttatatggagatgcgggagtccttgattgttacttgctcacgaacttctttcactgtgctacaaataatgtataatatgtaatctcattgactggccgtttgatgttttgtcatggtctaatagaggagccgcagtaatttgagtggcgtttgtccatgata

SEQ ID NO: 99005 - DNA, 1479 bp, Zea Mays
gttattcaaaatcgatcccgaccttccgctcccgcaagaaaggaggagaaaaggaacagcggaagcgaagcacaagcagtcagaggcggccgccgcagcccgccgcagtagcgacacgcaacccccccttcccctatcacgccacccggctccacggaggagcgagaccgcgcgccgcagatccttggtcgccgctagggttccggcgagatggacgtggtgaaggcggcgcagctgtcggggcggacgctggaacgtgttgtggtgcaccccctggtgctgctcagcatcgtcgaccactacaaccgcgtcgcccgcgacacccgcaagcgcgtcgtcggcgtcctcctcggcacctcctcccgcggctccgtcgacgtcaccaactcctacgcggtgccgtttgaggaggatgacaaggatcctaggatctggttccttgaccacaattaccatgaatcgatgttctccatgttcaagaggattaacgccaaggagcatgttgttggctggtacagcactggcccaaaactaagggagaatgacttggatgtccatgcattgttcaacagttatgttcctaaccctgtcctagtgattattgatgttcaacccaaggagcttgggatacccaccaaggcgtattacgccgtggaagaagttaaagagaatgctacacagaaaagtcagaaggtatttgtccatgttccttcagaaattgctgctcatgaagttgaggaaattggagttgaacaccttttaagggacgtaaaggacacaaccataagcacacttgctacagaggtcactagcaagcttgcagccttgaagggactagatgcaaggctcagggagatccgaagctatttggatcttgtaattgaagggaagctcccactgaatcatgagattttgtatcatttgcaggatgtctttaatctccttccaaatctgaacgtaaatgagctaattaaagcctttgcagtgaaaacaaacgacatgatgttggtaatatatctgtcttctctgatccggagtgtcattgcgcttcacaatttgatcaacaataagatgctaaacaaggagcatgagaaggctgaggattcgaaaccagccgccattccaactgctgccggtggagggggagctaaatgagcttttgatcacttattgatggccaagaaaagggaggaaacgtgattacatgcttaccacggttgtgctggaaccaaatcgccttgaccttgaatggatattttcatgtttacttcacgtatgataaggtcaacggcaagaaaaatcatttacgttgtatgagagcattagatcatacctcaagttttctgtagatctcgatgctatttcatctgatgcatcatgttttgtgatgtagacttaagttttattattattatgattgatttatagtgaacctgtacgtcatgcaattaatgttcattcgtgattgatttgtagcaa

SEQ ID NO: 99006 - DNA, 1544 bp, Zea Mays
gcctcctccctagctgcatgaagggctgcaactaggctcgggctgccttaagcgacgcctaggtttctagtcgagctagttgccttggtgaccctcatcgacctctagtgaccgattaagatgattagtcgtgattaattgcaataaatcagacgacttgtaagcactggtataggttagtttccactttccacaagctgtttgactgtgttgcgcctattgttagtgatacatggttgcaggcattttccaattttcttttgtgctcaaaatatttgctcacactagatacttgccccaaaactgcatagcattttctcatgagttctgcttgaaattctatgtgcactgccctagcactggtttttggcaaaagaaaaggtaatcaacctgagtcaaataatattgttgggtcaaactaaatcatgtgctttgagagccatcataccttttgatggtttaggaacttcaaatgttttttacatttcattttcttcatccttgtctagggatgttggatatgatgatcaaaggattatattttctgtataaagttaatcctgatagcttgaacactgggtgctcatactgtattacctggggctcttttcgctgctgtttattccaattattcctttccaatttgcagttatgttcctaaccctgtcctagtgattattgatgttcaacccaaggagcttgggatacccaccaaggcgtattacgccgtggaagaagttaaagagaatgctacacagaaaagtcagaaggtatttgtccatgttccttcagaaattgctgctcatgaagttgaggaaattggagttgaacaccttttaagggacgtaaaggacacaaccataagcacacttgctacagaggtcactagcaagcttgcagccttgaagggactagatgcaaggctcagggagatccgaagctatttggatcttgtaattgaagggaagctcccactgaatcatgagattttgtatcatttgcaggatgtctttaatctccttccaaatctgaacgtaaatgagctaattaaagcctttgcagtgaaaacaaacgacatgatgttggtaatatatctgtcttctctgatccggagtgtcattgcgcttcacaatttgatcaacaataagatgctaaacaaggagcatgagaaggctgaggattcgaaaccagccgccattccaactgctgccggtggagggggagctaaatgagcttttgatcacttattgatggccaagaaaagggaggaaacgtgattacatgcttaccacggttgtgctggaaccaaatcgccttgaccttgaatggatattttcatgtttacttcacgtatgataaggtcaacggcaagaaaaatcatttacgttgtatgagagcattagatcatacctcaagttttctgtagatctcgatgctatttcatctgatgcatcatgttttgtgatgtagacttaagttttattattattatgattgatttatagtgaacctgtacgtcatgcaattaatgttcattcgtgatt

SEQ ID NO: 99007 - DNA, 156 bp, Zea Mays
caacagaaaaagaaatataaagaaaaagaaaaagaaaaaggagaagaaagaaagcaaactagaccaacctgcccccacaatctaaacttaaccaaccaacacccttccctaatgaggttaactgctgaactcactcctagatccctacatgacacc

SEQ ID NO: 99008 - DNA, 1602 bp, Zea Mays
atcctatcatcaacgccatacaggtaccaagcctatgagctgatccatgccatataggccatgcttggtgccgctggcgctgtcatcccagaggcctgcaacaagtttggcgctaactgcgacccttaggccgtttcgttcaagactgatactctactcctggatgacaatactaaactacttcggcaacaacattcccatcaacggatctatgtctggctgtcatcgcgaagatcatcctcgtcatcggtgccccagtgggccctttaacatcctaggcctggccaacgacccctaccaaactgccatcctcaaggtgaaggagatcaagaacggccgactggccatgttctccatgttcgccttcttcatctaagcctatgtcaccgacgaaggcccccgtgtagaacctcgccaagcagaagagacgtacaacaagttgcaaaacgaccatattacagcaaaagaacgactttagtaagagcatggtactaatatggcatgttgtgtttagtggaaacctccctatcttgaggtttcttcttgatcatggtgatgatctccatgaagaaggcagcctggaaggtcatgacaggttcaccgttctacatatagctacagagaaagatataatgtagactcatattttctattatttatgttgcttattctgttaatcaataaactgcatgcaattttttgtttataactatttttagaaaaaaacatacttcatgtgcaaaacattgcctggcgaattttcatgctttacttgtatatttgtggatcatactatgttcttgtaactacagtttaatgtcagtggaacacaaacacatgaagttgttctgataacgataatccttcttgaataattcctatatgtaagttagcatagcatgtgtgtgggtgtttgttttcttagtagtggcaatggtttattcttttttttgccatcctgttagtattttgtagttcattatcaagtatcaacctatctctttgctttgtctaatccgagatcaaggacttccttctgaccgtgaggaggaaggatgcccgatcagtgaaggtcaagaggatcaaggatgttgttaaattcaagttacccaaatggtgcattgcctgatatcataattggacataagtttcagagatatcgtctaagtcttctggttggtttaaactgtcactggcataaggccataacacctctgttgtctgaatgtttatatttcattcacctatatactatttattgactcaatcattgtagcaaaaaaaattaattgcattggcaaatatgattttcttatattctctagcagatgtttaaggtatgtaaacctaaacttttaaaagatgctaacgagagcatatagcgataaatagtgcttttgtacctcaatgtatctttattacattttggttagctccgtagcaaagcacgggcatatacctattagacaataaaaagaaagctaacaaaaaaggtaagagcaaatagaaagccaaacacaagcacagtaaacatagacagcagccgttccattggaagagtaatacctcgtgaggaagattgccaacataaacagtagtaaa

SEQ ID NO: 99009 - DNA, 399 bp, Zea Mays
atggaaactgatgagcagggggcagggacggccttcaaggatgagctgcacgccggcgctggtggacggtggagagccctggaggctggagcagccgccaccggcagaggacagaaagaggaattccactacatgggttacaaagtgcagcttctgaagattctggtcactgtcctttattattgggtttcagagataacaaagattgaagggtttcttgaagtggtgcagaatgcttggagttttgttcctattggccaatgtccattttccacttttgatttaaaactcaaagggacagctaaagcccttcaaggttggagtagcaagaaggtgggacacattgagactcagctgcatcttgctagagacttgttcgatcagcttgagattgcgtag

SEQ ID NO: 99010 - DNA, 117 bp, Zea Mays
gttcttgtaactcagggttgcccatcattgtatatgtttaccggaaccagtttgcccataggcaaatatacaaaactaaatggtttatcatttttcagttgcattctaagtaactag

SEQ ID NO: 99011 - DNA, 350 bp, Zea Mays
ccttagacttaccaatttcgaatattaacttaggataattaatagaagtatttcaactagttcttagaactactaatctagactatgaggcatagcacatcaaccaaacaaattattacaccattcgatcaagcaagtaaacatcatcaagaccatagacatttgtaagactacaagcaataaagggtaacatcacagctggacgagagaagtgctaaactttactactcgcattactacttcattatacacatacaaggcctaaatagtcactaactcaaatgcattcaccaaagcatttacttccttctcaaaatgctaaagtctaaagcaagcattaaaaaagaaaa

SEQ ID NO: 99012 - DNA, 1257 bp, Zea Mays
aaaaaaacgaatgtttttcctttcacttccaagttgcaacaatgctggctggcgtggccaaaccgcagtagtacatgtatttacactggaggattattgggggtggggagaaaagcaaagaagaagaagaaaaagaattacgtaaaccttagcccccggattgattcgacaggggaatgaatggatggctagacttgacagtcgttctaaaaaaatcctaggacttctttctcagccatctcacttcaccgcctccggcgtccatccgggccgctctcgtcttgctcgtcgagctgtctgtctccgccgcgttcagctggaaacggagggagcgagcgcgaagaagtggggaaaataacaccccacaaaaaacgggggggacgacggcgagatggccggcgcgcgcgcgcgaataggcactaggcaggcacacgggtggtggctggctccggcgagcagggcggcgcgctcaccagacggccttgtcggcggagaagccgcggaggagcgggagcgagtcgccggcggcggcgacgcagcagcagtgcgtggcgccggcgctctggaggtcgtcgagggtgacgaagcgggaggaggacttggacggggcggagaggtggcggaggacgtgctcgaagagggcctcgtcgcaggggagcgcgatggggcccgcgcgcgggaacccgtactcctcctccgcctgccggagcagctcccggaacacggggtggttcaggtgcgccgcccgcaccacgaaccgccgcgacgcgccgcccacgcacaccgccacgtggcccgacgggaccgccgcatcagccgccgccgccgccgccgcgcgcgacgccgctcgggaccgccaccgccgcagcgtctgccgcagccacacgatggaccggatcttgctgctgcatttctccatgcccaccgcacgagtgagcgagcgagcgcacgcactcccggtcgccggtcgaggtgcctgtgcctctagccgcgcggttgggttgggaatgggccaatcaatggcgggggttcctggtagtggtgaggtgaaatgggcacggtggtgggctggtggctggcttttgcaggcggatggctgggggaggtggcttgctaggctttatagggaggagtggccccttggcgaaatggagggtccctttgcctttcggatcttccagttggttggcccgctctgaaaacaatggattgttattcttctactagagtactagtactccctctccctgtcacaaa

SEQ ID NO: 99013 - DNA, 2149 bp, Zea Mays
atatatccacatagcgcacacctgcttgtgaaaagttcaatcttgagtgtcgcttgtttcaaatcccacctttgcttgctccccccggctcctcctcctcgtaccaaatctagggttcccgatcgaaatcctgcgccgccgccgccgccactgccgttggcgataatgtcggccagcaccgagcccgagaaggacgccgctgccgctgccgccaccgagggcgacgagaagacggaggcgaaggacagcggctccggctgggagctgctgtactgcggcgggacgagcttcgacgccatgggtcggaaggtggtgggcggggcgcagggcaacctggtgtcgccgactcggctgcggccgctcgtgggcgttgatatccgcttcgttgcctctggatgcactgcttgccactgtgttgctttagatgctggaggcaaatgttatacatggggtcgcaacgagaagggacagctagggcatggagatactcttctgcgtaacctgccgactgttgtttctcaactatcaaaatacaaaatcatcaaagcatgtgttggaagaaaccatacagtggttgtaactgatgatggcaaatccttatctttcggtcataacaagcatggacagttagggacgggttccttaaggaatgagattgagtcatcgccagtgtcctgtatcgttgcggaagcaaccaacgttgcatgtggggctgattttactgcctggttgtcatctgtggaaggctcttctatacttacagcaggtcttccccaatatggtcaactcgggcatggaactgataatgagtacaatgctaaagaatcgtctgtgaaactgacctatgaaccccagccccgtccaagagcaatagctgcattttctgggaaaactgttgtcaaagttgcatgcggaactaaccatacagttgcagttgattccaatggctttgtttacacctggggcttcggtggatatggaaggttggggcatagagaacagaaggatgaatggcaacctcgccttgtagaagtcttccagaagcacaatgttctgcctcctaatgccattgtctcagctggttctgtgagttctgcatgcactgctggtggtggacagttgtacatgtggggaaagatgaagaatacaggcgatgattggatgtacccgaaacctgtgatggatttaagtggttggaacattcgctgcatggcttctggtaacatgcaccacattgttggtgctgatgattcttgcataagctggggtgtcgcccagaatggagagcttggttatgggcctaacgggcagaaatcatcagcaaatcccaaaaaggtggacattcttgagggcatgcatgttacaagtgtcggctgtggatttggactgtctctgattgttgtggacagagcaaatgttggtgatcgacttggtcagctggaaatttatgatggtgacaccggtgctgaagtagagaaagtggaggtgcaagtaaccaagaaggcatctgccagcaccaactcacgtgccaacaagcgcaagaaaacgaaggatgtttctgaatctgaatccgaagaggatgatgatgatgatgaggatgaaagcggagacgatgaaaatggtggtgtagaagagtcaaagggcaggcgtggccgtaaacccgctaatagagggagaggcaggggaggcaaaaaggcgacccctgaggcaaagccatctggaaggggcagaggccgccccaagaaaaccgagagttctgctcagaaagccggaggaacctcgggcagaggaaaaagaggacggccacgcaagtgatggtccgccctacagtaatgcggcgttgaaaatcagtaacgcctgatgtgatcccattgacattgaggattcattttggtagcaatgcccgttgcactctgcccattttctcactctgattgttgcagctatccaatccaaagacattattagtctcttccccctcccccaatttccgaaatggggtttgccatcccattgtaagtctagaaatgcttaacatgcacatctgtgttcttcattgacgatgattttcttcagctttaggctattaatgaacccttgattcgagtgatttatttatcctgttcaatcacatggtccttgatgggta

SEQ ID NO: 99014 - DNA, 3487 bp, Zea Mays
gtatatattttatttacttttctatgaacaatgtaaaccaaataactaatactaataaaaaactactaggttaatttgatttaaggaaagtgaagattttgaataaatcaccgcgaggttgaatctataagaaaaaaaatggaagtacactgaattttctttttaaagtctaatctctactatctctagtctagtctggagaaagaaacgcactgggaaggagcggaaagagcagcggagggcccgaggagcgaggaggcctccaactccaaaaaaatattaaaaacgccgtgcagaggtgcacaggcacagccgcaagcgaacgagccagcgtagaaggagcagagcggccatccactgccgtcctgttccgcccccagacggctccagaaacgcacgggcgtgcgcgcgcccgcggagcagagctgatcgactgacttgtctgactgagaccgcggccggccgtgatccgcccgctccatggcgcgctccaagaacggctgcctcaagatcctcgtctgcgccggctccagctccgatccctccgccggctccgacgccgacgccgccgaccaccccgacgagaacaaggccatatcagataaaagcatatggagctttcgtaggagatctacaaggcatcgagttttgaagaactctgatatctcagaacctgaaactgttagttccagcaaagcgaaggctgacattgcaccaaacaacaatgtttatacttcaacatattcttttgcctcggagaagcctctgcaacataacaagccaaatgaaaatgttctgcatcaagagaaaccagaggaaatgcctttgcatcaagatagctccgaaaagctgatggagaagccaattgaaaagcatattgacaaacttatggaagaacctgctgaccagataattgaaaaatcaattgaactacctactcaaaagataactgaaacaccaactgatgagccagctgaaaaaataaatgaaacaccaactggagaaccagctgaaaaaataatagaggcggcatctgaaaatacagaagggacaataaaaaatgcaaccgaagagacacatgaaatggcagttgaggaactaattgaagagccagaagaaactatttctgtttcatcaactgggctaaagcagggggaaaacacctcacttgttgaaggaagcagtgcagacgatgaggaagatcatttggagtgtgcagctactaatcttcagcctggcaatgacacttgccttgaaagggaagaggtactgaaccagaaggatctggtgaaactgcaagctgttatacgtggacatctagttagaaagcaggctttagaatctttacaatgtttgcttgcgattattaaaattcaagggttaatcagggctcatcaagcacaacattcaccaggaatgattcaggagactattgttcattcttcaggtgagaaattgcttcgcaatggatttgctctcaagctcatggacaacatgtcgacgtcaaaatccatttgcataaaatgtgatccttcagaatctgatgttacatgggaatggatggagaggtggacaaccttaattccaccaatcactgtggtgcacgtgccagagcataaagaaaatagtgagttgatgggtgaaactgtgaccgaacaagtgactgaacatgctcagtgtgatgaagacattgttgctttggactcagacatatgtttccccaagttggtggctgatgacgtgaaagaaacagtagagacatctgaatctagtaccttggaggctccagtgagtgttccagatgaaaccccaaagatggaaatgaaacatgatactgaatcagagttgatcgaaactactaatgttgacgctgagcaagtaactgaccaaaaggctgaaaatgatgtggacaaggcttttatgtccttgaatcaacaatatacccaagcagatgcatcgagggatccctgtccactttctgaaaaatttgaatcatccaaggaggacagtggcgatgcgtacaattctgagcagacactggagatggaaggtaaaaggtttgtggtgagaaagtcatgcaatccagcatttgctgctgcacaattgaaatttgaagagctgagtacaaattcgacagtcagcaggtccagcagcttgtcacatctggatggggcgagcaagtcaagggttcacgctcctagttcgcaagaagattgctcctcaaagcaagatggcacaggcatgccagatagatcggttggtcatgatactaaaatgattattgctgcatcagaatgtgggactgagatatcaatttcatccacactggactcaccagatagatcagaaggtgacggtggggagatcgtgttggagattggagctctggaaaatagaaactatgtcaccagcaaagctgataatgacttcaatactgtccatcccgaggtaaaaaatgctcctgaagtagaagcccagccgcagaagcaaatagaacagaacggccatgttcctgccctcgaaatagaagcccagccacaagacgagcttgttcaggaaccgcatgctgaaccggaaatgccaggtttgcatgaacgattggaaaaacctgtcgcatcttacgccacacctgaaggaactccaatgagccgaacgactatcactgaatctcaagaaacaccgtcaagtgaggtctctgttaataccaaaaagagcaggagcaaaaagcccaagccccatgcaagcaagaggtcgctggctagtcctggcagcgactcagtcggccggagcagcaccgacaacttctcaaaggaatcaaggcatcccaagagagagagctcaagcaaggctgctaaatccgaccacgtcgaacaagaacctcgcacgagcaacagcaacagcaacctgttgccaagctacatgcaatttacagaatctgcaagagccaaggcgtcgtcgtccccgaagatgagcccagatgtgcaggacagcaacccaaggaaaaggcactcgttgcccatgaccgacggcaagcatgactcgtcgcctcgcatgcagcgatcgtcgtcacatgctcagcaaaacgtcaagagcaacgggcctgctccacacagcgcgtctgacaggaagtggcatatctgatgggtaggccgagcagcgtattcgaatgtctagatggctttcttgtgatgaactcctgccttctccgcacactccatctaactcgtcaagttttttatttttccttgattcgtcgttggaatactgagtatagttggaagaagggcagcagctgcctcttgatatgtgtaaatttgttggttgtgtacttgtgttatgtcactgatgtggtttctgtgtgtaatatatgtcgctttgacttgtcatgcaacattgaagagtatatggattggtctgttgtatttggcgacattgaagtttttgtgtgtgtgtgtgtggatatggctctcgttccatttctctctgt

SEQ ID NO: 99015 - DNA, 3249 bp, Zea Mays
aggtgcacaggcacagccgcaagcgaacgagccagcgtagaaggagcagagcggccatccactgccgtcctgttccgcccccagacggctccagaaacgcacgggcgtgcgcgcgcccgcggagcagagctgatcgactgacttgtctgactgagaccgcggccggccgtgatccgcccgctccatggcgcgctccaagaacggctgcctcaagatcctcgtctgcgccggctccagctccgatccctccgccggctccgacgccgacgccgccgaccaccccgacgagaacaaggccatatcagataaaagcatatggagctttcgtaggagatctacaaggcatcgagttttgaagaactctgatatctcagaacctgaaactgttagttccagcaaagcgaaggctgacattgcaccaaacaacaatgtttatacttcaacatattcttttgcctcggagaagcctctgcaacataacaagccaaatgaaaatgttctgcatcaagagaaaccagaggaaatgcctttgcatcaagatagctccgaaaagctgatggagaagccaattgaaaagcatattgacaaacttatggaagaacctgctgaccagataattgaaaaatcaattgaactacctactcaaaagataactgaaacaccaactgatgagccagctgaaaaaataaatgaaacaccaactggagaaccagctgaaaaaataatagaggcggcatctgaaaatacagaagggacaataaaaaatgcaaccgaagagacacatgaaatggcagttgaggaactaattgaagagccagaagaaactatttctgtttcatcaactgggctaaagcagggggaaaacacctcacttgttgaaggaagcagtgcagacgatgaggaagatcatttggagtgtgcagctactaatcttcagcctggcaatgacacttgccttgaaagggaagaggtactgaaccagaaggatctggtgaaactgcaagctgttatacgtggacatctagttagaaagcaggctttagaatctttacaatgtttgcttgcgattattaaaattcaagggttaatcagggctcatcaagcacaacattcaccaggaatgattcaggagactattgttcattcttcaggtgagaaattgcttcgcaatggatttgctctcaagctcatggacaacatgtcgacgtcaaaatccatttgcataaaatgtgatccttcagaatctgatgttacatgggaatggatggagaggtggacaaccttaattccaccaatcactgtggtgcacgtgccagagcataaagaaaatagtgagttgatgggtgaaactgtgaccgaacaagtgactgaacatgctcagtgtgatgaagacattgttgctttggactcagacatatgtttccccaagttggtggctgatgacgtgaaagaaacagtagagacatctgaatctagtaccttggaggctccagtgagtgttccagatgaaaccccaaagatggaaatgaaacatgatactgaatcagagttgatcgaaactactaatgttgacgctgagcaagtaactgaccaaaaggctgaaaatgatgtggacaaggcttttatgtccttgaatcaacaatatacccaagcagatgcatcgagggatccctgtccactttctgaaaaatttgaatcatccaaggaggacagtggcgatgcgtacaattctgagcagacactggagatggaaggtaaaaggtttgtggtgagaaagtcatgcaatccagcatttgctgctgcacaattgaaatttgaagagctgagtacaaattcgacagtcagcaggtccagcagcttgtcacatctggatggggcgagcaagtcaagggttcacgctcctagttcgcaagaagattgctcctcaaagcaagatggcacaggcatgccagatagatcggttggtcatgatactaaaatgattattgctgcatcagaatgtgggactgagatatcaatttcatccacactggactcaccagatagatcagaaggtgacggtggggagatcgtgttggagattggagctctggaaaatagaaactatgtcaccagcaaagctgataatgacttcaatactgtccatcccgaggtaaaaaatgctcctgaagtagaagcccagccgcagaagcaaatagaacagaacggccatgttcctgccctcgaaatagaagcccagccacaagacgagcttgttcaggaaccgcatgctgaaccggaaatgccaggtttgcatgaacgattggaaaaacctgtcgcatcttacgccacacctgaaggaactccaatgagccgaacgactatcactgaatctcaagaaacaccgtcaagtgaggtctctgttaataccaaaaagagcaggagcaaaaagcccaagccccatgcaagcaagaggtcgctggctagtcctggcagcgactcagtcggccggagcagcaccgacaacttctcaaaggaatcaaggcatcccaagagagagagctcaagcaaggctgctaaatccgaccacgtcgaacaagaacctcgcacgagcaacagcaacagcaacctgttgccaagctacatgcaatttacagaatctgcaagagccaaggcgtcgtcgtccccgaagatgagcccagatgtgcaggacagcaacccaaggaaaaggcactcgttgcccatgaccgacggcaagcatgactcgtcgcctcgcatgcagcgatcgtcgtcacatgctcagcaaaacgtcaagagcaacgggcctgctccacacagcgcgtctggtgagtgctttattctcttatatgaaatcatgcattatccagctgcgtttcaaggctcattttaattagctcgtggttgctctttgagttctcctaacggaccttcctgcgtgcagacaggaagtggcatatctgatgggtaggccgagcagcgtattcgaatgtctagatggctttcttgtgatgaactcctgccttctccgcacactccatctaactcgtcaagttttttatttttccttgattcgtcgttggaatactgagtatagttggaagaagggcagcagctgcctcttgatatgtgtaaatttgttggttgtgtacttgtgttatgtcactgatgtggtttctgtgtgtaatatatgtcgctttgacttgtcatgcaacattgaagagtatatggattggtctgttgtatttggcg

SEQ ID NO: 99016 - DNA, 3187 bp, Zea Mays
aggtgcacaggcacagccgcaagcgaacgagccagcgtagaaggagcagagcggccatccactgccgtcctgttccgcccccagacggctccagaaacgcacgggcgtgcgcgcgcccgcggagcagagctgatcgactgacttgtctgactgagaccgcggccggccgtgatccgcccgctccatggcgcgctccaagaacggctgcctcaagatcctcgtctgcgccggctccagctccgatccctccgccggctccgacgccgacgccgccgaccaccccgacgagaacaaggccatatcagataaaagcatatggagctttcgtaggagatctacaaggcatcgagttttgaagaactctgatatctcagaacctgaaactgttagttccagcaaagcgaaggctgacattgcaccaaacaacaatgtttatacttcaacatattcttttgcctcggagaagcctctgcaacataacaagccaaatgaaaatgttctgcatcaagagaaaccagaggaaatgcctttgcatcaagatagctccgaaaagctgatggagaagccaattgaaaagcatattgacaaacttatggaagaacctgctgaccagataattgaaaaatcaattgaactacctactcaaaagataactgaaacaccaactgatgagccagctgaaaaaataaatgaaacaccaactggagaaccagctgaaaaaataatagaggcggcatctgaaaatacagaagggacaataaaaaatgcaaccgaagagacacatgaaatggcagttgaggaactaattgaagagccagaagaaactatttctgtttcatcaactgggctaaagcagggggaaaacacctcacttgttgaaggaagcagtgcagacgatgaggaagatcatttggagtgtgcagctactaatcttcagcctggcaatgacacttgccttgaaagggaagaggtactgaaccagaaggatctggtgaaactgcaagctgttatacgtggacatctagttagaaagcaggctttagaatctttacaatgtttgcttgcgattattaaaattcaagggttaatcagggctcatcaagcacaacattcaccaggaatgattcaggagactattgttcattcttcaggtgagaaattgcttcgcaatggatttgctctcaagctcatggacaacatgtcgacgtcaaaatccatttgcataaaatgtgatccttcagaatctgatgttacatgggaatggatggagaggtggacaaccttaattccaccaatcactgtggtgcacgtgccagagcataaagaaaatagtgagttgatgggtgaaactgtgaccgaacaagtgactgaacatgctcagtgtgatgaagacattgttgctttggactcagacatatgtttccccaagttggtggctgatgacgtgaaagaaacagtagagacatctgaatctagtaccttggaggctccagtgagtgttccagatgaaaccccaaagatggaaatgaaacatgatactgaatcagagttgatcgaaactactaatgttgacgctgagcaagtaactgaccaaaaggctgaaaatgatgtggacaaggcttttatgtccttgaatcaacaatatacccaagcagatgcatcgagggatccctgtccactttctgaaaaatttgaatcatccaaggaggacagtggcgatgcgtacaattctgagcagacactggagatggaaggtaaaaggtttgtggtgagaaagtcatgcaatccagcatttgctgctgcacaattgaaatttgaagagctgagtacaaattcgacagtcagcaggtccagcagcttgtcacatctggatggggcgagcaagtcaagggttcacgctcctagttcgcaagaagattgctcctcaaagcaagatggcacaggcatgccagatagatcggttggtcatgatactaaaatgattattgctgcatcagaatgtgggactgagatatcaatttcatccacactggactcaccagatagatcagaaggtgacggtggggagatcgtgttggagattggagctctggaaaatagaaactatgtcaccagcaaagctgataatgacttcaatactgtccatcccgaggtaaaaaatgctcctgaagtagaagcccagccgcagaagcaaatagaacagaacggccatgttcctgccctcgaaatagaagcccagccacaagacgagcttgttcaggaaccgcatgctgaaccggaaatgccaggtttgcatgaacgattggaaaaacctgtcgcatcttacgccacacctgaaggaactccaatgagccgaacgactatcactgaatctcaagaaacaccgtcaagtgaggtctctgttaataccaaaaagagcaggagcaaaaagcccaagccccatgcaagcaagaggtcgctggctagtcctggcagcgactcagtcggccggagcagcaccgacaacttctcaaaggaatcaaggcatcccaagagagagagctcaagcaaggctgctaaatccgaccacgtcgaacaagaacctcgcacgagcaacagcaacagcaacctgttgccaagctacatgcaatttacagaatctgcaagagccaaggcgtcgtcgtccccgaagatgagcccagatgtgcaggacagcaacccaaggaaaaggcactcgttgcccatgaccgacggcaagcatgactcgtcgcctcgcatgcagcgatcgtcgtcacatgctcagcaaaacgtcaagagcaacgggcctgctccacacagcgcgtctggaagtggcatatctgatgggtaggccgagcagcgtattcgaatgtctagatggctttcttgtgatgaactcctgccttctccgcacactccatctaactcgtcaagttttttatttttccttgattcgtcgttggaatactgagtatagttggaagaagggcagcagctgcctcttgatatgtgtaaatttgttggttgtgtacttgtgttatgtcactgatgtggtttctgtgtgtaatatatgtcgctttgacttgtcatgcaacattgaagagtatatggattggtctgttgtatttggcgacattgaagtttttgtgtgtgtgtgtgtggatatggctctcgttccatttctctctgt

SEQ ID NO: 99017 - DNA, 287 bp, Zea Mays
tggaaaagcagacacgcaggcaggcctcattcccttttctggaagtcacaaaaggaagggacaaccgcacaagttcgacacaactgtgcccctgcccccaaactacacgttacaaccaccaccactgcactagaattcactgctgctgctgctgccacacacacacgcacacatgccgacatacatgaggaccaccgcatgcacgcatgcagtagctggagtctaaagcccgcccggccggcaacatgcatgctgcatagtatgcaaattcgctatctaataatagt

SEQ ID NO: 99018 - DNA, 1742 bp, Zea Mays
aacaaaacatagggcaagagcctagactgaggggccaggagagagggagaggccgaggagagagatagagagacaaaggggagagaccaagcgccagtgacacagagaaggggcggaggagagagagagagagagagagagagagagagagagagagagagagagagagagaggagaatcgcgggagggaggcggggtttttgcgtgatttgagttctccggttttccccacgctcccgccatggtgtccgaccaggagatcgccagctgcgtcgagtccgtcctccgaggctccgccggcgggcccggggaggtctcgctcaccgccgtgctgcagcaggcggaggccacgctcggcgtcgacctctcccacaaggcgggctttatccgcgaccagatggacctcttcttcggcccgcgcctccagccgcagccgctgaccacgccacagctggcgcctcccccgcctcaggccgtcgttgcccccgcggacgccgtgcctcagcctcagcctcagcatcaggttctgccgcaggcaccgccttcggctcagcagatgcagccgcagcagctcgcgccgcttcagccgcagctcatgttccagaccattcaccagctccccgccatctctcccgtccctgtggtctccgcgccgccggccatggcgttctacccgccgccgccgctcgccttccgctacaccaccggcctcgctggggccgccacgggtgggaccgtctccttccagcagccagcccctggggctgggggcactgcttcccccaccgctgcaccgcaggtcgccggcgacaacaaggaaagttcttctaagcgaaaaagaggtggacctggtggtttaaataaagtttgcgcaatttcacctgaacttcagaccattgttggtgagactgccatgtcaagaactcagattgtgaagcagctctgggcatatatcaggcagaacaatcttcaagatcctgatgacaaaaggaagattatttgcaatgacgaacttcgtgtggtttttgaaactgacaacaccgacatgtttaaaatgaataaattattggctaagcacataaccccacttgacccaaaaggtcaacttcatgaagtaaaaagaatgaaggctcccaccatgtctcctcaacctggacgttccattgatcaaccctccatagttatttctgacgcactagcaaagttcattggaacagatggaacatttcctcacgattttgccctgaaatatctgtgggattacataaaagcaaaccaacttgaggatgtcatcaacgaatcaatattatgcgattcaaaacttcaagagctctttggctgtgagagcattcctatgtcaggactatcagaaatgcttggtcaccacttcatcaagaaaacatagcaaatcctcattaactgatctaggattgcagtgtggcagataggcctaacattacaacatggtgttctttacagaatggacagcatagtttatgtatttcttcaattttgttgattatgaattgtgtccggcacatatcagattatttgcggtaagcctgtacattgttatgcgtgctggctactgctgtgttgtctggtgtaagtgtgtaaccttctctactgaattcgtagtgctaattcctaaatgtcattgctgactatgtaaagttaagctttctattcgagtgtcagattgttactcttaagtcttaaaagtcataagtttttctttgact

SEQ ID NO: 99019 - DNA, 1420 bp, Zea Mays
cacgctcccgccatggtgtccgaccaggagatcgccagctgcgtcgagtccgtcctccgaggctccgccggcgggcccggggaggtctcgctcaccgccgtgctgcagcaggcggaggccacgctcggcgtcgacctctcccacaaggcgggctttatccgcgaccagatggacctcttcttcggcccgcgcctccagccgcagccgctgaccacgccacagctggcgcctcccccgcctcaggccgtcgttgcccccgcggacgccgtgcctcagcctcagcctcagcatcagctccccgccatctctcccgtccctgtggtctccgcgccgccggccatggcgttctacccgccgccgccgctcgccttccgctacaccaccggcctcgctggggccgccacgggtgggaccgtctccttccagcagccagcccctggggctgggggcactgcttcccccaccgctgcaccgcaggtcgccggcgacaacaaggaaagttcttctaagcgaaaaagaggtggacctggtggtttaaataaagtttgcgcaatttcacctgaacttcagaccattgttggtgagactgccatgtcaagaactcagattgtgaagcagctctgggcatatatcaggcagaacaatcttcaagatcctgatgacaaaaggaagattatttgcaatgacgaacttcgtgtggtttttgaaactgacaacaccgacatgtttaaaatgaataaattattggctaagcacataaccccacttgacccaaaaggtcaacttcatgaagtaaaaagaatgaaggctcccaccatgtctcctcaacctggacgttccattgatcaaccctccatagttatttctgacgcactagcaaagttcattggaacagatggaacatttcctcacgattttgccctgaaatatctgtgggattacataaaagcaaaccaacttgaggatgtcatcaacgaatcaatattatgcgattcaaaacttcaagagctctttggctgtgagagcattcctatgtcaggactatcagaaatgcttggtcaccacttcatcaagaaaacatagcaaatcctcattaactgatctaggattgcagtgtggcagataggcctaacattacaacatggtgttctttacagaatggacagcatagtttatgtatttcttcaattttgttgattatgaattgtgtccggcacatatcagattatttgcggtaagcctgtacattgttatgcgtgctggctactgctgtgttgtctggtgtaagtgtgtaaccttctctactgaattcgtagtgctaattcctaaatgtcattgctgactatgtaaagttaagctttctattcgagtgtcagattgttactcttaagtcttaaaagtcataagtttttctttgact

SEQ ID NO: 99020 - DNA, 1284 bp, Zea Mays
caatctcgcagtcctttcttcctccgacctccgcagcgaatcggaccaggggatagggttccgccgcgcctctccaaccaggcgccactcgccagggtctaggctgatcatggaaggaaacgtcgcagccgggaagaggtcccggacggagacggcgaacggggctgccggcggcgggaagcgctccaaagacatggagtcatttcaaactggtctatcaagcaaatcgaagccttgcaacaagtttttcagtacgattgggtgcccgtttggtgagggatgtcgttttctgcactttgtccctggcggttacccggcagttgcaaaaatgctcaatctaggtagccctgctgtatctgcgccatcaagaactcatgtggatcacgccgctcttactggcacctctcattcagcttcgtcaggcaagacacgcatgtgcaccaagtacaatactacagaaggctgcagatttggtgataagtgccactttgctcatagcgaaagagaacttgggaaaccagcgtacatgccttatggagaacctcctatgggcggtcgatttggaggccgacctgaacctgtgcagccagctgccatgggccctccagcaggaaactttggtgcctcggcgactgccaagatcagtgtggatgcgtctcttgccggtggcataattggtaagggcggggtcaacactaagcagataagcagagtcacaggcgtcaagctctgtatccgcgaccacgagtctagccccaacctgaagaacattgagctggaaggcaattttgaccagatcaagcaagccggcgaaatggtgagggacctcatcgcgaccatcagcacgagcatgccggcgaaaaactcatctgctgccgtggctccagcaggaggccgaggcggtggtctgggtagcaagagcaactacaagacgaagctatgcgagaacttcgcgaagggtgcctgtactttcggcgagcggtgccactttgcccatggcgagaacgagcagcggagtggtgctgtttgagagttgaggtgccaactctaggcatgacatgtcctgtgctctccatttgcttctctgaattccctccttgtagcgttagacggttagactgtcgtattgcgatttcaatggattcaactgagttcagctttaagaaaacgttaatctgttgttcccctgaatgttgtgacttgtcagtaagttagcagctgctagccaatcttgtttggacggtcatacattcatcttaaatctttatgcattcatcttaattt

SEQ ID NO: 99021 - DNA, 1243 bp, Zea Mays
tcttcctccgacctccgcagcgaatcggaccaggggatagggttccgccgcgcctctccaaccaggcgccactcgccagggtctaggctgatcatggaaggaaacgtcgcagccgggaagaggtcccggacggagacggcgaacggggctgccggcggcgggaagcgctccaaagtacgattgggtgcccgtttggtgagggatgtcgttttctgcactttgtccctggcggttacccggcagttgcaaaaatgctcaatctaggtagccctgctgtatctgcgccatcaagaactcatgtggatcacgccgctcttactggcacctctcattcagcttcgtcaggcaagacacgcatgtgcaccaagtacaatactacagaaggctgcagatttggtgataagtgccactttgctcatagcgaaagagaacttgggaaaccagcgtacatgccttatggagaacctcctatgggcggtcgatttggaggccgacctgaacctgtgcagccagctgccatgggccctccagcaggaaactttggtgcctcggcgactgccaagatcagtgtggatgcgtctcttgccggtggcataattggtaagggcggggtcaacactaagcagataagcagagtcacaggcgtcaagctctgtatccgcgaccacgagtctagccccaacctgaagaacattgagctggaaggcaattttgaccagatcaagcaagccggcgaaatggtgagggacctcatcgcgaccatcagcacgagcatgccggcgaaaaactcatctgctgccgtggctccagcaggaggccgaggcggtggtctgggtagcaagagcaactacaagacgaagctatgcgagaacttcgcgaagggtgcctgtactttcggcgagcggtgccactttgcccatggcgagaacgagcagcggagtggtgctgtttgagagttgaggtgccaactctaggcatgacatgtcctgtgctctccatttgcttctctgaattccctccttgtagcgttagacggttagactgtcgtattgcgatttcaatggattcaactgagttcagctttaagaaaacgttaatctgttgttcccctgaatgttgtgacttgtcagtaagttagcagctgctagccaatcttgtttggacggtcatacattcatcttaaatctttatgcattcatcttaatttatgtaccttggagtgatttgatatttaacctaaact

SEQ ID NO: 99022 - DNA, 1286 bp, Zea Mays
cggacaatagaagtagatggaggcaaaatatcagtcaaattttctctgctaccaccaccacggcaccgcaccaccggcggctgtagactgtagcacgagagagaaatctgtagcccagcagctcgtcaggcatggcagcctccgtggcgctgactccggcctatccagcgttcctccctgtccccttccgcgtccgccgcgacggccgggtgcgcctctcgccccgccgcccccgctactccgcggggcgctgcagagccatggcccagaccttccaggggggcgccgctgccagctacgcccgcgagatggagcgcctctccgccaaggagtccctgctcctcgcctttaaagatgctgggggtttcgaggccttagtcagcgggaagaccactgagatgcagaggatcgatgtcaatgagcgaattgttggacttgagcgcttgaatccgacaccacgccccacaacatcgccgtttctggagggtcgatggaattttgaatggtttggtgatagcagtcctggagcatttgcggcccgccttttgtttgagaggtcgcctacatcggttgcacactttatgggacttgatgtgttgatcaaggatggatactccaagctctcatctaacctcaagtttctaaacacgatacaaagcaaattcctactgactactcaattgtccgttgagggccccatcaggatgaaagaggaatacgttgagggccttatagcgattcccagaatcaatgaagaatcattgcctgaacagttgaagggcttgcttggccaaactgcaggagctctacaacaacttcctagccctataagggaagctgtttcggaggggcttaaattgccactcggtggggcatttcaacgattattcatgatctcttacttggatgaagaaatattgattgtcagggacgctgctggagcaccagatgtcttaaccagactagaggggccacaaccgagtccaggtgatggcacagcagatgcagtgatatcagaatatgaaagctaatggctgattactaactgtaactccacacctagttcctgtttacggctcctttctcctttggtcgtttttctcaggcctgcgcatgtataaaggctgtagtgttgtcaacgataacgaccacttgagtgatttttacttgcatccctttcggcggctattctgattttttctgaatgcgagcaataatatcagatgaccatcatcattctttatatgaatcaatgtaaaaaaaaggctctgcttgttcaaagctaa

SEQ ID NO: 99023 - DNA, 660 bp, Zea Mays
cacaaccttttccctttctatcaatgtgtgctacattcctctttgtacaaacgggcatcgctgccatagtatataatacgtagctactgtatgtacaggtcagatgatatcggaacattctgttagagagcgatcgcagaactcgtggcagttgcaaatgctcatcagcatcaatcacctcttctccagttgtcagccagtcaggcgattgtctgctctctcttttgagatcctctcttcctttacctcctctagctcgtcctcatcactccgcttgcctgcttgctccttccagtaggcgatcaacttcttcaatctcatgatttcttttggagcaacatgcttgctcgtatcattaacaatgcatcgaacgcgtgaagcatacatcagcgagttgtaagtctcctccaagttagactctgctggtgaaacattcacaaacatcaaggtcttcgcattccctcccagagaatcactcataagcattgttaacttatggttccggtaaggtatatgttgtccatcagaagataaagcaccaataacatcagccaaagcagaaagagatttgtttatactttgtgcttctttcagttgctttcctgcggaaccagattttttcaccctctcagaaccagcaaggtccacaaaacttagctg

SEQ ID NO: 99024 - DNA, 1383 bp, Zea Mays
cacaaccttttccctttctatcaatgtgtgctacattcctctttgtacaaacgggcatcgctgccatagtatataatacgtagctactgtatgtacaggtcagatgatatcggaacattctgttagagagcgatcgcagaactcgtggcagttgcaaatgctcatcagcatcaatcacctcttctccagttgtcagccagtcaggcgattgtctgctctctcttttgagatcctctcttcctttacctcctctagctcgtcctcatcactccgcttgcctgcttgctccttccagtaggcgatcaacttcttcaatctcatgatttcttttggagcaacatgcttgctcgtatcattaacaatgcatcgaacgcgtgaagcatacatcagcgagttgtaagtctcctccaagttagactctgctggtgaaacattcacaaacatcaaggtcttcgcattccctcccagagaatcactcataagcattgttaacttatggttccggtaaggtatatgttgtccatcagaagataaagcaccaataacatcagccaaagcagaaagagatttgtttatactttgtgcttctttcagttgctttcctgcggaaccagattttttcaccctctcagaaccagcaaggtccacaaaacttagctgttcaaacagaggaacactgtcaattcttccccgtaagtgtaatgtgaaacaaactctacaaaagcccaaggactgtttaggatgcaatagtttcacaggaaaccgtgtagttcgcagaaatatgagaaatcgcagctttccaaaggaggccataagcaacatactagtcttcctcttcctttttttttgtttggtacaagatattctcggcagcttgtctatttaaaataatcgtatcaactaagaggaacaagagaaagaactccacgctagcatactgtgtgcctttatacttcatattaaatcacacacaaaatttaaacatgcactgagactgcatattgcatagtatcaacaaaaaataataaaccaaagatcattatagatatgtagcactgtagggaactcccctacagttttcatggtaaaataaccaagatcatatgcataactagactgccgaggccaagataatacaaaaaacacatttttaaaaaaatcttattgaacaattgaaatatgactagttttaagtgtgttttccaggtaatgtttgccaacaacctccatcaaatcacagatgtattgtctacagcatgcaaaacttcaaccatgtccatgaagtgcccaggccacagatatagggagacagaacgttcaatatttttattcattattatagtcgaaagtattgccagtagactcaaccaaattggagttatg

SEQ ID NO: 99025 - DNA, 740 bp, Zea Mays
gccataccatcacccacccgacatggtcgcaggtgagcctgcacttaatctgagactacaaaattgggctcaatcacgggtcgtgtcgtcccgacggacggaggaggaccgccgctagagctcgcgttgtcgcgccagctgctcccgtcgctcgtatatattactgcgaagtaaccctaactgccaccagcctcagcctcccctctcggctcccccacacggcactctagcccccagcctgccactcaaacagtacaccaccgccacaagctcgggccgaatatgtctacagggcagcagggctaccgctgccgccgcacttcaccggcaaagaacgccctccagatctaccctgcgatggagtccacggtgaacccgaaggcgtacccactggctgatgcgcagctaacgatgggtatcctcgatatcatccagcactccaccaactacaagcagctcaagaagggagcgaacgaagcgacgaataccctgaatagggggatatcagagtttgttgtgatggcggcggatacagagcctcttgagatcctactccacctccccttgttagctgaggataaggtactgatttttttctcgctttcctcttttgttttgtaatatggtgctgtgtgattatagcttggacgccatctaattgtcatgttggttgtttttctctctttcctcttttgtaattttatcccaaatgctatattaaaagattatgccaaatgctt

SEQ ID NO: 99026 - DNA, 964 bp, Zea Mays
cacggccactccgcccccgctgctctcgcgttgccggccccgacagagacgaggcacggtcggctgctctcggttccccgcgcgcgcgctagctagaaggacgacctgcgctggtctcgccatggccgccaagaaggtggtgctgaagctggacctgcacgacaacagggacaagcagaaggtgctcaaggcagtctccactctccacggcatcgactccatcgcggtggacatgaaggagtccaagctgacggtggtcgggctggcggaccccgtcgacgtcgtgggcaggctgcgcaaggtcggctccgccgccatcgtctccgtcggcccggccacggaggagaaaaagaaagacggcgacaagaaggaggggggcggcgacaagaaggacgctgacaagaagggcgacgacaagaagcccccgccgcccccggtgtacccgtacccgtacccgtggcacgcgtacgccgccgccgccgccgccgcgcagtaccagtaccacccccggccgtacccgccccagtacgtcgtccacagcgccgaggaggaccccaactcctgcgtcatctgctgatctgatgccggcgtggcgcagcacagtcacagtcttcttttttgcacattcctatatttgttgttgttggcctgctctgcttgcctacctgctcgatcgaccgccacgtcgtcggtgatcgccgggaccggggcgggtgtggtggttggctgctccgctcgtctctatgctggcggtggggttggtcgttggcccgtgtccgcaggtcgttgcaattgcaatcatgcaggcgatccatccaaaagtacttgttgccttgtcggggttctcaggctgctgaccagcgtggtcgcgtagtgtgcatgcggttttttgtccttggctatttgcctattcggggtgtttgaggcatgaaactatatatatagagagagatttataaagatt

SEQ ID NO: 99027 - DNA, 1137 bp, Zea Mays
aactgccgcaatgccgctctcctatccttcggccgcgtcagtgcgtcacgctagtagccggtaggcccctagggatgtccatggcggcgagccgccgcctcctccatctcctgccgcggctggagctgtgcctgcggtcccgtgcgcttagcatccccttgtcttcgcgggcacaggggatggctcgtcggaagcttgtgacctgccgacaaggtgctttcgagcaggggaatgcagcgagggataaggccgtgccgattccagataaagtgctccgtcattgcaagtacgccaatggcagggccctagacctagagcccattgaaaagaacttcgccaacgagtctatgcaattttctttcgaagaggagactgacgatatggtgtgcgaaattagcgaaagcgtggtgcgggatgtggagaaggctgcaattgaattgcttgctgccagagctttcactgtctctgagcttaggaagaaactacgaagtaagaagtatccttttgatacaattgatgccgtgattgctaatttcaaatcaaggggtttgttgaatgatggtttttatgctgaatcattttcgcgatcccggtggctaacatcaacatggggtccaaggcgaataaaacaggcacttcaccaaaaaggtgtcccagaggcagaagtagatcaggcaacgagaagagtgttccaggatggcgacgactatggaaaggaggcaacgttcggcatgtccgaagcttccatggatcatctgtttgctcaggcgtccaaacagtggcagcgtgcgcaaagcttgaccctggagagccgacgtgcgcgcatggtgaggtggcttcagtaccgagggttcaactgggctgtgaccaatgccgttatcaggaagctggaggctcagcaccctccaccctgactcttctgactagactaggtgtgtgtccgtgcgttgcaacgggtgtacgctgggatgagtatagacacatatctaatcggatcttatatttcctgggggggtctgtagaaagtttactcgaaagccaaatatgttaagacctgaacatgtgttacccttatgtcccatcagcatactgttccacgcttgtatgagtcttgttaatttgcatgcctcgtgcata

SEQ ID NO: 99028 - DNA, 1136 bp, Zea Mays
tctcctatccttcggccgcgtcagtgcgtcacgctagtagccggtaggcccctagggatgtccatggcggcgagccgccgcctcctccatctcctgccgcggctggagctgtgcctgcggtcccgtgcgcttagcatccccttgtcttcgcggtacatctctaccctgacagccccacgccgccggcccaactccaactgatttctctgcccccccaaattcagaaacttttgcttctttgcagggcacaggggatggctcgtcggaagcttgtgacctgccgacaaggtgctttcgagcaggggaatgcagcgagggataaggccgtgccgattccagataaagtgctccgtcattgcaagtacgccaatggcagggccctagacctagagcccattgaaaagaacttcgccaacgagtctatgcaattttctttcgaagaggagactgacgatatggtgtgcgaaattagcgaaagcgtggtgcgggatgtggagaaggctgcaattgaattgcttgctgccagagctttcactgtctctgagcttaggaagaaactacgaagtaagaagtatccttttgatacaattgatgccgtgattgctaatttcaaatcaaggggtttgttgaatgatggtttttatgctgaatcattttcgcgatcccggtggctaacatcaacatggggtccaaggcgaataaaacaggcacttcaccaaaaaggtgtcccagaggcagaagtagatcaggcaacgagaagagtgttccaggatggcgacgactatggaaaggaggcaacgttcggcatgtccgaagcttccatggatcatctgtttgctcaggcgtccaaacagtggcagcgtgcgcaaagcttgaccctggagagccgacgtgcgcgcatggtgaggtggcttcagtaccgagggttcaactgggctgtgaccaatgccgttatcaggaagctggaggctcagcaccctccaccctgactcttctgactagactaggtgtgtgtccgtgcgttgcaacgggtgtacgctgggatgagtatagacacatatctaatcggatcttatatttcctgggggggtctgtagaaagtttactcgaaagccaaatatgttaagacctgaaca

SEQ ID NO: 99029 - DNA, 952 bp, Zea Mays
agaccgttttggtttaacttcgctgatttggttcttgccgcttgccgagcagcgagggataaggccgtgccgattccagataaagtgctccgtcattgcaagtacgccaatggcagggccctagacctagagcccattgaaaagaacttcgccaacgagtctatgcaattttctttcgaagaggagactgacgatatggtgtgcgaaattagcgaaagcgtggtgcgggatgtggagaaggctgcaattgaattgcttgctgccagagctttcactgtctctgagcttaggaagaaactacgaagtaagaagtatccttttgatacaattgatgccgtgattgctaatttcaaatcaaggggtttgttgaatgatggtttttatgctgaatcattttcgcgatcccggtggctaacatcaacatggggtccaaggcgaataaaacaggcacttcaccaaaaaggtgtcccagaggcagaagtagatcaggcaacgagaagagtgttccaggatggcgacgactatggaaaggaggcaacgttcggcatgtccgaagcttccatggatcatctgtttgctcaggcgtccaaacagtggcagcgtgcgcaaagcttgaccctggagagccgacgtgcgcgcatggtgaggtggcttcagtaccgagggttcaactgggctgtgaccaatgccgttatcaggaagctggaggctcagcaccctccaccctgactcttctgactagactaggtgtgtgtccgtgcgttgcaacgggtgtacgctgggatgagtatagacacatatctaatcggatcttatatttcctgggggggtctgtagaaagtttactcgaaagccaaatatgttaagacctgaacatgtgttacccttatgtcccatcagcatactgttccacgcttgtatgagtcttgttaatttgcatgcctcgtgcata

SEQ ID NO: 99030 - DNA, 841 bp, Zea Mays
attttctgatataatgacattgtcttagcatctgtagtctaatgcaagtttctgtgctatgcattcaggccgttgcattttacttgttttcagcgtaatcttgttgtcactattgagaataaacactgaaatatgcctcgttgctgcctgagcagagctttcactgtctctgagcttaggaagaaactacgaagtaagaagtatccttttgatacaattgatgccgtgattgctaatttcaaatcaaggggtttgttgaatgatggtttttatgctgaatcattttcgcgatcccggtggctaacatcaacatggggtccaaggcgaataaaacaggcacttcaccaaaaaggtgtcccagaggcagaagtagatcaggcaacgagaagagtgttccaggatggcgacgactatggaaaggaggcaacgttcggcatgtccgaagcttccatggatcatctgtttgctcaggcgtccaaacagtggcagcgtgcgcaaagcttgaccctggagagccgacgtgcgcgcatggtgaggtggcttcagtaccgagggttcaactgggctgtgaccaatgccgttatcaggaagctggaggctcagcaccctccaccctgactcttctgactagactaggtgtgtgtccgtgcgttgcaacgggtgtacgctgggatgagtatagacacatatctaatcggatcttatatttcctgggggggtctgtagaaagtttactcgaaagccaaatatgttaagacctgaacatgtgttacccttatgtcccatcagcatactgttccacgcttgtatgagtcttgttaatttgcatgcctcgtgcata

SEQ ID NO: 99031 - DNA, 1892 bp, Zea Mays
aggccaggccccaggaacaggcagagcagctcaggcgccgctgcctcttcaaagtcctcccagatttcccctcgcatccgccccgatctcgcctccaatggacgcggtgccgcccgcgcgcgcggcgcggcccacgagcccgtcgcgagcgcccaaggcgatccgcagcaccaagccgcggggcctcgacgaggacaccgcggcgccgcccgcgttccccaaggccaagtccctcccctcctccgccgccggagccgaggcctcgctcctccaccacaaccaccacgcggacgtcccgatggacgcccgcgtctgggcggggctccccgacgacctcctcgtggaggtgctagcccgcgtgtcgcccttcctcctcttccgcctccgtaccgtttgccgtcgctgggagtccgtcctccacgacccggctttcctcgccgcgcacgccgcggttccctcccacgggccctgcctcctcaccgtctccaggggcggcaacggcacccactccccgccgcagtgcagcgtgctcagcgtccccctgcacgcccgctacaagctccccttcgccttcctccccgcctgggacctctggctcgtcggctcttcgggagggctcgtctgcttctccggcttcgacggcgccgccttccgcacgatcgtctgcaacccgctcacgcaggcctggcgggtgctccccgacatgcactgcaaccagcagcggcagctggtgctcactgtcgacaagaaccgccgctccttcaaggtaatcgccgccagcgacgtgtatggggacaagactctccccactgaggtatacaactccaaggagaataaatggtccgtgcaccagatgatgcccgcggcgaacctgtgctcgtcgaaaatggccttctgtgactctacgttgtacctggagacgctctctccgctggggctgatgatgtatagagtggacgcggggcgttgggagcatatacctgccaagttcccacggtccctgctagatggctatctggtggctggagctcgcacgaggctgttcttggttgggcggattgggctatacagcacgctgcagagtatgaggatctgggagcttgatcatggtagatcagtttgggtggagataagccgaatgccgcccaggtacttcagggctctgctgaggttgtcggcggagaggttcgagtgctttggacaggacaacttgatatgtttcacttcctggaaccagggcaaaggtcttctctatgatgttgataagaagacttggtcatggattgctggctgcgctagccagctgtgcaatagtcaggtctgcttttacgagccaaggtttgatacatcaatctattgagtacggcaatatgaaattaattttatcgggttcaatattgagatgcctgtgcaatggcctattatcatggatgtcagatgcgtcaagtgccgagatggatagtactttcgttgagacactaccagtagcagacttgagctacgaatttgcaaaatcatatctttgctacagcagctaccatctggcacttctggattacaacatgcagaatgttgccgtttttctacacatggaggtccacttgttccattccattttgttatttcttgtaaatgattctaggcctgaaatgaaaaaaggcatgcagttcattgtcagtacaattccagtggttactgtggacttagctcaatctagagtcaaattggatatgagattgcatttctctactcaattgatttatgcactacttcttatgatatcttaataacatcaaattgcatctgttttctgtgttgtccaagaagctcatttgtcctgtgttctgacattacatttgtaccctgattcttctaggatgaactgattcatg

SEQ ID NO: 99032 - DNA, 964 bp, Zea Mays
gatccatttgaaccggaggctaccgctgcctcaagggcctcctcgctcgctcgccagtcgccacccgctcacggagacagagaggccgatggcgagctcgctggcccgcctgggagcggcgctgccacgcgcgcgcccacgcgctgcgacccgcaccctgccaccgccgcggtgggacgccgcggcgctcggcgcctcccgccgcgccgcaccgaacgtttgcaggtgcctagttcattccgacgttaaagtagcccctacatcggacttcaaggacagtagcaaatctgaaacttggaggatcaagatgctctacgacggtgattgccctctctgtatgcgtgaggtaaacatgctaagagaaagaaacaaatcctatggagcaataaagtttgttgacataagctcgaaagattactctccagatgacaatcagggccttgattatgaaacttccatggggaggatacatgcggttctttcagatggaactgttgtcacagacgttgaggcatttagaaaactgtacgaggaagtaggacttggatgggtttatgctgttactaagtatgagcctgtagctagcatggcaaatgcagtatatggtttgtgggcaaaataccgtatgcaaattacaggtcgacctccgctagaagagatcatggcatcccgaagagctgcaggcgaatgtaaagatgacaaagtatgcaagatgtgagcataaagatgttatactgtgctacatacctcgcctctagccatgctttatataggctaaggctcgtatatatggctttaacagtacaaataatcgcagttgtattagaaaaaaaaaggtgaatagcttatgtaatggtttatcaaagtacatatgattgtacatttgtatgtacactgtactggttcacgcatgtaaaaacgatccaccacagatcgagctgactcacattgtctgttctaccaa

SEQ ID NO: 99033 - DNA, 1003 bp, Zea Mays
gatccatttgaaccggaggctaccgctgcctcaagggcctcctcgctcgctcgccagtcgccacccgctcacggagacagagaggccgatggcgagctcgctggcccgcctgggagcggcgctgccacgcgcgcgcccacgcgctgcgacccgcaccctgccaccgccgcggtgggacgccgcggcgctcggcgcctcccgccgcgccgcaccgaacgataatgcgtgtgcaagtgcatacccaattggcataccaacggagaggtgcctagttcattccgacgttaaagtagcccctacatcggacttcaaggacagtagcaaatctgaaacttggaggatcaagatgctctacgacggtgattgccctctctgtatgcgtgaggtaaacatgctaagagaaagaaacaaatcctatggagcaataaagtttgttgacataagctcgaaagattactctccagatgacaatcagggccttgattatgaaacttccatggggaggatacatgcggttctttcagatggaactgttgtcacagacgttgaggcatttagaaaactgtacgaggaagtaggacttggatgggtttatgctgttactaagtatgagcctgtagctagcatggcaaatgcagtatatggtttgtgggcaaaataccgtatgcaaattacaggtcgacctccgctagaagagatcatggcatcccgaagagctgcaggcgaatgtaaagatgacaaagtatgcaagatgtgagcataaagatgttatactgtgctacatacctcgcctctagccatgctttatataggctaaggctcgtatatatggctttaacagtacaaataatcgcagttgtattagaaaaaaaaaggtgaatagcttatgtaatggtttatcaaagtacatatgattgtacatttgtatgtacactgtactggttcacgcatgtaaaaacgatccaccacagatcgagctgactcacattgtctgttctaccaa

SEQ ID NO: 99034 - DNA, 1139 bp, Zea Mays
attagcaaaccttggggaagggaagccgaagcagcagcatgaactgcgcgtctgccatcccgcagctactccaaacagcaacgtcctagccgacgagagcctccctccgccacctacccacccaccaactcccgcccgtcgcctccgcttggcttttcgtcgagcagttggttggcacctaaccccccagggccgcgggccagtaaggcgggagagtgaggcagaggcactgagccaaagccgggagatgaagaagctgtgccaaggcggcaagaaggggcggcgggtgcacccggcgccggcggacgcggacgcggccgtggcgctgccggccgccgtgctggccctggcgtcggcgctgacggccgaggagcaggaggtgctggcctacctcctgtcctgcggcggcgcggcggtcgtgggcggccgcccgcgccgccgccgcgggccccacccgccggagatgggctgcgcctgcttcggctgctacaagagcttctgggcgcgctgggacgcgtcgcccaacagccacctcatccaccgcatcatcgacgccgtcgaggacggcggccccccgcgccgcacgcaccggcgccggcgcggcggtgggcgccgcggtggcgacggcggcgcggggatgggcatggacatggacatgggccaccgccgccacggcgagtacgagggcgccggcgacgacgaggaggaggaggaggttgggggcagcagcatggacagcgacgtggacggggacgacgcgtcggtggccagcgagggtgactgcagcttcggcgacgccgagaagagcacggtggggaggctggtgcgcttcatcggggagaaggtgtggggcgcgtggaactgatcgggctggactacacataaggcagtccttgtaggttagaggagggagggaacgaaggaaggtggagagacagacagccaacaaggaggcggaggtctcgtcaatgtcggtagcagtagcagccgttttcctctcttcttgcagtctgatgatgagcgtgcgaggatcgaagggtagggggtgggattatccaatccaattccacctcacttgtccatcctccttctctgtaccatatttttgctccttcgtttcagttcagctcagcaatgaa

SEQ ID NO: 99035 - DNA, 522 bp, Zea Mays
ggatgcctctcctcgcttcatccacctcgtctcactccggcgtcttccatttgacctccgtgccttctcctcttgcttgtggccacagtttgagccatgcatgccgcgccgacatggtgagcaagagcgacggccagtagaaaccgctctcgaacgcgacgctgcagcaggcacaggcgaggtcccgctcatccagatcacaccggctcatcgacgacagcaatgccttctcgggcgccaccgccgcgacgcagtcctcgcacatgtctccggcgtccatgagccagcggtgggtcccgaagaggctgccgatgccgaggcgggagcagagcgcgcatggcggcgcgaggctgaagaagccggcgaagcgagctatgaggattaggattttggttttaagggcaatttttcccaatcactatatgctcatatactcttctcaaatattgatgtggtatgcgagtaacaaaacaaaattaaaggtacctacaagatattgaccatggatctctattgtttgta

SEQ ID NO: 99036 - DNA, 787 bp, Zea Mays
tgattaatatattatgtgtggtaaagtatatattctatgcgaagaagtggaaacgacctcatcgttgattgcggtgttccggtactcgctgttctaaattttttgctacagtaaggtacccctccctccttgattgtaggtaattcacacatgagtttatgttttaggttgttttttcctggaatactctatgtcgactaaacaatttaggttctttcgagttacattacatcgatgtaatcttcacacaaagtctcaacaatatttggttgctcacttacaccccaccctagattaacatgttctgaattttctttgttcactgctgcaattgacacatgctaaatggcaatttctttataatgatccaattgagtttgtaattgcacatgtttttgccaagtttcatcaagtactgctccaacagaacaagcaatcatggaatattgagctaaggcactggagtctcaagaaaaggtctaggaatcctaagaatggatggataacgatgcttaaatatggatgacatcatttatgtcttgataaccatctacaggccggtgatagtgttttttgacgttcattcatggggctcacctttctaatgtgtaagaaagaaaactacgttgatcttaatctgagttgtgtgttgatggtcgatgtagtaaagaaggggcacttagacattgttgttcatggatttatgtactgccaacaaaccctatcttctgattcttataggtggtgcctggttctaatggcttgcatgtattttatgcattgacta

SEQ ID NO: 99037 - DNA, 1185 bp, Zea Mays
atggcgtgcaccgtctcctgctcgcgcgtcttcgtcgtcaggtgctcggcgtccccctcgggtggcggtggcggcggcaatgccgtgagggtgaacggcgcggcacaccgcgcgccgctgcaggtcggggcggcgctggagacgtccatcaacaggtcgctggcggagctgagtccgccgctgctgccgctgctgcccacggacgacgccggcgaggagcgcagccggcagaacatcccgacggagaagcagaccgtggacccgttccggcaggcgctgatcgtggagggcggcgtgcggtaccagcagactctggtggtgcggtcgtacgaggtcggccccgacaagacggccactctggagacggtgctcaacctcctccaggagaccgcgctgaaccacgtctggatgtcagggctgctcggcgacggcttcggcgccacgcacggcatgatcaggaacaacctcatctgggttgtctccaggatgcacgtccaagtcgaccagtacccgatctggggagaggtgctggacatcgatacctgggtgggctcgtcggggaagaacggcatgcggcgggactggctcatccgtggccgcaactccggcgacgtcttcgtccgcgcaacaaggcaagctagcctggtgacgaggaggctgtccaagatgccggaggaggtccgggccgagatcgcgccgtggttcatcgaccgccatgccatctaccaggaggaagccacggacaagatcatcaagctcgacagcaacgccatgtacgtcgactccgaccttaagcccaagcgaagtgatctggatatgaaccaccacgtcaacaatgtcaaatacgtgaggtggatgcttgagactcttcctgatcacttccagcagcagaaccagctcagcagcatcatcctggagtacaggaaagagtgtgggagctcagatgtcgtgcagtccatctgtcaacctgatgacgactcgattccaccgcaagaagatgtcagtatggccatcgggccttcgctctcgccggaactcatcagtggccaccacagcttggcaggtgcgctccagcacagcccgatgaagtacacgcaccttctgcagctgaaagcaggcgacaagtacgaggagattgtgcgagggagaactacgtggaagaaaaaatcatataaagccccctga

SEQ ID NO: 99038 - DNA, 678 bp, Zea Mays
gggcaattcaaccaccaaaattaattagggattaggtgtaagcctaattccctttcaacgggcatggccgagggggttgcatggaaggccaaggaggagagggtccagggggcgcaaaatttggagacaacacatgaggaggtgcggtgcatgaccagggacatggagatggaacctgaggaactgagttgggtggatcctcgatctggagaacagaaattggagacagagcttacctctcgcgatgatgaagagaagtacaagcaagtagctgagttagcttccaaactagtagttgaagaagctgcgtatcgtgatgtccaggagagaaaagttgagctgcatgatgcgctgattaaaatggtacaaggtggaagtgttgatggtctgcttcaggttcgagctgatcgaatccaatatcacttagaagagatggagaaagctattggtgaacggtgcaaacactttggatttaaattcaaatcatctacatcagttgagcttccttctggttgggaacctgggccacaagagggaatcattgagtgggatgaagactgggataaatttggaaatgaagggtttagtattgttaaagataatggtacgatacatgaaaacccagtttctgctgaaaatggaaaagtgccttctctttgggatgattgcaatgatatg

SEQ ID NO: 99039 - DNA, 1594 bp, Zea Mays
aggaaagaaacagaatacaaattccatctcaaactcggtgttgtcgttcccttggcggctattcctggtgctcacgtcgcggcgatcttggtcgacggccacgggctgtgacagaacggtgggcgaggaggatgttggggtagacggcagcgtggatggcagaacgtgggcgagggttggtggggatggagggatagatgtggaagttgactctgaacttttaataaagtagtatagatttggagttggatgagtgctgcggatagcctgatcctgatgcaacacgacgaaagcaggatcaccggagtggcacagatctcacgtcctgtgtcgtcgtctgtctcgcgcgtgttcaagaactgagcccagcgggattggaaaaaagattcctcgcccaaccctaccccagtccccaggcgatctcgcatggccaccggaccgcggtctctccacgccctcctcggcggcggtgcagttgccgacttgctgctgtggcgacggaggaacgcctcggcggcagctgtggtgggcgccaccacggtctggttcgttttcgagcgcgcggggtacagcttcccctccgtcctctccaacgccctgctcctcctcgtcgccatcctcttcttctgggccaagtctgcgtcgctgctcaacaggcctcttccacctcttcctaatcttgaggtctcagatgcgattgttgaaaaagctgcaaatcatgctcttgtatggatcaataggctgctggctgttggtcatgacatcgccatcaagagagataggaaagtttttataaaggtgatactgattttgtgggtggtttcattcattggaatgctcttcaattttcttacgcttatttacattggtgtaatgctttctctgttggttccaccactctatgagaagtaccaggaccaggttgatgagaaggttggtgtagcgtacagtgtactatcaaggcacatagataccatcattaccagggctgggcaatcagccaagcagaagaagactgagtaaaagaaacgttttgctgtattgtggaacatccctggttgtccaatgaagttgacagtgggcctttcatctttgaccctctattccactaaaatgaaccctcgatatgctgatatgaggttttgatgtgcattacgggaaatgaggtggcttgtgtatttcctttttggacatggggtttactatgggtgcatatcgcactcggaatgatatcgagaaattgcgactcgtacatgcaattatgcaggctgcttgctctgttagtcatatgatctttccgtcagtgattttaagttttaggctgctccgaggaactttgcaggctgctccgagcaattatgcaggctgcttgctcattcgatgcccatctactggtagctcgttttctgaaatactactactccctccgtttctttttagttgtcgctggatagttcaattttgtactatccagcgacaactaaaacgaaacggagagagtacctaataaggtgtattctacatagacagttgcatatcatgtgaatggataggtatttctggcggcagttctgtttttgctttacctgtattt

SEQ ID NO: 99040 - DNA, 1502 bp, Zea Mays
acagaatacaaattccatctcaaactcggtgttgtcgttcccttggcggctattcctggtgctcacgtcgcggcgatcttggtcgacggccacgggctgtgacagaacggtgggcgaggaggatgttggggtagacggcagcgtggatggcagaacgtgggcgagggttggtggggatggagggatagatgtggaagttgactctgaacttttaataaagtagtatagatttggagttggatgagtgctgcggatagcctgatcctgatgcaacacgacgaaagcaggatcaccggagtggcacagatctcacgtcctgtgtcgtcgtctgtctcgcgcgtgttcaagaactgagcccagcgggattggaaaaaagattcctcgcccaaccctaccccagtccccaggcgatctcgcatggccaccggaccgcggtctctccacgccctcctcggcggcggtgcagttgccgacttgctgctgtggcgacggaggaacgcctcggcggcagctgtggtgggcgccaccacggtctggttcgttttcgagcgcgcggggtacagcttcccctccgtcctctccaacgccctgctcctcctcgtcgccatcctcttcttctgggccaagtctgcgtcgctgctcaacaggcctcttccacctcttcctaatcttgaggtctcagatgcgattgttgaaaaagctgcaaatcatgctcttgtatggatcaataggctgctggctgttggtcatgacatcgccatcaagagagataggaaagtttttataaaggtctgtgtctttctctgatattctcagtttctcagtctctactgtatatctgcttctaattatgtgtgctcttatccctgttcttggtgcaaaaggtgatactgattttgtgggtggtttcattcattggaatgctcttcaattttcttacgcttatttacattggtgtaatgctttctctgttggttccaccactctatgagaagtaccaggaccaggttgatgagaaggttggtgtagcgtacagtgtactatcaaggcacatagataccatcattaccagggctgggcaatcagccaagcagaagaagactgagtaaaagaaacgttttgctgtattgtggaacatccctggttgtccaatgaagttgacagtgggcctttcatctttgaccctctattccactaaaatgaaccctcgatatgctgatatgaggttttgatgtgcattacgggaaatgaggtggcttgtgtatttcctttttggacatggggtttactatgggtgcatatcgcactcggaatgatatcgagaaattgcgactcgtacatgcaattatgcaggctgcttgctctgttagtcatatgatctttccgtcagtgattttaagttttaggctgctccgaggaactttgcaggctgctccgagcaattatgcaggctgcttgctcattcgatgcccatctactggtagctcgttttctgaaatact

SEQ ID NO: 99041 - DNA, 896 bp, Zea Mays
acgctttcttccacttctcttttccttacttcccaaacccaccctcccaagtcccaagcccaccgaaccctactcaccaacccacccgcaggagaacggaaaaaaaaaatcgtgtcgaggcgactttcgccgccatggcaggcgatcccccgacggctgcggagaaggagaccctggtctcctccttcatcgagatcaccgccggccagaccctcgagactgccacccagttcctccagatgacgagctggcacctggaggaggcgctgcagctgttctacatcgacggcgaggccgcccacaccgccgcgcattcggtggacccgtcgcctgcggcggcggccccgtcggcactagcggcggcggccggggtggaagaggcgatgaggttcgctccacccccggcggctgcactgggcgatgcaatgtcgcatgggtttggggtcagggaggacgacgacgttcgcgcgcccctgccggtgaagagggagactctctacggcgagggaatcgtgtccgtcatgcgacctaatgcatcagctgcatttcgtaactttgaacaagaagcaagacaatctgctgtttgggactctgagcagaatgttgcatctagttctggtgataatcttgcttctttataccgtccaccttttcctttgatgttcaatggatcctttgacaaggtaagctgtatatcaattatatcatctcgttagtttatatgctcgtgaaaatctatgggcactattttgttatttgcatatatggaaagctgcacaacatataattgccactatgcttgtatctcagttggctgatgaatttcttgaaaaccataactatagagcaagtagctcggtgttagttggttaaatattctttaaattgtttcacct

SEQ ID NO: 99042 - DNA, 2189 bp, Zea Mays
ctttcttccacttctcttttccttacttcccaaacccaccctcccaagtcccaagcccaccgaaccctactcaccaacccacccgcaggagaacggaaaaaaaaaatcgtgtcgaggcgactttcgccgccatggcaggcgatcccccgacggctgcggagaaggagaccctggtctcctccttcatcgagatcaccgccggccagaccctcgagactgccacccagttcctccagatgacgagctggcacctggaggaggcgctgcagctgttctacatcgacggcgaggccgcccacaccgccgcgcattcggtggacccgtcgcctgcggcggcggccccgtcggcactagcggcggcggccggggtggaagaggcgatgaggttcgctccacccccggcggctgcactgggcgatgcaatgtcgcatgggtttggggtcagggaggacgacgacgttcgcgcgcccctgccggtgaagagggagactctctacggcgagggaatcgtgtccgtcatgcgacctaatgcatcagctgcatttcgtaactttgaacaagaagcaagacaatctgctgtttgggactctgagcagaatgttgcatctagttctggtgataatcttgcttctttataccgtccaccttttcctttgatgttcaatggatcctttgacaaggcaaagttagaggcttcttccctggacaaatggctattaatcaatttgcagtcgacagaggaatttagctctcacatgcttaaccgagacacttggggaaatgaagcggtggctcagttaattaggtcaaattttattttctggcaggtttactatgacaccagtgaggggaggaaggtatgcacctattaccatttggtgtccatgcctgctattctcctaattgaccccgtcaccgggcaaaaagtacatgcttggaatggaatggttcacccagaccgtttactcgaggatttactaccttacctggataaaggtccgaaggggcaccatgcagctcaacctcaaaagcgcccaaggaaagttgatcaggaagcttctacgggcaagcaaggcaaaatcgctgtagaggatgaggatgaagaactagcaagggcaatagcagcttcgctagaggtagtcattgaagcatcagacgccagtgatgatgatatggctgaagctgaacctgaggaggaaaatgagcccagcttaaacatcaagcctgattatcctcctctccctgaagaacctaaaggaagcagggagcttctctgcagggttgcgattcggctaccgaacaatcaaaggatccaaagaaacttccttcacacagatcctatcaagctcctgtggtcattctgcgctcctcaggttgaggacggggagaagagggctttccacttcgtacaggccattcctggagcatcccagaagctgcagtttggaagcgacctaactttcaggaaagctgggctggccaactcgatgatcaacctcttgtggggctgagacgcttccatcttgcgcttggaaggccttgatcaggacgtgtccagtgtcctccggatgggcttgaagatccagttatttttcattccttgaggattaactcttcatattctgctccgtcccctgggctgcatgttgaaatgctcctttttgccgttcgttcttgtgtctacacatacatcgctgtccccggtagggttttgcctcgatttagtgcacatatctatcagagattcaatctggtggtgtggggcgtgcgcatggtctggtgctttgctttgatgtttcccttttgtatggtcgtggcaaagtctgaaagggagatgcatgaaggcaggcagcgcaatcagattcacagctggacctggatccaaaaccatgaatgaatgagcaggcatggtccttggtgtgccccgtccaacctcacacagtggccgctcaaagctgccggcacaggacagcgtgcggatgcagatgcagtgatgggagatcgcaggcagggagagtagagcagagagagagggacatcacaaggttacgtccctttgatgaatcatcactgcccctccagagacattgtttcgttgcatgatttatatgttctatgacaccttttgtgaacttgcttgatgtatgactgtacctaataatctaatatgttcctttttaaaagagaga

SEQ ID NO: 99043 - DNA, 100 bp, Zea Mays
ggctaactgatgtttattgtttactctatacaaatatgtcttggtacaacacggtcaatgaagtgagcgattataagagagttcacaacgattgactgaa

SEQ ID NO: 99044 - DNA, 1194 bp, Zea Mays
gccgcgcgggccccgccgcatgggcccccccgcggatccgcgccccggatcggcctggcccgcgtgccgtgccgtcctatactcgatccgcgcgcctcggatcccctctgagatttgccccgccaccaccaccatccctgcttgctagctacccgctgctgccgtgccgtgccgagtctcctcctgactgactgactcctcccctgcactgcacctgtgtatatatacacgcccgcccgcgcctccgacttcatcgccgcaaccgcccgtctgctcctgcttagtacatacatccacactcgcaagagaaggagaagagatctccgcgtccgcaaccgcatcgcttccctcccggcgcaagaagaagattcggttggattgtttgtctcttgcaaactgcaatggctgctgctgccactgctactccgtccgtggcgccggaggccggcgaccggaaggcggtggcaccgccggtcgacgcggtggatctggatctggagctggagctggaggagaagcacgtgctggcggtggacgacagctccgtggaccgcgcggtgatcgccaagatcctgcgcagctccaagtacagagtgacgaccgtggactcggcgacgcgcgcgctggagctgctggcgctggggctggtccccgacgtgaacatgatcatcacggactactggatgcccgggatgaccgggtacgagctgctcaagcacgtgaaggagtcgtcggcgctgcgggcgatccccgtggtgatcatgtcgtcggagaacgtgcccacccgcatcagccggtgcctggaggagggcgccgaggacttcctcctcaagcccgtccgccccgccgacgtctcccgcctctgcagccggatccggtgaccgcccgcgcaaggatggaggatctggttgcgcgctctgacttaattagaggagttgttaggatccaattttttgtgtgttcgttcgttcgttcgttcttttctttctttcttcttggacatagatctgccgccgccgccgccgcagccgctgccgtcgactgaaacaagaagctaacttagttttaggatccaggttgttgttgttgttaggaaggggagtcgttgggggcattcacggatgttcttcttcgtttcccctccctccgtgcctgaggctgcaaaaatatgccccccagacatgaagaaaacaa

SEQ ID NO: 99045 - DNA, 186 bp, Zea Mays
atggcgatggccagcaacgccatggccagtgccgcgatggcgccgctggtggtgcctggcgcggcgctgccgccggttggggccggcgggctgggaggcgccggcgggggcgcgccctggccggcgaccctgacgaccatccgctggccgcgctcgcagtggccggtctcgccgctgatgaagtag

SEQ ID NO: 99046 - DNA, 1108 bp, Zea Mays
cccgaaacccctatacgtaaataaaaaaaaatccataacgcaatcgcaaggcgctgcctccaccgccgccacctgcacatccatcgtcgccgttcgcgtctccggatcccgcgaccggagtccggaccctcatcccgcggccgcatattctcccgtccgtgccctcgcgtgcgctctgcccctccggcgtccgccgccgccgtcgccctacccgaggtgccgtggtctccatctcccggagcttcgccggcgacgagaatcttccagcatctcggcgcgtgtagagccatgctgggcgcgcgtgtgcagctgaaggggtggcaacaggcagctgttgcatttggttctgcgtttggggccttgcttgaccctaggagggctgatcttatagctgctcttggagagactactgggaaaccagcgtttgagcgtgtgctgcaacgaatgaagaacagtgcagaaggcagggaagttctctcggagcgtccccgcgtggtatcctcgcaggtttcccatgcctgggacctgcctcagaacacatttggcgcggcgtatgctcagttcatgggatcaaggaacttctcaccagacgatcgcccgcctgtccgtttcatggacaccgatgagctcgcctacgtcgcgacacgtgctcgcgaggtgcacgacttttggcacgtgctgtttggtcttccgacgaacctgattggggagaccgccctcaaggtgatagagtttgaacagatgttcctcccaatgtgcatgctgtcagtcgtcgggggctctgcgaggttcagcgacaaacaaagggcgctgtttttccagcactacttcccatgggcaacaaaagctggtctcaagtgtactgatctgatgtctgtatattacgagaagcactttcacgaagacctggaggtagtgagaaggaactggggaatccttccttgccccagtcccaaaaagagcagtgtatagggcggcattttctgcgtgaactttctatctgtttcatctttggtttctgttagttgctcagttctttttggaatagcatcatgagctaatgttgatgaatactgatacgttaccgagttggaagtatggttagcaa

SEQ ID NO: 99047 - DNA, 1091 bp, Zea Mays
cccgaaacccctatacgtaaataaaaaaaaatccataacgcaatcgcaaggcgctgcctccaccgccgccacctgcacatccatcgtcgccgttcgcgtctccggatcccgcgaccggagtccggaccctcatcccgcggccgcatattctcccgtccgtgccctcgcgtgcgctctgcccctccggcgtccgccgccgccgtcgccctacccgaggtgccgtggtctccatctcccggagcttcgccggcgacgagaatcttccagagccatgctgggcgcgcgtgtgcagctgaaggggtggcaacaggcagctgttgcatttggttctgcgtttggggccttgcttgaccctaggagggctgatcttatagctgctcttggagagactactgggaaaccagcgtttgagcgtgtgctgcaacgaatgaagaacagtgcagaaggcagggaagttctctcggagcgtccccgcgtggtatcctcgcaggtttcccatgcctgggacctgcctcagaacacatttggcgcggcgtatgctcagttcatgggatcaaggaacttctcaccagacgatcgcccgcctgtccgtttcatggacaccgatgagctcgcctacgtcgcgacacgtgctcgcgaggtgcacgacttttggcacgtgctgtttggtcttccgacgaacctgattggggagaccgccctcaaggtgatagagtttgaacagatgttcctcccaatgtgcatgctgtcagtcgtcgggggctctgcgaggttcagcgacaaacaaagggcgctgtttttccagcactacttcccatgggcaacaaaagctggtctcaagtgtactgatctgatgtctgtatattacgagaagcactttcacgaagacctggaggtagtgagaaggaactggggaatccttccttgccccagtcccaaaaagagcagtgtatagggcggcattttctgcgtgaactttctatctgtttcatctttggtttctgttagttgctcagttctttttggaatagcatcatgagctaatgttgatgaatactgatacgttaccgagttggaagtatggttagcaa

SEQ ID NO: 99048 - DNA, 897 bp, Zea Mays
gtaatcaaggcatatctgattaggttactatcttctgattaatcatgttgtagtcagttgctgtatgctacattagatttccttatagtatcatcggattaccaattccatgttcaactaagatatgccaaaagaagaactcatgtcaacttgcagttatgttaccaatttcatgtgcagctaggatattgttgttgcctgaatttcttccactgggcccatgtcactgacagacttattcctctaggaagttctctcggagcgtccccgcgtggtatcctcgcaggtttcccatgcctgggacctgcctcagaacacatttggcgcggcgtatgctcagttcatgggatcaaggaacttctcaccagacgatcgcccgcctgtccgtttcatggacaccgatgagctcgcctacgtcgcgacacgtgctcgcgaggtgcacgacttttggcacgtgctgtttggtcttccgacgaacctgattggggagaccgccctcaaggtgatagagtttgaacagatgttcctcccaatgtgcatgctgtcagtcgtcgggggctctgcgaggttcagcgacaaacaaagggcgctgtttttccagcactacttcccatgggcaacaaaagctggtctcaagtgtactgatctgatgtctgtatattacgagaagcactttcacgaagacctggaggtagtgagaaggaactggggaatccttccttgccccagtcccaaaaagagcagtgtatagggcggcattttctgcgtgaactttctatctgtttcatctttggtttctgttagttgctcagttctttttggaatagcatcatgagctaatgttgatgaatactgatacgttaccgagttggaagtatggttagcaagttgatgtgc

SEQ ID NO: 99049 - DNA, 1217 bp, Zea Mays
gcgcggcagaatccgatggcgcgcgctcgccattggccggcgcgctatccgtcctaccgccgcggagatttcccgcggccgcggccgccctgtgccgcggcgcggctattattattaatctgacgtcctgctgctgttccctccaatccaacgaactgaccacaaccacctaagctaaaagctaaccaccagacccccggccatggcgctcgcgcccacttccgctgccgtgctcaagaccccgttcctcggggccaggcgcgcgctcgccaatgccgccgccaagcccgcgcctcgccgcgcgctggtcgtcgccgccgcggccgccgccaagaagtcgtggatcccggccatcaagagcgacgccgagatcgtgaacccgccctggctcgacggctcgctccccggcgacttcgggttcgacccgctggggctgggcaaggacccggcgttcctcaagtggtaccgggaggcggagctgatccacgggcggtgggcgatggcggccgtgctgggcatcttcgtggggcaggcgtggagcggcatcccgtggttcgaggccggcgcggacccgagcgccatcgcgcccttctccttcgggtcgctgctgggcacgcagctgctgctgatggggtgggtggagtcgaagcggtgggtggacttcttcaacccggactcccaggccgtggagtgggccacgccatggtcccgcaccgccgagaacttcgctaacttcaccggcgagcagggctacccgggcggcaagttcttcgacccgctcggcctcgccggcaccgtcaaggacggcgtctacatccccgacgtcgacaagctcgagcggctcaagctggccgagatcaagcacgcccgcatcgccatgcttgccatgctcgccttctacttcgaggctgggcagggcaagacgccgctcggcgcgctcggcctatgatttgcatgctgccggcgaccgagtcagttatcgattgcgcggggtgggtgagctcctagggacgtacggctgcaggggatcagacgccttgcctcgcagattggaggcgaaagaagagcgtagcagcaatctactgtctgtgttggtggtttagcgtgcgtgaaccagatggggtgttcctctctgttttttctttctttcttttctgtgtatgtatcaaatgtatgtaccatgtaatgtatagtatggatcgatttcattgcattaa

SEQ ID NO: 99050 - DNA, 1317 bp, Zea Mays
gcgcggcagaatccgatggcgcgcgctcgccattggccggcgcgctatccgtcctaccgccgcggagatttcccgcggccgcggccgccctgtgccgcggcgcggctattattattaatctgacgtcctgctgctgttccctccaatccaacgaactgaccacaaccacctaagctaaaagctaaccaccagacccccggccatggcgctcgcgcccacttccgctgccgtgctcaagaccccgttcctcggggccaggcgcgcgctcgccaatgccgccgccaagcccgcgcctcgccgcgcgctggtcgtcgccgccgcggccgccgccaagaagtcgtggatcccggccatcaagagcgacgccgagatcgtgaacccgccctggctcgacggctcgtgagtctttcgctgtctgtctatgttcacttataactgtgatacgtacgaggagaaaaattaaatggaggtcgaagctgaccacgacgacttgcaggctccccggcgacttcgggttcgacccgctggggctgggcaaggacccggcgttcctcaagtggtaccgggaggcggagctgatccacgggcggtgggcgatggcggccgtgctgggcatcttcgtggggcaggcgtggagcggcatcccgtggttcgaggccggcgcggacccgagcgccatcgcgcccttctccttcgggtcgctgctgggcacgcagctgctgctgatggggtgggtggagtcgaagcggtgggtggacttcttcaacccggactcccaggccgtggagtgggccacgccatggtcccgcaccgccgagaacttcgctaacttcaccggcgagcagggctacccgggcggcaagttcttcgacccgctcggcctcgccggcaccgtcaaggacggcgtctacatccccgacgtcgacaagctcgagcggctcaagctggccgagatcaagcacgcccgcatcgccatgcttgccatgctcgccttctacttcgaggctgggcagggcaagacgccgctcggcgcgctcggcctatgatttgcatgctgccggcgaccgagtcagttatcgattgcgcggggtgggtgagctcctagggacgtacggctgcaggggatcagacgccttgcctcgcagattggaggcgaaagaagagcgtagcagcaatctactgtctgtgttggtggtttagcgtgcgtgaaccagatggggtgttcctctctgttttttctttctttcttttctgtgtatgtatcaaatgtatgtaccatgtaatgtatagtatggatcgatttcattgcattaattc

SEQ ID NO: 99051 - DNA, 1010 bp, Zea Mays
gctcgcgcccacttccgctgccgtgctcaagaccccgttcctcggggccaggcgcgcgctcgccaatgccgccgccaagcccgcgcctcgccgcgcgctggtcgtcgccgccgcggccgccgccaagaagtcgtggatcccggccatcaagagcgacgccgagatcgtgaacccgccctggctcgacggctcgctccccggcgacttcgggttcgacccgctggggctgggcaaggacccggcgttcctcaagtggtaccgggaggcggagctgatccacgggcggtgggcgatggcggccgtgctgggcatcttcgtggggcaggcgtggagcggcatcccgtggttcgaggccggcgcggacccgagcgccatcgcgcccttctccttcgggtcgctgctgggcacgcagctgctgctgatggggtgggtggagtcgaagcggtgggtggacttcttcaacccggactcccaggccgtggagtgggccacgccatggtcccgcaccgccgagaacttcgctaacttcaccggcgagcagggctacccgggcggcaagttcttcgacccgctcggcctcgccggcaccgtcaaggacggcgtctacatccccgacgtcgacaagctcgagcggctcaagctggccgagatcaagcacgcccgcatcgccatgcttgccatgctcgccttctacttcgaggctgggcagggcaagacgccgctcggcgcgctcggcctatgatttgcatgctgccggcgaccgagtcagttatcgattgcgcggggtgggtgagctcctagggacgtacggctgcaggggatcagacgccttgcctcgcagattggaggcgaaagaagagcgtagcagcaatctactgtctgtgttggtggtttagcgtgcgtgaaccagatggggtgttcctctctgttttttctttctttcttttctgtgtatgtatcaaatgtatgtaccatgtaatgtatagtatggatcgatttcattgcattaa

SEQ ID NO: 99052 - DNA, 1956 bp, Zea Mays
cacaaattcgcgtccgcttcgtggtgcccgcccagccccaaccctcgtggtcgactggtcgttgaaacctattcgcaggaagaaaaaaaaacattcttgtccgccccggctccaggctgctagtctgcaaccccccatccacccgcgaagtctcccaccaccgcgccgatccgggggcgggcggcgggggggcctcttgctctctactccacccactcgcggcctcacccgtggatctacgcggtggccggcgggcgcgatggcggaggcggagcgggagcagcgcccgctgccggaggtggagcaatctgtcacgtccataccggaagatcatgaagcaacatgttggggctgtgggcttcggcttgtctttgcgagctactcacctatctacaagtgtgggtggtgtggagccgtcacgcagagcaacaaccagactgcaaggaaacctgatagtatatggttttcccactggaggcgcctacgggacaggctcttcgtggctgtgctcgtcctcttcatgctcttcgttatatgtggtggggtctgggcggtatatcctgttgttttctcagtcagcaagttctgtggcgtatttcactgcacggtagcagctgtgttggctgtatgtaccgtcacaagctattgcttggcctctttgaaatgtgcaggcgcaccaacagacataaggtggggcagctatcccgtggttgggaaaggggatcttgagaactataccttttgtacatactgtagcaaaccaaagccccccagagcacatcactgccggtcgtgtaaaatgtgcgtggtggacatggatcatcattgcccatttattggcaactgcgtgggagcatcaaaccatcaagtgtttgtggtttttctcatttctgtggttatcagttgctcttatgtcgctgggatgaccatatacgcgagctaccagatatggccctccattgaattcccagacctagcatcatcatctcgtcactcgatgagttcttggaaaacggtgctggagatgatcactacggttgcaggctccgccttcttcttgtcagccaggggtctagtcctggtgtatctggcgtttgctagctcgtcagtgaatgctggtatagctgtgttgctgtgccagcagctgagctatatctacgaagggaacacgtacctcagccgtctgagctcaccaccgaatgccttgcagcatggagagaggggtttgcagaacatcgttcggtttttcgggtgcccgtatccagtctccagagctgtgttgcgactgcggtactccaacgctgccaagttgcaggatgattcagggtcgaaacttctttagagaggtatggatcaatagatcagtcaaaatcctctgttttttttatgttccttcttataaatcagtcatggtgtaacagacagtttcgtttacattacatgtcggtttcagtgctatactctcgattaagacgccgtttcgagtcgagacagttctgttctgttactcggaaattgtgatttgtgaacctcactcagttgaccaccggcagatttgtctgaataactgaagccgttttaggatgcagcactcatgacaacccgtgttcgatctggaggaaggattagttgttcatgaggacgccactcgcattgattagactgcagcacctgaaattctgcatcaccatcactgccctttccaactcagcagagcttgaagatggcagcagcttcatccacagctggttgttgcagaagaaatgatcatcatgattaaatctgacagtagtggcttcgagagtgatgctaggatgttggagagaaaaaaaatgtgtcccgccatacctctttgatgttaattcactgacatgtatatatacgatcggaaacgttgtaacgttcacttgatgtaaattattagtcgattaatcatgcacgtgtccgttccgtggt

SEQ ID NO: 99053 - DNA, 1907 bp, Zea Mays
agccccaaccctcgtggtcgactggtcgttgaaacctattcgcaggaagaaaaaaaaacattcttgtccgccccggctccaggctgctagtctgcaaccccccatccacccgcgaagtctcccaccaccgcgccgatccgggggcgggcggcgggggggcctcttgctctctactccacccactcgcggcctcacccgtggatctacgcggtggccggcgggcgcgatggcggaggcggagcgggagcagcgcccgctgccggaggtggagcaatctgtcacgtccataccggaagatcatgaagcaacatgttggggctgtgggcttcggcttgtctttgcgagctactcacctatctacaagtgtgggtggtgtggagccgtcacgcagagcaacaaccagactgcaaggaaacctgatagtatatggttttcccactggaggcgcctacgggacaggctcttcgtggctgtgctcgtcctcttcatgctcttcgttatatgtggtggggtctgggcggtatatcctgttgttttctcagtcagcaagttctgtggcgtatttcactgcacggtagcagctgtgttggctgtatgtaccgtcacaagctattgcttggcctctttgaaatgtgcaggcgcaccaacagacataaggtggggcagctatcccgtggttgggaaaggggatcttgagaactataccttttgtacatactgtagcaaaccaaagccccccagagcacatcactgccggtcgtgtaaaatgtgcgtggtggacatggatcatcattgcccatttattggcaactgcgtgggagcatcaaaccatcaagtgtttgtggtttttctcatttctgtggttatcagttgctcttatgtcgctgggatgaccatatacgcgagctaccagatatggccctccattgaattcccagacctagcatcatcatctcgtcactcgatgagttcttggaaaacggtgctggagatgatcactacggttgcaggctccgccttcttcttgtcagccaggggtctagtcctggtgtatctggcgtttgctagctcgtcagtgaatgctggtatagctgtgttgctgtgccagcagctgagctatatctacgaagggaacacgtacctcagccgtctgagctcaccaccgaatgccttgcagcatggagagaggggtttgcagaacatcgttcggtttttcgggtgcccgtatccagtctccagagctgtgttgcgactgcggtactccaacgctgccaagttgcaggatgattcagggtcgaaacttctttagagagtgctatactctcgattaagacgccgtttcgagtcgagacagttctgttctgttactcggaaattgtgatttgtgaacctcactcagttgaccaccggcagatttgtctgaataactgaagccgttttaggatgcagcactcatgacaacccgtgttcgatctggaggaaggattagttgttcatgaggacgccactcgcattgattaggtagagcaattttggcagatgctgaaatacggtgtggcctgcgcattcattgcctgcagacaataataaggtgctgatggtcttgcaacagactgcagcacctgaaattctgcatcaccatcactgccctttccaactcagcagagcttgaagatggcagcagcttcatccacagctggttgttgcagaagaaatgatcatcatgattaaatctgacagtagtggcttcgagagtgatgctaggatgttggagagaaaaaaaatgtgtcccgccatacctctttgatgttaattcactgacatgtatatatacgatcggaaacgttgtaacgttcacttgatgtaaattattagtcgattaatcatgcacgtgtccgttccgtggt

SEQ ID NO: 99054 - DNA, 1952 bp, Zea Mays
aaaaaaacattcttgtccgccccggctccaggctgctagtctgcaaccccccatccacccgcgaagtctcccaccaccgcgccgatccgggggcgggcggcgggggggcctcttgctctctactccacccactcgcggcctcacccgtggatctacgcggtggccggcgggcgcgatggcggaggcggagcgggagcagcgcccgctgccggaggtggagcaatctgtcacgtccataccggaagatcatgaagcaacatgttggggctgtgggcttcggcttgtctttgcgagctactcacctatctacaagtgtgggtggtgtggagccgtcacgcagagcaacaaccagactgcaaggaaacctgatagtatatggttttcccactggaggcgcctacgggacaggctcttcgtggctgtgctcgtcctcttcatgctcttcgttatatgtggtggggtctgggcggtatatcctgttgttttctcagtcagcaagttctgtggcgtatttcactgcacggtagcagctgtgttggctgtatgtaccgtcacaagctattgcttggcctctttgaaatgtgcaggcgcaccaacagacataaggtggggcagctatcccgtggttgggaaaggggatcttgagaactataccttttgtacatactgtagcaaaccaaagccccccagagcacatcactgccggtcgtgtaaaatgtgcgtggtggacatggatcatcattgcccatttattggcaactgcgtgggagcatcaaaccatcaagtgtttgtggtttttctcatttctgtggttatcagttgctcttatgtcgctgggatgaccatatacgcgagctaccagatatggccctccattgaattcccagacctagcatcatcatctcgtcactcgatgagttcttggaaaacggtgctggagatgatcactacggttgcaggctccgccttcttcttgtcagccaggggtctagtcctggtgtatctggcgtttgctagctcgtcagtgaatgctggtatagctgtgttgctgtgccagcagctgagctatatctacgaagggaacacgtacctcagccgtctgagctcaccaccgaatgccttgcagcatggagagaggggtttgcagaacatcgttcggtttttcgggtgcccgtatccagtctccagagctgtgttgcgactgcggtactccaacgctgccaagttgcaggatgattcagggtcgaaacttctttagagaggtatggatcaatagatcagtcaaaatcctctgttttttttatgttccttcttataaatcagtcatggtgtaacagacagtttcgtttacattacatgtcggtttcagtgctatactctcgattaagacgccgtttcgagtcgagacagttctgttctgttactcggaaattgtgatttgtgaacctcactcagttgaccaccggcagatttgtctgaataactgaagccgttttaggatgcagcactcatgacaacccgtgttcgatctggaggaaggattagttgttcatgaggacgccactcgcattgattaggtagagcaattttggcagatgctgaaatacggtgtggcctgcgcattcattgcctgcagacaataataaggtgctgatggtcttgcaacagactgcagcacctgaaattctgcatcaccatcactgccctttccaactcagcagagcttgaagatggcagcagcttcatccacagctggttgttgcagaagaaatgatcatcatgattaaatctgacagtagtggcttcgagagtgatgctaggatgttggagagaaaaaaaatgtgtcccgccatacctctttgatgttaattcactgacatgtatatatacgatcggaaacgttgtaacgttcacttgatgtaaattattagtcgattaatcatgcacgtgtc

SEQ ID NO: 99055 - DNA, 713 bp, Zea Mays
ctccaaagcaaagcaaatctctctctctctctccatctctccacacacagccccttcgctgccgaggtccctcgccggacggggggtgaaggacgaaggggaagaaaggtgcgcgggcatgctttccacaggctttcttgaactgtgaactcgtgggcgtggtggtggtggtgctggtgctgggtgtgtgggacggaatgattggctcctcccagtcccagtcccagtcccacccaccaattctcttccccccgaccggccgtgaattgaattgaatcgaatcgcatcgctgagcttccccccggctcgctcacgcgacctgttgatggttcaagaaagcccatggaaaccatgcagcctccctcctgtgcagctgtgctctggtggcggagaattccgccggttccgggtgagggaattcagcagaccagccaccccgatgcggattcgtgtgtggaggagagttgcagttgcagcgacgactccaactccaacgaggggatccacgcctggactgttctgttccaacgaggggatccaactccaactcagcggcaggcagctagctgtcctgttcgaaattcaaaacccggccagatccgtgcttgcgctgctcgccggggctgctttgtccactcaggccatcgatctccagttccatgtatgctccaattttgttcttgttttttttaaaacaaactcagttccagtac

SEQ ID NO: 99056 - DNA, 2421 bp, Zea Mays
agcaaatctctctctctctctccatctctccacacacagccccttcgctgccgaggtccctcgccggacggggggtgaaggacgaaggggaagaaaggtgcgcgggcatgctttccacaggctttcttgaactgtgaactcgtgggcgtggtggtggtggtgctggtgctgggtgtgtgggacggaatgattggctcctcccagtcccagtcccagtcccacccaccaattctcttccccccgaccggccgtgaattgaattgaatcgaatcgcatcgctgagcttccccccggctcgctcacgcgacctgttgatggttcaagaaagcccatggaaaccatgcagcctccctcctgtgcagctgtgctctggtggcggagaattccgccggttccgggtgagggaattcagcagaccagccaccccgatgcggattcgtgtgtggaggagagttgcagttgcagcgacgactccaactccaacgaggggatccacgcctggactgttctgttccaacgaggggatccaactccaactcagcggcaggcagctagctgtcctgttcgaaattcaaaacccggccagatccgtgcttgcgctgctcgccggggctgctttgtccactcaggccatcgatctccagttccatgcgtgtggtggcgtttgctgggcagatcagttattactcctccactccacaccactgcaccggccggcaccgctggtaacgcacgcaggtaggcggccaaggccatgccaatgtcatgcagcgggattgatccatgcgtcgtccattggcgccctgccctcggctagctgcggctgtgctggaaagagatctggtggccgaggaggaggagaaggcgaggacgaggacgagggacagaaaagcagcaaaaggctcttgtggttggcatgcctacaaccaacgtcccaaccaggagcctgaaaaataatccccggcataaagccatgtgacaggcgacagcgatgccatctgatccgttccgttcggttccccccagcaaaccgtggtgaaaatcacgcggcccccgctctgccatctacccctgcacgagtacgacggtacggcggctgctcctgcaccctgcactgcaggccttctgcaacgcgggaggcgggaggggatttcgcgcgattcccgagggtgaggcaagaatatatgggagtgaacggaacggagcgtcactgtgggagcgggatgggaacggaacggctccgttccgttgattttttggagcggaatggttccggatctgagtagaatattccctaattggagtaatgccgttgtagttactttgtaaccaaacagcaacaaaactggaacagaacggcttcgttctacttggctcttcaaccaaacactatcttactgcttgctttcgctttcccttccttcctagtagcaggcagcagtagttcctacttcctagcaggcagcagcagcagctatttatgcagcagcagtgtgagacgacacattgaaaagcatctgatcctaaaggcgagccaacagcaaagagacgagacgagccccgggcggcccctacgttcctagtacaacatcagagaagtgtgtgatggttgctggtggtggtgtcagatcagcaagcaccaggtcttcagtctcctgctccatcaggaggtagaggtagctcgctcgctaggagctagctgcggaggaaagcgtcgaccttggcgttggtgctgcgggacaggaacttcatgcagatggacggccggcttggcgccggcgagggccaacacagactgcggcagcgtccagatgccgtcgccgcagatgaggcccgacgcgacggggggcgcgaatgccttggcccgggccgggtccaggcggtcccacacgaggcgcaccaggctgccgaagtaggggccgaggtaaaaggggatggacatggccatggtccatggacagcgggatgtaggcggcggcgcgggcgcgcgcgaggtcgcgtgccatgttgatggcgatggcggcggcttagaatgcgatgcagaggtcgagtcagtagcggggcagggttactcggaccccagcatgccgatgtcgcggaacgcgctgtagaagagccagaacacggacggcgccaccacgcagcccatggccgtgccgatcacctggctcacgaacatggaccgcggcgacgccagcgtcatgtacccggtcttgaagtcctgcgtcaggtccgacgccgtcgacacgatgccgatcatcacgctgcacacgccgccagacccgcgatgatgccgccgccgccgtctccgtcgtcggaggccgccgcccagccgcctaccgtcaagatggtcagcttgccgtacgtcgtggccagggaccggtccgtgagcccgtacgtacgcgttgcagaaggccagca

SEQ ID NO: 99057 - DNA, 796 bp, Zea Mays
gcgtgaccgagcccccgccgtgtctccttccatcctcgcgtatacgtcggcgtctccttccatatatgccaacggaggcgaccgcggaggccgctcccccgcgtgcacaacatcccgcgttcccctctcccccaggtcctgccgcagcgcgttgctcagtaccccagccactgcccgctagccccccccacacacatacccatcctcgccggcctcagcaccgcaaacgccgcccgcgcgtcacttccccgcccttcaatggtgtcctcctccccatcactcgggggcagcaaggcaaccgatggggacgtgtccaacttcactgccttcctccaggcctcgccgaagtcattcgtggtcgtcgagttcttcacccactggtgcaatggtcaccagcccagaaggtcatggtcgacccacgcgatgcaacccaattggatgaagctgggtttaggggccttcttcgttggtttgactgagtttcttcttagttaaataaagtggggcaatatttcctcaccgacttcacaaagccgaccatggcagatgttatcggtttcgatctaggcacaccgaattcatgcatctccgtattggaatgaaaggtgtgtttttaacttgttcatcctaaaatctgccatattcagttgtttgtaaatgggttgttgtatccatctgtagtagatttcatgcttcaatcactaaaattagtttgggccagctgttgtatcaatatgtacttaatgtcatggtttgaaatagctacgatttgagtaaattttgtggcaattagctc

SEQ ID NO: 99058 - DNA, 821 bp, Zea Mays
actactactccaaggatgagaagctctttgtgtatgtcccactaggtagcctttgtgctgctttgcatggtatgtccccttcatttcaaataatctgtctgaatcattttacattttgttacctgtcatattgttagattgaaatttagttttcaaaattgaagctatttgatactcaacttgaaagtataatccagatgggggtcgcatacttgaattctcaaagtggggatgctttacattgattgtagagaactctctaattctgggttatgtaaattataatctttggtccttactccttagtttttttctgaataaggtaaaaaaaatttctgaataaggtatttattatttgtaacgtagacatacactccagatgtactatcttcagtccttagtttttattcttctgaatataacatagttttttacaaaggatgttgacatataccttcctcaaatcatttggtatttgggattccaatagctgttctggagttccctagaaacagttaacaagacctgctcttgttgctagaattttgggcttttgagatactgaaattttctggcctttgcagtgaatgcaaaagaataattggtggtttcatagtgctgccttgcttttctgttacctacttaatcttcaagaacgacatggacagttgggggtataagtagcactacatgggttaatgttgtgttgcatattattaatcaggtttagacacatttggttgatctacttaatcaccatgaactggaaactgtgtgattttactaggagggctataggacttttgacatatttttgacag

SEQ ID NO: 99059 - DNA, 728 bp, Zea Mays
gtgagccaaaccaaaccaaaccgcctccagctccagcctcctgtcctgctcccttcctcccctgcctgcctgccgcgcaccactccactcgagtgactcgagtcgtcctcctcccaccacctcccgtccgttgcgttgctcctgcccgcgcctcctccatccaccacaccagtccgtcgttaaagctgcggcatcggcagcacacgccgacgggtacaaggagcactcattgcctccccatctcgtgtaggctctccccctcctccgcgctccgtccgtctctcatcaccgttccgccgccgccccacctctccctcctctcgccgccgcctccgaacccgccacggcgcggcggagatccaaccggacggatctggatcgacctactccgacaccggtaaggaagccaccgcttgctagtccgatgcattgtccattctactctatgcgcaatcctgccctgccctgcgctcaaccgaaaatctctgtttccgcaatggatatcatgcatgtgatatatatggattcgtcagctcagtccatccactttacttctttgttttgctttcgctactagttttcgtatttccctccggttaattacaaggcctgactgttaacttctgggcctccttcttcagctttccgaagatagatagatagataacaaggttgtgctgtgcttgctgtctgttgggaagtggaggaagctcaataagttgatatcc

SEQ ID NO: 99060 - DNA, 947 bp, Zea Mays
gtgagccaaaccaaaccaaaccgcctccagctccagcctcctgtcctgctcccttcctcccctgcctgcctgccgcgcaccactccactcgagtgactcgagtcgtcctcctcccaccacctcccgtccgttgcgttgctcctgcccgcgcctcctccatccaccacaccagtccgtcgttaaagctgcggcatcggcagcacacgccgacgggtacaaggagcactcattgcctccccatctcgtgtaggctctccccctcctccgcgctccgtccgtctctcatcaccgttccgccgccgccccacctctccctcctctcgccgccgcctccgaacccgccacggcgcggcggagatccaaccggacggatctggatcgacctactccgacaccgctttccgaagatagatagatagataacaaggttgtgctgtgcttgctgtctgttgggaagtggaggaagctcaataagttgatatccgcctcgagctcgagggaaccggtgggcaggtacctttaagatctgacccagttcttgtctccgctgttctaaattctcacaggttggttgcgcaacggtccaagaaatgagcctaaaccaaaagcaaaagaaaacaaccaaacctgtgcagcttttgttttgtttagcctgcgatgcgatgtgtccagtttgagctcgagtctcgagagcatgcatgtgttatcctttgtttttctcttttattctgccaccaacttgtcacattttgccggccgttacgtcgcgtagaatgggatcataatatatactccagtataaaacataaacaaacggctgcaaagctgcaggttttgtgttcctatcctagcacataggataggacatagccgctgcatgttgcgaaggatatgagcacgccaggtccagccattgatttcttgcttcctttttcggttgtagagtc

SEQ ID NO: 99061 - DNA, 1465 bp, Zea Mays
gtgagccaaaccaaaccaaaccgcctccagctccagcctcctgtcctgctcccttcctcccctgcctgcctgccgcgcaccactccactcgagtgactcgagtcgtcctcctcccaccacctcccgtccgttgcgttgctcctgcccgcgcctcctccatccaccacaccagtccgtcgttaaagctgcggcatcggcagcacacgccgacgggtacaaggagcactcattgcctccccatctcgtgtaggctctccccctcctccgcgctccgtccgtctctcatcaccgttccgccgccgccccacctctccctcctctcgccgccgcctccgaacccgccacggcgcggcggagatccaaccggacggatctggatcgacctactccgacaccgctttccgaagatagatagatagataacaaggttgtgctgtgcttgctgtctgttgggaagtggaggaagctcaataagttgatatccgcctcgagctcgagggaaccggtgggcagagtcagtgggcgcagcgcattgccttgccttgccttgcctcatgattctccgtttggtaaactcatatttatgaccatgaaggatgtggcctacattgctggatctgctgctacattggtggtgccactgatctgggccccccgatcacgagcatggacagaactgccaataatgcggtattggatatcgagagccttcctcaaccgcctgataaatgctgctctgggagtccgaagatgatcagggccttgtcgcgtaagggttcgaaccggatggagaggaggggcggcggcggcggcgagcaggagcaagaggatttggcgaaaaaacttgtcatcaaagttgtgccgtctcaactggagcagcagcccctgggtcagaacaaggcgctggtcgctccacattgcacacctgttcttgttgattctggggaagggaggagcaaaagattcattagccggttcacgtccatcaaccctcggaagattctcctcttgttcgcaacgctgtcgagcgtggggacaacgatactgatctacttcacgctggcgatcaacagcaaagcggaggcctagtcgcctggagacacccaccaccaccatttgcgtcggcgagcgggcggcggcagtacattccgagcttgagtttttatttttctctatttttgtttgtgaggtagctgccgcggcgagattagatgcagcctgccgctcaggtgtctgtatccattgactgagtgagagactgcttcagtgggtgtcattcttcctcgcgtgtatgtatattggtggaatcgttgatgtgacttttttagtcttcaattatgtgcagcagatcatgtatataacaggagatctgttgaagacagatcggcagagaagttcaattcggattaaaccggctgtttggactcctgcagttttaatgcatagagacaaaaaaaaactataa

SEQ ID NO: 99062 - DNA, 1330 bp, Zea Mays
gtgagccaaaccaaaccaaaccgcctccagctccagcctcctgtcctgctcccttcctcccctgcctgcctgccgcgcaccactccactcgagtgactcgagtcgtcctcctcccaccacctcccgtccgttgcgttgctcctgcccgcgcctcctccatccaccacaccagtccgtcgttaaagctgcggcatcggcagcacacgccgacgggtacaaggagcactcattgcctccccatctcgtgtaggctctccccctcctccgcgctccgtccgtctctcatcaccgttccgccgccgccccacctctccctcctctcgccgccgcctccgaacccgccacggcgcggcggagatccaaccggacggatctggatcgacctactccgacaccgctttccgaagatagatagatagataacaaggttgtgctgtgcttgctgtctgttgggaagtggaggaagctcaataagttgatatccgcctcgagctcgagggaaccggtgggcagggccccccgatcacgagcatggacagaactgccaataatgcggtattggatatcgagagccttcctcaaccgcctgataaatgctgctctgggagtccgaagatgatcagggccttgtcgcgtaagggttcgaaccggatggagaggaggggcggcggcggcggcgagcaggagcaagaggatttggcgaaaaaacttgtcatcaaagttgtgccgtctcaactggagcagcagcccctgggtcagaacaaggcgctggtcgctccacattgcacacctgttcttgttgattctggggaagggaggagcaaaagattcattagccggttcacgtccatcaaccctcggaagattctcctcttgttcgcaacgctgtcgagcgtggggacaacgatactgatctacttcacgctggcgatcaacagcaaagcggaggcctagtcgcctggagacacccaccaccaccatttgcgtcggcgagcgggcggcggcagtacattccgagcttgagtttttatttttctctatttttgtttgtgaggtagctgccgcggcgagattagatgcagcctgccgctcaggtgtctgtatccattgactgagtgagagactgcttcagtgggtgtcattcttcctcgcgtgtatgtatattggtggaatcgttgatgtgacttttttagtcttcaattatgtgcagcagatcatgtatataacaggagatctgttgaagacagatcggcagagaagttcaattcggattaaaccggctgtttggactcctgcagttttaatgcatagagacaaaaaaaaactataa

SEQ ID NO: 99063 - DNA, 1202 bp, Zea Mays
aaaccaaaccgcctccagctccagcctcctgtcctgctcccttcctcccctgcctgcctgccgcgcaccactccactcgagtgactcgagtcgtcctcctcccaccacctcccgtccgttgcgttgctcctgcccgcgcctcctccatccaccacaccagtccgtcgttaaagctgcggcatcggcagcacacgccgacgggtacaaggagcactcattgcctccccatctcgtgtaggctctccccctcctccgcgctccgtccgtctctcatcaccgttccgccgccgccccacctctccctcctctcgccgccgcctccgaacccgccacggcgcggcggagatccaaccggacggatctggatcgacctactccgacaccgggccccccgatcacgagcatggacagaactgccaataatgcggtattggatatcgagagccttcctcaaccgcctgataaatgctgctctgggagtccgaagatgatcagggccttgtcgcgtaagggttcgaaccggatggagaggaggggcggcggcggcggcgagcaggagcaagaggatttggcgaaaaaacttgtcatcaaagttgtgccgtctcaactggagcagcagcccctgggtcagaacaaggcgctggtcgctccacattgcacacctgttcttgttgattctggggaagggaggagcaaaagattcattagccggttcacgtccatcaaccctcggaagattctcctcttgttcgcaacgctgtcgagcgtggggacaacgatactgatctacttcacgctggcgatcaacagcaaagcggaggcctagtcgcctggagacacccaccaccaccatttgcgtcggcgagcgggcggcggcagtacattccgagcttgagtttttatttttctctatttttgtttgtgaggtagctgccgcggcgagattagatgcagcctgccgctcaggtgtctgtatccattgactgagtgagagactgcttcagtgggtgtcattcttcctcgcgtgtatgtatattggtggaatcgttgatgtgacttttttagtcttcaattatgtgcagcagatcatgtatataacaggagatctgttgaagacagatcggcagagaagttcaattcggattaaaccggctgtttggactcctgcagttttaatgcatagagacaaaaaaaaactataa

SEQ ID NO: 99064 - DNA, 94 bp, Zea Mays
accgccgcttatccggggcctcatcgcctccctccggccaagggcgccccgggaatcccccactgccaatcaccgcgcgccacggacgatcgcg

SEQ ID NO: 99065 - DNA, 4583 bp, Zea Mays
actccctctgctctgtttctgagggacggcggccgccaagaacaggcgcaggccaccgagaacaatcctccagccacaagccaagaacaggcgccttactctagtgtagaacaccccaacacacacactgactgagttcgagcgtggcgttcgtgttcaggcgtgcgtttctccgcccgccggctccgtccagtgagcaggcgccatgtcgtcgtctctagtgtccaccccatttgccgccgcggcgcagaagcgcctcctggcggcgcccgtgccgctgcactcgttcctcctgagcggccggcgccagcctccgcgccgcgccggcaccatccggtgcgcggtcgccggcggcaacggcctcttcacgcagaccaagcccgaggtgcggcgcgtggtgccctccgacccgcggggcctgccgcgggtcaaggtcgtctacgtcgtgctggaggcgcagtaccagtcgtccgtaaccgccgccgtgcagcagctcaacgccgacccgcgccgcgccgccgcgttcgaggtcgtgggctacctcgtcgaggagctccgcgacgaggacacctacgccaccttctgcgccgacctcgccgacgccaacgtcttcatcggctccctcatcttcgtcgaggagctggccctcaaggtcaaggccgccgtcgagaaggagcgcgaccgcatggacgccgtcctcgtcttcccctcaatgcccgaggtcatgcgcctcaacaagctcggctccttcagcatgtcgcagctggggcagtccaagagccccttcttccagctcttcaagcgcaacaaggccaactccagcaacttcgccgacagcatgctcaagctcgtccgcacgctgcccaaggtgctcaagtacctgccctctgacaaggcgcaggacgcccggctctacatcctcagcctccagttctggctcggtggctcgccggacaacctccagaacttcctcaagatgatcgccggctcctacgtgcctgccctcaagggcgccggcatcaagtacgacgaccccgttctctacctcgactccggcatctggcacccgctggcgcccaccatgtacgaggacgtcaaggagtacctcaactggtacggcacgcgccgggacgccaacgacaggctcaaggaccccaaggcgcccatcatcggcctcgtcctgcagaggagccacattgtcaccggcgacgacgggcactacgtcgccgtcatcatggagctcgaggccaagggcgccaaggtcatacccatcttcgccggcggcctcgacttctccgggcccacacagcgctacctggtcgacccgattaccggcaagacgttcgtgaacgccgtggtgtctctcaccgggttcgcgctcgtcggggggccggcgaggcaggaccatcccaaggccattgccgcgctgcagaagctcgacgtgccgtacattgtcgcgctcccgctcgtgttccagaccacggaggagtggctcaacagcaccttggggcttcacccaattcaggtggcgctgcaggtcgcgctgccggagctcgacggtgggatggagcccatcgtgttcgccggccgggaccccaggacagggaagtcacatgcattgcacaagagagtggagcagctctgcactagagccatcagatgggcagaactgaagaggaaaactaaggaggagaagagactggcgatcactgttttcagtttcccacctgacaagggcaacgtcgggactgcagcatatctgaacgtgttcagctccatttactctgtgctctcagacctcaagaaggacggctacaacgtggagggtcttccggacacacctgaagccctcatcgaggaggtgatccatgacaaggaagctcagttcaacagccccaacctgaatgttgcttaccgcatgaatgtgagggagtaccagtcgctgacctcctacgcctccttgctggaggagaactgggggaagccacctgggcacctcaactctgatggcgagaacctcctcgtctacgggaagcagtacggcaatgtcttcatcggggtgcagcccacctttgggtacgaaggtgatcccatgcggcttctcttctcaaagtctgccagccctcaccatggatttgcagcatactacacctttgtcgagaagatcttccaggccgatgctgttctgcactttggaacacacgggtccctcgagttcatgcctggcaagcaggttgggatgagtgacgcctgcttccctgacagcctcattggcaacatccccaacatctactactatgctgcaaacaacccatcagaggccacggtggccaagcgccggagctacgcgaacaccatcagctacctgaccccaccggccgagaacgccggcctctacaaggggctcaagcagctgtcagagctcatctcttcctaccagtctctcaaggacaccgggcgtggtcctcagattgtgagctccatcgtcagcactgcaaagcagtgcaacctcgacaaggatgtcccgctgcccgaggaaggggaggagctcccaccaaaggagcgtgaccttgtcgttgggaaggtgtacgccaagatcatggagatagagtcacggctccttccctgcggtctgcatgtcatcggcgagccgccgagtgccatcgaggcggtggccacgctggtgaacatagctgccctcgaccgccccgaggacggcataacctcgctgcccggcatacttgccgccacagtgggcagggacattgaagatgtgtacaggggaagtgacaagggcatactggctgacgtcgagcttctgaggcagatcactgaggcttcgcgcggcgccatcaccgccttcgttgagaagaccacaaacagcaaagggcaagtcgtcaatgttgccaacaacctcagcaagatacttggtttcggcctgtcggaaccatgggtgcagtacctgtccgcgaccaagttcgtcagagcggacagagagaagatgagggttctgtttgggttcttgggggagtgcctgaggctcgtcgtgcaagacaacgagctgggaagcttgaagcttgccctcgagggaagctacgtcgagcctggacctggcggcgacccgatccgtaacccgaaggtgctcccgacagggaagaacatccacgctctcgatccgcaggccatcccaaccacggctgccttgaagagcgccaagatcgtcgtggaccgtctcctggagaggcagaaggctgacaatggcggcaagtaccctgagacggtcgcacttgtcctgtggggcaccgataacatcaagacctatggtgagtcactagcccaggtgctgtggatgattggagttcggccagttgccgacaccttcggccgtgtcaaccgtgtggagcctgtcagccttgaggagcttggacgcccgaggatcgatgtcgtcgtcaattgctcgggtgttttcagagatcttttcatcaaccagatgaacctgctggacagggcagtgaagatggtggccgaactggacgagccagcagagatgaactacgtgcgcaagcacgcccaggagcaggcggaggagctcggcgtgtcgctaagggaggcggcgacaagggtgttctcgaacgcatcaggctcctactcgtccaacgtgaacctggcggtggagaacgcgtcatggaccgacgagaagcagctccaggacatgtacctgagccgcaagtccttcgcgttcgacagcgacgcccctggggcaggcatgaaggagaagcgcaaggcgttcgagctcgccctggcgacggcggacgccacgttccagaacctcgactcgtcggagatctcgctgacggacgtgagccactacttcgactcggacccgaccaagctcgtgcaggggctgcgcaaggacgggcgggcgccgtcctcgtacatagccgacaccaccacggcgaacgcccaggtgaggacgctgtcggagacggtgcgcctcgacgcgaggaccaagctgctgaaccccaagtggtacgaggggatgatgaagagcgggtacgagggggtcagggagatcgagaagcggctcaccaacaccgtcgggtggagcgccacgtctgggcaggtcgacaactgggtctacgaggaggccaactccacgttcatcgaggacgaggcgatgaggaagaggctcatggacaccaaccccaattcgttcaggaagttggtgcagaccttcctggaagccagtggcagaggctactgggagacaacggaggagaacctggacaggctcagggagctctattcggaggttgaagacaagattgaggggattgacaggtaaattgatttgccagatcggtcggccgatcggttccagcattcaacccataacgagcttggaactcttctgcctcattgggactcttgtacaatgtctgggtgtgtgatttatatatataaaaagttgtaacatgtaatactggaggatacaatctttaacaaagagggtggcggttgttccattcacagagactgagttacaaagatgcagtatatatgagcctcattttctgcctttg

SEQ ID NO: 99066 - DNA, 2379 bp, Zea Mays
ctctcctccccccggcaggcacaggtgaggaactcgagacgaccatgcggcgcgcgtccccgtaccactgactcgcgggccccggcacgtacgtgcagccgctgtcacgatcaccacgtcggagaggaacggtggccggacgccggacagcgagaccgaataaccatgtcgaggaggagagcgcaggaggaggaggaagacgacgaggatgtggtggagtcggtagagcgggtgttcgaggggcgggaggtgccggggtggcgggagcaggtgacggcgcgggcgctggcggtgagcgcgctcctgggcgccatgttcagcgtcatcgtcatgaagctgaacctcaccacggggatcatcccctcgctcaacgtctctgcgggtctcctcggcttcttcctcctcacctcctggaccaagctcctcgccaaggccgggctcaccggcgtcaggcccttcacccgccaggagaacaccgtcgtccagacctgcgtcgtcgcctgctctggcatcgcgttcagcggagggttcgggagctacatgttcgcgatgagtgagaggattagcgagcaatcgggggagacatgggatgcgcacaacatcaagaaccccggtctgggctggatgatcggtttcctcttcatcgtcagcttcctcggcctcttctccgtcgtgcctctcaggaagataatgatcatcgactacaagctcatctacccgagcggcaccgcgactgcccacctcatcaacagcttccacactccccagggcgccaagcttgccaagagacaggtgaagacgctggggaagttcttcgccggcagcttcacctggggcttcttccagtggttctacaccgccggcgagggctgcggcttcatgtccttccccacgctgggcctcgaggcctacaggcagaagttctttttcgacttctcggcgacgtacgtcggcgtcggtatgatctgcccttatctcgtcaacgcctccgttctccttggaggagtggtctcgtggggcatcatgtggccgctcatcgagcagaagaagggcgactggtacccggccgacctcaaacccagcagcctccgtggcatcgtcggctaccgggtcttcgtctccatcgcgctgatcctgggcgacggcctctacaacttcctcaaggttatgacgaggaccgtgaccgcactggtggtgcaggtgcgcagaatgatgtcggagccgacgctccccatctctggcggcggcggggaaggcggaggtatcccgctgccggcgccggaggagacgttcgacgacaggcgtcgcacggagctgttcctcaaggaccagatccccaacacgctggcgctgggcgcgtacctggtgatcgccgtggtgtccatcgtcacggtgccgcacatcttccaccagctgcggtggtaccacgtggcggcgtcctacgtggtcgcgcccgttctggccttctgcaacgcgtacggctgcgggctcacggactggtccctggccacgacgtacggcaagctggccatcttcacggtaggcgcctgggcggcggccaccgacgacagcggcggcggcggcgggggcatcatcgcgggtctggcggcgtgcggcgtgatgatcggcatcgtgtcgacggcgtcggacctgacgcaggacttcaagaccgggtacatgacgctggcgtcgccgcggtccatgttcgtgagccaggtgatcggcacggccatgggctgcgtggtggcgccgtccgtgttctggctcttctacaacgcgttccgcgacatcggcatgccggggtccgagtacccgtccccgaacgcgctggtgtaccgcaacatggccatcctgggggtccagggcctgggctccctgccccgccactgcctcgacctctgcatcgccttcttcgccgccgccatcgccatcaacctggcacgcgacctcgcgggcgcccgcgccgccgcctacatcccgctgcccatggccatggccatccccttctacctcggcccctacttcggtatcgacatgtgcatcggcagcctggtgcgcctcgtgtgggaccgcctggacccggccagggccaaggcgttcgcgccccccgtcgcgtcgggcctcatctgcggcgacggcatctggacgctgccgcagtccgtgctggccctcgccggcgtcaagccgcccatctgcatgaagttcctgtcccgcagcaccaacgtcaaggtcgacgctttcctccgcagctagctcctagcgagctacctctacctcctgatggagcaggagactcaagacctgctgcttgctgatctgacaccaccagcagcaagcaacacacagcacagtgctctgctgctgctctggctgctgttg

SEQ ID NO: 99067 - DNA, 2119 bp, Zea Mays
gaaaggctcgatctggcaggtgcatgttatctgaagcactttttcatgtatgtcctgctcctgtccacgttgcccaacgcttcaaaatatctaccacgccacctctaatacaggagtacacacacacaaagcaaacaagctgaaatatctgcagaaaaataaccggccagccctggagctgcttctcggctcttccaacatcccgtacctgccaccgttcagttcagtcttcagttatccgctgccactgccaggcgaccaacaagtgaccgtggatcaggcatgcctgcgcttctcgtgaacaccgtctcggtctcccccgccgcctcaaggctaggctcctcgcggcccgccacggcacggcgagcagcaagcgcccgccacggccacaggtgccgagccgaagcatccggcagctcgtgggtgtcggactacgacctgtacgagctgctgggcgtggagcggtcctcgccgcagtcggagatcaaggcggcgtaccggtcgctgcagaagcggtgccacccggacgtggccggcgccgccggcggccacgacatggccgtcgtcctcaacgaggtgtacgcgctgctctccgacccggacgcgcgcctggcctacgaccaggagcaggcgcgccgctccgagttcgccggctacacgggccgcccgctatactcctcctgggtcggcgccgagtccgagcgccgggcggtgttcgtcgacgaggtgcgctgcgtcggctgcctcaagtgcgcgctccacgcgtcccggaccttcgccgtcgagtccgtctacggccgcgcccgcgccgtcgcacagtgggccgacgacgaggacaggatcgtcgacgccatcaacacctgccccgtcgactgcatctcgatggtggagaggtcggacctggcggctctcgagttcttgatgtccaagcaaccgcgcggcagagtccgcgtctccgaaggcaacgcggtgggagctcgcgcgcccaacatcttcaacgaagtcgccaagttcaagaaaaggttcgatgagatgaagcagaaatctgcggccagagaattccaggagtcggaggcggcacggcagtcgaggacttcagcagtccacgccatcagatccatgtcgaactggtggtactggcggccattcgggttcgggccatcggccccggtcaccattgtcctcgcttcgcgcctcctgccgccgccgccggcggcacccgctgaccccgtgacggagaggctccaagaagcagccgccgcccggcgcaagacgggaggcgcggccacggcgcacgcagggcgcgaagactactggaccccgcagctgaacctgccgtcgtcagcttctccgccgagcattcaccagaggggaaggggcactcccactccccaaggccacggccgcaggcgaggagcagccggtgaagcgaccgtcgccgggaggaagggcataagcatcgacctgacggcgccgctgctattggggatcgtcgcggcggggttcgtgagttacaacggggagcaggtggccggaggtggcagcggcattcaggagcatgttggcggcgccatcgctcttggagtcgtcaacagctttgaaatgaaggtcgttctggccggggtgacttggtccatcatcggcgcagccattgccggtgtgattcaggtactcggaagaagggaagaggacatttggaaatgaagatacttgtcgaatccgtgtgtgtgtatatacacagaaaattgtgtacatatgtaatcctgcacaaatatgggtggctggctgttttatagaatcacttggggtagctcatgcgggcctagaaaaggtagaaaaagtcggaactccttgtcaccctacatcccaaaagaatttgcagttctaacataataatttgcggtgctaaatgactcagcatagagatatttttatttatattattttatgttataaatatctagaaaactgtatttctagggggggggggggggacaaaagatcttatactttagaaaaagacagaggaaacacgtaaagtctaaaaagcaagcaaggacagatctgcggttacgccccacctaaatcagggtcactgacgcaattgcctctagaaaaa

SEQ ID NO: 99068 - DNA, 129 bp, Zea Mays
atggagagaaacaatggtaaagatgtgccataccctggaggttttccatattctgtggatgagataaggcacgggaagggcgggaaggagcacagattcgtaaacatattgtcttatctcacaatgtaa

SEQ ID NO: 99069 - DNA, 1886 bp, Zea Mays
atgaaaaactgggccgatacactgagacacgcgcaatatcatagaaatggttatgtgggccctctccttgtgcagttctgcacttctgcttgctccccacgcggccacgccgaacgggaatccggctcatcagcccctgcaccagcatcagcatcagcgccgccgccgccgccgccctcctcgcgctcttcacagtcctcccgcccttcccgcgcctggtctcccctcgcgttcccgatgtcatcttccaccgcactcgcgtggcgacgcaccctccgcaacgccctacttcgcggcttcccgcggcgcggcgcggcgcccgagcggtacgccagcacggcctccgcgtccggcgcggccgccgatgctgcagctgcagccgcgccgaagaaggtgcccccgtcaccccgcaagggaaggcttttaactggggccatgatagcgttggccattggtggaggtgcttatgtgagtactacagatgaaggaaagttttgcggatggttattcaagtcaacagaacttgtgaacccactctttgcactgttggatgcagagtttgctcatagtttagctgttaaagcggctgcccatggatttgttccaagagaaaagagacctgatccatcagttcttggggttgaggtttggggaaggaagttttcaaacccaatcggtcttgctgctggctttgataaaaatgctgaggcagttgaaggtctcttaggcctgggatttggctttgtggaagttggctctgtgacacctcttcctcaagagggaaatcccaagcctcgaattttcagattaaaggagcatggtgctgtaatcaaccgatgcggattcaacagtgaaggaattgtagttgttgctaagcgtcttggggcacaacatggcaagaggaagatggaagaaacttcaagctccacgcttccctcaaccagcgacataaagcaaggaggaaaagcaggacctggaatcttgggagtcaatcttggcaagaacaagactagtgaagatgctgctgctgattatgtgcaaggggttcatacattgtcacaatatgctgattacttggtcataaatatttcttccccaaatactcctggtcttcgcaaattacaaggtagaaaacaactgaaagatcttgtgaagaaggtgcaagctgcacgggatgagatgcagtgggctgaagatggacctccaccattgctcgtgaagattgcaccagacttgtctaagcaggatcttgaggatattgctgcggttgctcttgctcttaggttggatggcctgattatatcaaacaccacagtttccagaccatcacctgcagataaacatccattggctcaggaaactggtggattaagtgggaagcctttgttggacttatctactaacattctcagggacatgtatatgcttacacggggcaagattcccctcataggctgtggtggcgtgagtagcggtgaggatgcatacaagaagatccgttccggagctacacttgttcaactttatactgctcttgcatatggtggtccagctcttatacccagaataaaggctgagctagcagaatgtttggaaagagacggtttcaaatctgtgcaggaagcagtcggcgctgatttccgatgatccctggcggatcgctgagaaggtctgaataaccgttccgttaaagttcatgtgattttgatgagaagcaagcaactttttttttgtgtgtgggcacgatgcttgccaattccatttgaccggtacttgaaaagaaataccgggttgaaactttgctgggggtgagttgagtaatgagcggctgtatcacgcgcgcgtacatgagcttttggttcttcttttcctggggttcacgtgtg

SEQ ID NO: 99070 - DNA, 974 bp, Zea Mays
gcccgtgtccaccgcgtcctctcctgcccgtcgctcacgccgccaacactaccaggctaccagctcagctcgcgctcgtccggccgcctcctttcgcctgccagcacccaccatgccacacggccacaggggcatgcagcccgccacgacggtgctcgcggtgaaggcggccctggcgctggccgcggccgcgtccctggcgcgcctcgcagtcccgcgcctcgcgtccgcggccggcgccgtgctcccgcgcgtctgggccgccgcgcgcctctgcctcgtcccgccctacctcttcgtcaccgtgcacctcatcatcctcgtcatctggaagctgtcctccgaccacagccacgtccacgtccaccatcagcccggcgcgccgccatcgcccgctgcccacgcccgcgccgcggaggtgccggtgccgcccgtcaaggccaaggccaagcaggaggaggactgcgaggatctgcaggccgagttctcccccacgggctccggcggcggcggcagcgagtcctgcgtcaccacggagtccgacgaggacgcctcctcctccgccctcctggagcgggagcgggagccctcgcttgacggcgacgccgaccacgacctcgacgccacgtggaacgccatcatgcggaggacgcgccccgctcccgctgctcctgctcccgcgcagcaccagcaccagcaccaccaccaccaaccgccgagaacccgggacccgtcggtcggcgcggaggagatgaaccgccgcttcgacgacttcatcgagaagaaccgcaactccttcggccggcggtagctaggcctaggcgacctcccgacccgatcgatccagcctcgccgccgtacgatacatacgtacatagcacaagacgcatgcatctttggttgtggttgtttttttcttctctttttcatcttggtgtacatagcacaaggcacaagtaatttatatcttacct

SEQ ID NO: 99071 - DNA, 312 bp, Zea Mays
atgacgatgttggaggtgccaggcagctcgagcggccacgcgtcgagcatgatcttgacggcgtcgaagatgtcgagatcgtgcagccgcactgtagacactggcggcgcggagcagctcggcaacctctgcctcgatgagatcgtcctacgtcctggtgtttcctttgatgatcacgtcgtggacgcggatgcccacaggtccaatgacagccgccgttgcacagactacatccgctctcgctctgccgccgacagaaatgttttcactgctgctgcaattaatcagatattcttggggaaatgctggtga

SEQ ID NO: 99072 - DNA, 660 bp, Zea Mays
ctatctcatttggtgctggcttttttctggttcttattgggtggccctttcttggcatgctcttagaagcatatggctttgttgtactcttcagtggattttggccaacccttgttgttttcctccaaaggattcctatcattggatggatttttcaacaactgtttgtcacaccgttcctagaccgctacagaggaaaacgagttccggtttagcttactcctgctatatttcaacatacttccctcacaaatatcatgtggttatggatatgttccgtccttgcctttttctttaacttgtttagttggtggcaggattttttgtgtatattacccctcatccgtggttttccacagaccagaatgcattttctccgttaatacattgaagaaagttctcgtgcaagcctctttgtgggggaaaatgaagtcttagggatgttctgaaagtagtgactacccatcatgtcttttgtaacattacttaatgtaagcatatctgatataggtatgcaaaggctccaatagcttccgtttgctatatgggaaagaaaggagacttggcagaatcgaagttacttgtgattcttgtaacgccatgtgattattttcttcagtaatcccccttccaggcctagtatgggaactcagctttgag

SEQ ID NO: 99073 - DNA, 2382 bp, Zea Mays
ccatccgtccacggaaagggaaagacatgcatcccagtccggcggccaccacggatgggtctctttgatcgcctcctcctcggcggcggcgatcgcagcagggggacggaggaccaggagcgcggcggcgccgaggcggccgccatggggtcagacgtgccgccgccgtcggccatccctcccctctcagccgccgcggcctccgtcgttcgccagtgcgcccggatcgcgggcgtgccggtggaccagctcctccggcgggtggacgcggaggagcaggcccgcgggccgctggagtacgccaggagcgtcgtggagtactgctcccacgtcgccctgcgcgtggaggccaggcgcccggaccacctcggcgacagggagttccacacgctcacctacgacatgatgctcgcctgggaggcgcccgacgaggagaccgacgccgtgttccagaaaacggcattcagtgttctccgtggagacgacgcggacgacgacgacagtgggtccatcttctattcaagcccgacgcagatggccattcaggtcgatggcaggcggacagttggacccgaggcatttgccaagattgctcctgcatgccctgccatggcacaccccatcaccgtccgtaacctgttcgacgcgatcaccaactccaccggaggacggctgcatttccttatctaccacaagtatctcagaatcctgaacgaggcgttctgctctgcgaagcgtgtgctaggggggcacagagccccagccctccagctctccgacgacgaagtgatccttgacatccacggcgctgcgacgaccaagccagttctccagcacatcggcacgtccacatggcctgggaggctcacgctgacgaaccacgcgctctacttcgaggctatcggcgtcgatttctcgtatggagaggccgtcgtgtatgatctggcaagggacttgaaacagtcggtgaaacgagagtccactgggccatggggtgctcacctcttcgacaaagctgtcatgtacaagtccagcctgactgaacccgtgttctttgaattcccacaattcaaaggccacacccgccgagactactggtttgcggccatcaaagaggtgctgcacgcacacaagttcatcaggaagtacaagctcgccggtttccagaaggcggaggcgctctccgtcgcaacgctagggattctgcggtaccgcaccgtgaaagaggggttccacatactgccggcgcatttcaagaccatcctcgccttcaacctggcggagaaactgcccaagggggacaagattctggaggcactgtatggccagctcaagcagcactgcccgaggttcagaggaggccaggatcttggccagagcagttccgaggaactgatgcttgctgaccccttcccgctctctgcgtataccatggtgacgatgggtttgctgaagctgaaagaggaggacaacgccgaggagagggatttcgctgtgcgtgacgtgcagattggagggactagctcagttcagatggctctagagcgttcggttgggtattcgggtagagtggaagcggcaagggctacgcttgatcaggtcagagtggaagacatagacactaatgtagctgtcctaaaggaactactatttcctctgattgaaataggcaaaaggttgctcgctttgtctgggtgggaagagcccttcaagtcttatgtcttcttgttatgtttcctctacatggcttacagtggttggatctggctcatgtttcctggcttcttgcttggctctactatcttcatgctatggaacaaacactataggcatgggcgctcggtaggagcgtttgagatcataactcctcctcgaagaagaaccgtggaacagctcttagctctgcaacaggccatctcgcagctggaagcgcacgtgcaagcaggaaacatttttctcctgaagctccggtccctcatgcttgcagcgtttcctcagagcaccaacagagttgcagctgcactggttgctgtggctgcgatattcacgttcgtgcccttgaggaccatcgttctactaatccttctagaagaatacacaagacagatgccggtgaggaagaagagcagtgagaagctggtgaggagattgcgggagtggtggctccggatcccggctgcgcctgtacagcttgtaaagcctcgggagacgaggagatggagatccaggttgagatgagataagtaagccaaaaaatgttggtttgtttgcttttagttttacaccatgttccgtgcacattctttgagcggtagggatcttggtatcacgccttcaagtgaaagcaagaccttggtgtaagctgggactggttttaacaag

SEQ ID NO: 99074 - DNA, 2403 bp, Zea Mays
ccatccgtccacggaaagggaaagacatgcatcccagtccggcggccaccacggatgggtctctttgatcgcctcctcctcggcggcggcgatcgcagcagggggacggaggaccaggagcgcggcggcgccgaggcggccgccatggggtcagacgtgccgccgccgtcggccatccctcccctctcagccgccgcggcctccgtcgttcgccagtgcgcccggatcgcgggcgtgccggtggaccagctcctccggcgggtggacgcggaggagcaggcccgcgggccgctggagtacgccaggagcgtcgtggagtactgctcccacgtcgccctgcgcgtggaggccaggcgcccggaccacctcggcgacagggagttccacacgctcacctacgacatgatgctcgcctgggaggcgcccgacgaggagaccgacgccgtgttccagaaaacggcattcagtgttctccgtggagacgacgcggacgacgacgacagtgggtccatcttctattcaagcccgacgcagatggccattcaggtcgatggcaggcggacagttggacccgaggcatttgccaagattgctcctgcatgccctgccatggcacaccccatcaccgtccgtaacctgttcgacgcgatcaccaactccaccggaggacggctgcatttccttatctaccacaagtatctcagaatcctgaacgaggcgttctgctctgcgaagcgtgtgctaggggggcacagagccccagccctccagctctccgacgacgaagtgatccttgacatccacggcgctgcgacgaccaagccagttctccagcacatcggcacgtccacatggcctgggaggctcacgctgacgaaccacgcgctctacttcgaggctatcggcgtcgatttctcgtatggagaggccgtcgtgtatgatctggcaagggacttgaaacagtcggtgaaacgagagtccactgggccatggggtgctcacctcttcgacaaagctgtcatgtacaagtccagcctgacaagtgaacccgtgttctttgaattcccacaattcaaaggccacacccgccgagactactggtttgcggccatcaaagaggtgctgcacgcacacaagttcatcaggaagtacaagctcgccggtttccagaaggcggaggcgctctccgtcgcaacgctagggattctgcggtaccgcaccgtgaaagaggggttccacatactgccggcgcatttcaagaccatcctcgccttcaacctggcggagaaactgcccaagggggacaagattctggaggcactgtatggccagctcaagcagcactgcccgaggttcagaggaggccaggatcttggccagagcagttccgaggaactgatgcttgctgaccccttcccgctctctgcgtataccatggtgacgatgggtttgctgaagctgaaagaggaggacaacgccgaggagagggatttcgctgtgcgtgacgtgcagattggagggactagctcagttcagatggctctagagcgttcggttgggtattcgggtagagtggaagcggcaagggctacgcttgatcaggtcagagtggaagacatagacactaatgtagctgtcctaaaggaactactatttcctctgattgaaataggcaaaaggttgctcgctttgtctgggtgggaagagcccttcaagtcttatgtcttcttgttatgtttcctctacatggcttacagtggttggatctggctcatgtttcctggcttcttgcttggctctactatcttcatgctatggaacaaacactataggcatgggcgctcggtaggagcgtttgagatcataactcctcctcgaagaagaaccgtggaacagctcttagctctgcaacaggccatctcgcagctggaagcgcacgtgcaagcaggaaacatttttctcctgaagctccggtccctcatgcttgcagcgtttcctcagagcaccaacagagttgcagctgcactggttgctgtggctgcgatattcacgttcgtgcccttgaggaccatcgttctactaatccttctagaagaatacacaagacagatgccggtgaggaagaagagcagtgagaagctggtgaggagattgcgggagtggtggctccggatcccggctgcgcctgtacagcttgtaaagcctcgggagacgaggagatggagatccaggttgagatgagataagtaagccaaaaaatgttggtttgtttgcttttagttttacaccatgttccgtgcacattctttgagcggtagggatcttggtatcacgccttcaagtgaaagcaagaccttggtgtaagctgggactggttttaacaagcagaaacagatgaagaaa

SEQ ID NO: 99075 - DNA, 782 bp, Zea Mays
actcacagctcaaaagcagccaaaacgctagctagctgcagcgatgatgtctcgctcctgctacctcgccgtgtcggtccttctcgcggtcgccgcgacagccagcggcgccatcgcgccggcgttgctgcacgaggtgcgcctcgaggaggagggcctgctggtcgcggagggcgcgagggtggcgtccacctgggcgggcaacaaggtctcgcgggcgcagccgatggaggcgtggccgagcggcggcgtggccacgcagggcgacgaccagagctcgtcgggcggcggcgagcacgccaaggaggaggggagcagcaaggagggcgagaagcagggcaggagctgcctcaccaaggaggagtgccacaagaagaaggtgctctgcggcaaggcctgcacgctctcggcgcacagcaagtgcgccgccaagtgcaccaagtcctgtgtccctacctgctaggacccgccgacgaggaagctagtttctgtgatgcaattgccaagatgattggaataaggacgggtacttcttgcatgcatgcctctggtctagggtgccatttggtttttgtctgcataatggtttgtgtaaggtactgttgtttaacatgccacactaccagctgcctgcctaacaacagtacaaacacgtagatttttgccagatcagggaaaatggaaactcaccgaaaccagttcaaggcaacaccacatgatatcattttcactcaatgcagtgcatgacaaagggaggtactcagaagaagaaaagatattaa

SEQ ID NO: 99076 - DNA, 918 bp, Zea Mays
gcccatcgcccgtggttcggcctaatcctcctctctttactttgttcgtgagtgccgccgacgacgacggaggaaaagctaggggagctagcgagtgagcccagacatcctcctctaagattagcttttagctagcactagctagctagctcgatcatctgtcggtcggtccggcgcgcgcgagaccatggcgtccatcatcgtcatcgccgtcgtgctcgtcctggacgtcctcgccttcgtgctcgccatcggcgccgagcggcgccggagctacgccaacgtgaccgccgccgactcgtccgggcgtgcctactgcgtgtacagctccgacgcgtccacggcgtacggcgtgagcgcgctgctgctgctgctggccgcgcaggccgtggccatggccgccacccgctgcttctgctgcggccgcggtctctcgccgggccgctggcgggcatggtccggcacctgcttcatcatctgctgggtgacgttcgtgatcgcggagctgtgcctgctggcggggtcggtccggaacgcctaccacaccaagtacgtctcgctgttcagcaacgccccgccccggtgcgccgtgctgcggaggggagtcttcgccgccggcgccgccttcgccttcctcaccgcgctcctggccgagctgcactacctcttctacgccagggcgcgcgccgccgccgccgtgcccccgcccatcgtcggcggcatcggcatgacccgcatgtgatgtgactctgtattttgtggcagctgccccgccggcgcttggctgcgtgctttgtaccgtgtgttcatgccttccacggggcctttttggcgaacctgccgtgtgctctctgtgcttctcccagtccgatggcgaacctgccgtgtgctctgctcgcagcaggcaggcaagcagac

SEQ ID NO: 99077 - DNA, 2726 bp, Zea Mays
tccgctcgccgtttgggcgcgccccaccgctctggtctgctcgccgccgacagaccacagccccggcccgcgcgcgccttgggtgggtgccggtgccggagcgacggcaatgccggaggcggcgcgggcgcggggcctgcgggaaccggcgggcgagggggaggcggagcaggaggacgagttctacgagtcgctggatcggatcctctcctcctcctgctcctccgcctccgcctccgacgacgacgccgaccaccgccgccgccgcagcaggcgccaccacctcctccaccagcaccagcaccagcaccagccgctgtcctccgcgtacgacgtctggatctccgagccaacctccgtggaggagcgccgccgcctcctgctccagcgcctgggcctcgcctccgacccgccgcctcgccgctcgccgtcgcctcccgcgtctaccccggcgtcgccaccggcgcccccggaggagcccagatccggcgccgggctcgggagccccccgctgacgcggaaccccagctccagcggcggggagcagcaatgccggatccggaacctggacgacggcacggagttcgaggtcggggaggtgcacgaggaggaggtggtgcgggaggtgggcaccggccgccacctcaccttcgaggagttcgagctctgcgttggccgctccccgatcgtgcacgagctcatgaagcggaccaccaccgcggcgtccgcgtccgcctccaatcacgccgcgcccgcggccagcaagccccggaggaagcccgggggcgggtggctgcggggcatcaggcagctggcgggcaccgtcgcgtacgggaggcgcggcgccgacgatggggacaaggagaaggagaaggagaagaaggagagggaggcgcggcgcctcagctctgccaccgatgacagcctcgatggcgccggctcgcgcgatgtaaggagggtccaggtgcgacagtacgggaaggcgtgcaaggagctcaccgggctgttcatgacgcaggaattggctgcccactcgggctccgtgtggtgcatcaacttcagcctggatggacgataccttgccactgctggagaggatcgtgtgatccatgtttgggaggtgtctgagggagacagaaagggtgagttgctcggggaaggttcgctggcaaaggagaatggtggtggctgcagcccgtttctcacgtttcttgggaatgattcaccggagatcgctgcattgtcattcacctgcgctgacatggataagaagagaaggctgaggaagcagagcaatcggaagtctgtagggtctgatcatctggtcgttcctgagtgtgtgtttggtttcagagacaagccagtttgctcgcttctggggcatgccgctgatgttcttgatctgtcatggtccaaatctcagtacctgatctcatcctccatggacaaaactgttaagctctgggacatcactaccagtacctgtttaaaaacattctcacatacggactatgtgacttgcatccagttcaatcctgtggatgacaacttcttcattagtggatcactggatgagaaagttcggatttggagtgtccgtgaccgtaagattgaggattggaatgatcttcatgagatggttaccgctgcttgttattcccctgatggacaggttgcaatggtgggctctcacaagggatgctgtcatatatttgatacatctgagaagaagcttctgtacaaaagtcagatagatttaagaattaggaaaaagaaatctggccagaagaagataactggattccagtttgctcctggaagctcatcggaagttctgattacttctgcagattcaagaatacgtgttgttaacggcgatgaatttgttcacaagtttaaagggcttcggaacacgagtagccaaatctcagcttctgtagctccgaatgggaaatacatcatctgtgccagcgaggattctcacgtctatgtgtggagacatgacaacagttcccaccctagtaggaacaggatcacagttgatgtaaccaactcatatgagcatttccactgccatggcgtgaccgtggctgtcacatggcctggtgctgaagcccggggctcgtttggatctcgaagcagcaggcacagcgattcagatggagcagtgaactctggccgagacatcccagctgagaacagccagcacaattctgacgcaggcaccagtagacatccaggcgatagagcatccacatcctggcctgacgaaaagttaccgtcagccaagagcagccctggtcactgctcgtccgatctttgcattggagctatggatgtccagcgccggtctgcgtgggggttggtgattgtcacagctgggcggggaggcgagatcagggtgttccagaattttggcttcccggttcaagtgtaaagctagcgtgagtgagatcatgcagatagggtttgtttggttctttactgtatataccatcggtagatgtagattgccgacagttttacgaaaacttccctgtgtttctctgtctccttgggtgcttcaagattgtacccccagaaccacactatcatatagttagcaatatcacttgttgatacaatacacagagctctgtaactgtatgcttagcacacatcaacttaatttgttctcatcatgtatttttctacacacagtgatgtacaaaatgaaaatatttttc

SEQ ID NO: 99078 - DNA, 1338 bp, Zea Mays
ggaaacagttagtacaagttattggccaccactgtcagaaaacagctaataatttacacctcctgcagtacctgatctcatcctccatggacaaaactgttaagctctgggacatcactaccagtacctgtttaaaaacattctcacatacggactatgtgacttgcatccagttcaatcctgtggatgacaacttcttcattagtggatcactggatgagaaagttcggatttggagtgtccgtgaccgtaagattgaggattggaatgatcttcatgagatggttaccgctgcttgttattcccctgatggacaggttgcaatggtgggctctcacaagggatgctgtcatatatttgatacatctgagaagaagcttctgtacaaaagtcagatagatttaagaattaggaaaaagaaatctggccagaagaagataactggattccagtttgctcctggaagctcatcggaagttctgattacttctgcagattcaagaatacgtgttgttaacggcgatgaatttgttcacaagtttaaagggcttcggaacacgagtagccaaatctcagcttctgtagctccgaatgggaaatacatcatctgtgccagcgaggattctcacgtctatgtgtggagacatgacaacagttcccaccctagtaggaacaggatcacagttgatgtaaccaactcatatgagcatttccactgccatggcgtgaccgtggctgtcacatggcctggtgctgaagcccggggctcgtttggatctcgaagcagcaggcacagcgattcagatggagcagtgaactctggccgagacatcccagctgagaacagccagcacaattctgacgcaggcaccagtagacatccaggcgatagagcatccacatcctggcctgacgaaaagttaccgtcagccaagagcagccctggtcactgctcgtccgatctttgcattggagctatggatgtccagcgccggtctgcgtgggggttggtgattgtcacagctgggcggggaggcgagatcagggtgttccagaattttggcttcccggttcaagtgtaaagctagcgtgagtgagatcatgcagatagggtttgtttggttctttactgtatataccatcggtagatgtagattgccgacagttttacgaaaacttccctgtgtttctctgtctccttgggtgcttcaagattgtacccccagaaccacactatcatatagttagcaatatcacttgttgatacaatacacagagctctgtaactgtatgcttagcacacatcaacttaatttgttctcatcatgtatttttcta

SEQ ID NO: 99079 - DNA, 84 bp, Zea Mays
tggtgtgtctcgagcggaggggtcgttggttgcattgcacacatggggactggagtggggaggggaggccgccgccggaccgga

SEQ ID NO: 99080 - DNA, 1164 bp, Zea Mays
gtcgattcgagttccgctcgccttcgtcttcgtctcgacccacggcccacggcccacggtccatcagcgttcgtcctcccttcctctagcgcctgctgcctctctcactccatggcgtggatctggatggtcctcgcggcgggagccgtgctcctgtgggcgatctctttggggcgggtcctctcctccgccgcgccgtcctgtgtgccctcgagcccgcagttcatgccccctctcagcggtgacaggaggagccggaacgtgctgctggtcgtcgcccaccccgacgacgagtccatgttcttcgctccaaccattcttttcctcaagtcgaaaggccacagtattcacattctgtgcatgtctcgaggtaatgctgatggtctgggagatactcgtaaggaagaattgtaccacgcctgtgtcagcctcaagattccacatgaacaagtcaaagtcttggaccacccaaaattgcaggatggatttcatgagaaatgggaccatggactagtagcagaacttaccatggagcatgtccaactgtgggccattgacacgattgttacatttgattcatatggagtatcaggtcatccaaaccacaaagatgttcatcacggcatatgcaagtttctccatacgaacaggcaagggaacgtggaagcttgggaactagcaagtctcagtattcttcgcaagtacagtggtccgattgacatttggctttcttcattgacgtccttcgcatggacaaaacagccaatctatactctagttaacagtagcccgtccagaagctatgaggcaatggctgcacacagaagtcagtgggtttggtttagaagattgtttgtcatgttctcgagttatacatacataaatatgctacggagaatttaacatgtgatgtggcgtcataccatgataccagagcaagccgccattgtcgtctccaatgttgtacttgtgcatcgtcaattgtacatctatatgtatcactggattttagttgtacattctctatagacagtgctcatagggtgactgtagaatttcttttccccaatccagaattgcactgaatggctgaaatacagttgtctttcaaaagaaactgaaatacagtgatgctcactggcttagcttatgggtatggtcaaa

SEQ ID NO: 99081 - DNA, 1336 bp, Zea Mays
cacacaaatgcgcccgcacccgccaacgccaccaccagtgacaagtcaagtccaccaggccgggccgcgaatctctgcgtccccttcgccaaccatggcctccttcttcgccgacgacggcaccgatgacctcccacgcaccacttcccaccccttcgactccgatgacttcggcgccgccgcggccgacgtcgccgccgccgacggatacggcgggtacgcctctttcgccgaggggggtgtcgaggaggtggacgaggagatcaccgtcgagtccgatggggtcccgatccgccacgtctccggggggtactcgccctcgccgttctcccccgagctcgagcccaacggcggcgacggcccgatcctaccgccgcccaccgagatggggcgggacgagggaatcctcctccgcgagtggcggagaaaaaatgctatggaacttgagaaaaaagaacagaaggagagggagctacgtgcccaaataattgctgaagccgaagaattcaagaaagccttttttgagaagaggatacagaactgtgcgtcaaacatggtgaacaacagagagagggagaagatttttgtagccagccaggagaaattccacgccggcgcagacaagcagtactggaaatcgatttcagatctcatcccacatgaaatagccaccatcgagaagcgggggaagaaagacaaggacaagaagccatccatcacagttgtccagggccccaagcctggcaagcccaccgacctgtcccggatgcgccatatcttggtgaagctgaagcatgctccgccgccacatatgttgcagcctccaccaccagcacctgctgctaaagagggcacaaaggatggcagcgccaaaggtggtggaaaggacggcgccaaagaaggcggcgcggcagccccagcaaacggcgccaagcagcctgctgagagccaagaaaccaccgccaatggcccctcggaggcggagaaagagcagcctgcagcctcggagtgaccggaaagggtgtctttattaagacatacacaagagccttaactgtcagtagatggaaaagcgtgttttatttcagataatttccagactcgtctttcccgcgctgctgatctttttgtagaggagatctgcatccggatgtctttacatcatagcgcagaacattcatgattgtatcaccacagcagttgtatgtttactgctttcccccttgcccaagtgttgccttcactgagatgctgcctgtgatatcaagttcagacctgaaactgttactgagagttcgactgaataatactcctatgatatgtcaccgcgctaata

SEQ ID NO: 99082 - DNA, 1310 bp, Zea Mays
ttgtttattttatggtttagtgcatgcctacatttactttcggaatttacttttgtagttaattaatagaagttcatgaatattggagttgcgctgtgtcataatttaaggtgtgttcggtatgatctgcttcatcaggacattatccctggctcaaagcagtagtagatttgtatgttcggcgattttgatttaatgcttatattgtggaaagtccactaaagtcaatttgtaaggagtctgagggtgctctggtgcagaccaatttcctgtcctggtttttaatgccctcaaatcgaacaatgacattttcttattttcctgtcactctagttttaatctggtgttgttgttgtttcctttttcaacaacgtcttagaaaaaatgctatggaacttgagaaaaaagaacagaaggagagggagctacgtgcccaaataattgctgaagccgaagaattcaagaaagccttttttgagaagaggatacagaactgtgcgtcaaacatggtgaacaacagagagagggagaagatttttgtagccagccaggagaaattccacgccggcgcagacaagcagtactggaaatcgatttcagatctcatcccacatgaaatagccaccatcgagaagcgggggaagaaagacaaggacaagaagccatccatcacagttgtccagggccccaagcctggcaagcccaccgacctgtcccggatgcgccatatcttggtgaagctgaagcatgctccgccgccacatatgttgcagcctccaccaccagcacctgctgctaaagagggcacaaaggatggcagcgccaaaggtggtggaaaggacggcgccaaagaaggcggcgcggcagccccagcaaacggcgccaagcagcctgctgagagccaagaaaccaccgccaatggcccctcggaggcggagaaagagcagcctgcagcctcggagtgaccggaaagggtgtctttattaagacatacacaagagccttaactgtcagtagatggaaaagcgtgttttatttcagataatttccagactcgtctttcccgcgctgctgatctttttgtagaggagatctgcatccggatgtctttacatcatagcgcagaacattcatgattgtatcaccacagcagttgtatgtttactgctttcccccttgcccaagtgttgccttcactgagatgctgcctgtgatatcaagttcagacctgaaactgttactgagagttcgactgaataatactcctatgatatgtcaccgcgctaatacgacagtaatctcaagatgtg

SEQ ID NO: 99083 - DNA, 1301 bp, Zea Mays
acccacgcaacgaatacaatacaaacagagggaagggagcgagcgggaagccaaggtggggaaagcagggaagcgaggccaagtggagcggagcggggcttcggctgggttccgcgcgcggccgctcgctacttccagtgttccatggtgtgggtgtgggcggctgtggcgatagccggagcctgaagcggcgggtggtgtgtggtgggcgcaaggagccacacggagcaggccgccacggcgaggaggaggaggaagaggaggagatggtcgtctgctccacgcgcaagtcgttcaaggactcgctcaaggtgctcgaggccgacatccagcacgccaacacccttgcagcggatttctcgagggactacgacggggcctgcctccagatgcgcatgtcctacagccccgccgcccacttcttcctcttcctcgtgcagtggaccgactgcagcctagccggcgcgctcgggctgctcaggatcctaatctacaaggtttatgtagatgggagtaccaccatgtcgacgcacgagaggaaagcgagcatcagggagttttatgctgttatctttccctccctgatgcaactgcccaaggggatcagcgacgtggacgaccggaggcagaaggcggcgtgcacggagaggtaccggaggagggacgaggacgagggcaagaggccggtttcggaggccgacatcgaaagggaggaagagtgcggcatctgcatggagatgaacggcaaggtggtgctgcccagctgcagccatgccatgtgcatcaagtgctaccgccaatggcgatcaagatcgcaatcctgccccttctgtcgggacagcctgaaacgagtgaactccggggacctgtggatgctcaccgactgccgggacgtggtcgacatggcgacggtgacgagggagaacatcaggcgtctgttcatgtacgtcgagaagctgcccctcgtcgccccggacaacatcttctacgcctacgattctcatgtaaaatagctggagctagctgtagtgtagcagcacaccatctgtgctgtgctgtgctgtgctgtgttgtgttctgagagtgatgacgcatgatttatcgattattcatgcagaggggtagagggtgttcctcgtcctagctaggacgtggctaaacgcttggaccggggtgcggactctgacgacagacctttttcagtctatctaactgggtgtacagtctgctcaggtcctgtaaatataatgtctgtgcatatttatggcttcaaatgccccgttgtttttcagctggatata

SEQ ID NO: 99084 - DNA, 1314 bp, Zea Mays
acccacgcaacgaatacaatacaaacagagggaagggagcgagcgggaagccaaggtggggaaagcagggaagcgaggccaagtggagcggagcggggcttcggctgggttccgcgcgcggccgctcgctacttccagtgttccatggtgtgggtgtgggcggctgtggcgatagccggagcctgaagcggcgggtggtgtgtggtgggcgcaaggagccacacggagcaggccgccacggcgaggaggaggaggaagaggaggagatggtcgtctgctccacgcgcaagtcgttcaaggactcgctcaaggtgctcgaggccgacatccagcacgccaacacccttgcagcggatttctcgagggactacgacggggcctgcctccagatgcgcatgtcctacagccccgccgcccacttcttcctcttcctcgtgcagtggaccgactgcagcctagccggcgcgctcgggctgctcaggatcctaatctacaagcttcgttgtgcaggtttatgtagatgggagtaccaccatgtcgacgcacgagaggaaagcgagcatcagggagttttatgctgttatctttccctccctgatgcaactgcccaaggggatcagcgacgtggacgaccggaggcagaaggcggcgtgcacggagaggtaccggaggagggacgaggacgagggcaagaggccggtttcggaggccgacatcgaaagggaggaagagtgcggcatctgcatggagatgaacggcaaggtggtgctgcccagctgcagccatgccatgtgcatcaagtgctaccgccaatggcgatcaagatcgcaatcctgccccttctgtcgggacagcctgaaacgagtgaactccggggacctgtggatgctcaccgactgccgggacgtggtcgacatggcgacggtgacgagggagaacatcaggcgtctgttcatgtacgtcgagaagctgcccctcgtcgccccggacaacatcttctacgcctacgattctcatgtaaaatagctggagctagctgtagtgtagcagcacaccatctgtgctgtgctgtgctgtgctgtgttgtgttctgagagtgatgacgcatgatttatcgattattcatgcagaggggtagagggtgttcctcgtcctagctaggacgtggctaaacgcttggaccggggtgcggactctgacgacagacctttttcagtctatctaactgggtgtacagtctgctcaggtcctgtaaatataatgtctgtgcatatttatggcttcaaatgccccgttgtttttcagctggatata

SEQ ID NO: 99085 - DNA, 1527 bp, Zea Mays
acccacgcaacgaatacaatacaaacagagggaagggagcgagcgggaagccaaggtggggaaagcagggaagcgaggccaagtggagcggagcggggcttcggctgggttccgcgcgcggccgctcgctacttccagtgttccatggtgtgggtgtgggcggctgtggcgatagccggagcctgaagcggcgggtggtgtgtggtgggcgcaaggagccacacggagcaggccgccacggcgaggaggaggaggaagaggaggagatggtcgtctgctccacgcgcaagtcgttcaaggactcgctcaaggtgctcgaggccgacatccagcacgccaacaccctgtgagtgcccccggccccgtttccatcccggccgccccgaattcacgctcgccgcagctgccgcctgccgcagatcgatctccgcgggctccgcccgccccgattccatcctgaccgaaaccggggcggcgaaataaagttgctccagtgggtgggtggggtgggtatgctacagtggcggttgagctctcatgtcatgtcatgtcgtgtcacgccgcgcgcatgagcgagcggtgggcgccgacgatcgggctggcacaccacctgccttcctgacgcgtgccttccctcgtgctgactgctcgctcgctcaaacaactcgacagtgcagcggatttctcgagggactacgacggggcctgcctccagatgcgcatgtcctacagccccgccgcccacttcttcctcttcctcgtgcagtggaccgactgcagcctagccggcgcgctcgggctgctcaggatcctaatctacaagcttcgttgtgcaggtttatgtagatgggagtaccaccatgtcgacgcacgagaggaaagcgagcatcagggagttttatgctgttatctttccctccctgatgcaactgcccaaggggatcagcgacgtggacgaccggaggcagaaggcggcgtgcacggagaggtaccggaggagggacgaggacgagggcaagaggccggtttcggaggccgacatcgaaagggaggaagagtgcggcatctgcatggagatgaacggcaaggtggtgctgcccagctgcagccatgccatgtgcatcaagtgctaccgccaatggcgatcaagatcgcaatcctgccccttctgtcgggacagcctgaaacgagtgaactccggggacctgtggatgctcaccgactgccgggacgtggtcgacatggcgacggtgacgagggagaacatcaggcgtctgttcatgtacgtcgagaagctgcccctcgtcgccccggacaacatcttctacgcctacgattctcataggggtagagggtgttcctcgtcctagctaggacgtggctaaacgcttggaccggggtgcggactctgacgacagacctttttcagtctatctaactgggtgtacagtctgctcaggtcctgtaaatataatgtctgtgcatatttatggcttcaaatgccccgttgtttttcagctggatata

SEQ ID NO: 99086 - DNA, 1943 bp, Zea Mays
cacgggcagaaagggacgcgactcgtcagggcgattccgattacgagtagacgggcaggacaggacaagggaggaacggcggcggcggcgcagggcagggtaaaccatggcggcatcggccaagggacggctcgtgcccgtgctcgcggtggcggcggcgctcgcggccgtgctcctctaccgcgcgcccttctccaagagcttgggcggcgaagggtgcagcctcctcccgcacgaccacttctggatcgccagcgaccgcgtcgtcacgctcggacgcgtcggccccgccgcagtagaggtcaaaggagggctcatcaacgccatcgccgtcggggactaccggagcttcgtgctccgccgaccgctccttgactacggggacgccgtcatcatgcccggcctcatcgacgtgcatgcccatctggatgagcctggacgtgccgagtgggaaggcttctccaatggcacaagagcagctgcggcaggtgggataacgacgctggtggatatgccactcaacagcttcccgtcaacagtctctgaagaaactctcaaactgaagctggaagcagctcgggataagctatatgttgatgtggggttttggggaggccttgtgccagagaatgccttcaacccaagtgctttggagggcctcctaaaggcaggcgttttaggactcaagtcttttatgtgcccctcaggcatcaacgactttcccatgacaaattcaactcatatcgaagaaggattggttacactggcaaaatacaagagatctttacttatccatgcagaacgtatacctgaggctgaggatcatgatttgcaagaagatgaattagatcctcggtcctatatgacgtatctgaagtctagaccaccatcatgggaggaagcggctatcagagatctgcaacgtgcaatgaaggatacggagttggggggtcggtccgaaggagctcatattcacattgttcatctatcagatgcaaaaactagcttggaacttatgaaggatgctaaacgcagtggtgcaagtctgtctatagaaacatgccctcattacctggcattttcgtctgaagaagttccagatggagatactcgctttaaatgttctcctcccatacgtgatgacacaaacagagaaaatctttggaaagctctgcttgatggacacatagacatgctaagttcagaccactcaccatccactcctgacctcaaactaatggaggaaggcgactttttaagggcatggggaggcatatcatcattgcagtttgtcctcccggtgacatggtcatatgggcgaaagtatggcgttactctgaatcagctagcctcatggtggagcgaaaggccagccaagcttgcaggccaaaagaataagggagctattctaccaggataccatgctgacattgtagtatggaaacccgaaacagagtttcaacttgacaacaaccatgctatatatcataaacatcagaatatttcagcgtatttaggaaagcaactttctggtaaggtcctgtcgacttttgtgagaggaaatcttgtgtttgctgaagacaagcatgcaaatgctgcttgtggtgttcctatcctcgctaagtaacatacaggtggatccagaactgccattgttgatccgtagtgtatacaatcgtatgcacgtgtcaatttgtaggttgctctcctgtatataattgaactcattcatgtcattgttatatagtagcaatctatttatattggcacacattttgccttgatccctaattagactatcattagtttttttttctattgatattgtcagcattcgggagaaggcatactctccagaatgctaacaaaatatccgctgagacttcatcagtagaagataaactcatagtctgatgaaatagataagatggtggtatgacaca

SEQ ID NO: 99087 - DNA, 768 bp, Zea Mays
aagaataacacctcacaatggaagtggaatcatgatgctagacttctgaaaataaaggtgttttgcagattcaatgtgtttgcatcaaataaatttggcataactatttgtagtttgtcctcccggtgacatggtcatatgggcgaaagtatggcgttactctgaatcagctagcctcatggtggagcgaaaggccagccaagcttgcaggccaaaagaataagggagctattctaccaggataccatgctgacattgtagtatggaaacccgaaacagagtttcaacttgacaacaaccatgctatatatcataaacatcagaatatttcagcgtatttaggaaagcaactttctggtaaggtcctgtcgacttttgtgagaggaaatcttgtgtttgctgaagacaagcatgcaaatgctgcttgtggtgttcctatcctcgctaagtaacatacaggtggatccagaactgccattgttgatccgtagtgtatacaatcgtatgcacgtgtcaatttgtaggttgctctcctgtatataattgaactcattcatgtcattgttatatagtagcaatctatttatattggcacacattttgccttgatccctaattagactatcattagtttttttttctattgatattgtcagcattcgggagaaggcatactctccagaatgctaacaaaatatccgctgagacttcatcagtagaagataaactcatagtctgatgaaatagataagatggtggtatgacaca

SEQ ID NO: 99088 - DNA, 1460 bp, Zea Mays
cgtgggggtgctaccgtacaaatgcgtgccccgtagtaccgtacaaataaaatgcacgcgacggcgcaccggtgacttccttccgccgtgccacccaccctcctctcgcggtcgcgggggtagggccgggtgagcacgagcgctgcccgctcgctgaaccatggcgggctccgcggtggccgtcgtcctcctgtcggccgtcgcgctgctctgcctgtaccacctccttttcctctccctgtccgtcccggacccggcagcagcagcagccgtcccccgccgcgccggtggccaccatggcagcaacgttccgtccgggtcaggaaccgccaacgtcgtcctccgcttcggcctgtccgggcagccgctccgcctccacgaccccgcctccgccgccggcctcccggacatcgacaccttccgcggcaagctcgagcggctgcttcctcccgacgaccacgaccccggctggtcccgccgcttcgacgccgagctcggccccgtgcaccggtacttcggcccggacgcgccgctggacgtgcggcagcggatcgcgtacctgttcgcgatcctcgaccggtcgcccaggggcgtcggcgtcggcgtcggcgtcggcgagctggaggcctggctgcgctggcaggccgccgcccggctggacgccgtcacgcggagggagatggctccgcacgacacggaccgcgacggtgccgtcacgctgcgcgagttcttcgcagtttgcgagcgcggacagagacggggatggctcgctcaacgccgtcgaattcaacgacttcctgcatcctgaagacagcagccaagagagcgtgatgctgtggctactcaaggacaagctaagcgagatggaccatgacggagacggcaggctaagccaggaggagttcgtcgctcaatctcacatcatcatctccggcgcgcgtcacgccgacgacggtggccatgcccatgaccttgagcgtgccgaagctgcgaagaagttcacagaactggacgccgacaaggacaactacttgacggtggaagaagcgcgctgcgtactgcagagcctcgtcacgggggagttctcctatgctacctcacatgccaagttcttgatgaaggtggtggcctcatcgaatcgaacgaagctgatgtgaaccatgacggcaaactgtcgctggaggagatgctagacgactacatatccttctacagcaccgtgtatatggatgatcattacgccagtgaaggtgaagtagatagtgattcccgcgacgagctatgagcggttaagccaggacaggacagcaagtcggaggttctttactttcaaatacactaggattttgcagccaaaggaaatgggaaatgtacaatcagctgcaaacatcaattttgttcatcgagaccagctgcctatctattctacagtttctttatataaaaaaagctaaacatat

SEQ ID NO: 99089 - DNA, 1557 bp, Zea Mays
aaaatgcacgcgacggcgcaccggtgacttccttccgccgtgccacccaccctcctctcgcggtcgcgggggtagggccgggtgagcacgagcgctgcccgctcgctgaaccatggcgggctccgcggtggccgtcgtcctcctgtcggccgtcgcgctgctctgcctgtaccacctccttttcctctccctgtccgtcccggacccggcagcagcagcagccgtcccccgccgcgccggtggccaccatggcagcaacgttccgtccgggtcaggaaccgccaacgtcgtcctccgcttcggcctgtccgggcagccgctccgcctccacgaccccgcctccgccgccggcctcccggacatcgacaccttccgcggcaagctcgagcggctgcttcctcccgacgaccacgaccccggctggtcccgccgcttcgacgccgagctcggccccgtgcaccggtacttcggcccggacgcgccgctggacgtgcggcagcggatcgcgtacctgttcgcgatcctcgaccggtcgcccaggggcgtcggcgtcggcgtcggcgtcggcgagctggaggcctggctgcgctggcaggccgccgcccggctggacgccgtcacgcggagggagatggctccgcacgacacggaccgcgacggtgccgtcacgctgcgcgagttcttcgcaggtgagtgcgtgcgtacgtaacataagcctctcccgttcgtgattaggccattaaatgcctctcccgtgcgcacgacgatggatatatatatactaagactggatcaacatgggacatgacaaaatggggtggtggatgcacaagtttgcgagcgcggacagagacggggatggctcgctcaacgccgtcgaattcaacgacttcctgcatcctgaagacagcagccaagagagcgtgatgctgtggctactcaaggacaagctaagcgagatggaccatgacggagacggcaggctaagccaggaggagttcgtcgctcaatctcacatcatcatctccggcgcgcgtcacgccgacgacggtggccatgcccatgaccttgagcgtgccgaagctgcgaagaagttcacagaactggacgccgacaaggacaactacttgacggtggaagaagcgcgctgcgtactgcagagcctcgtcacgggggagttctcctatgctacctcacatgccaagttcttgatgaaggctgatgtgaaccatgacggcaaactgtcgctggaggagatgctagacgactacatatccttctacagcaccgtgtatatggatgatcattacgccagtgaaggtgaagtagatagtgattcccgcgacgagctatgagcggttaagccaggacaggacagcaagtcggaggttctttactttcaaatacactaggattttgcagccaaaggaaatgggaaatgtacaatcagctgcaaacatcaattttgttcatcgagaccagctgcctatctattctacagtttctttatataaaaaaagctaaacatataacataagggaatgcgtttttttttcc

SEQ ID NO: 99090 - DNA, 1428 bp, Zea Mays
cgacggcgcaccggtgacttccttccgccgtgccacccaccctcctctcgcggtcgcgggggtagggccgggtgagcacgagcgctgcccgctcgctgaaccatggcgggctccgcggtggccgtcgtcctcctgtcggccgtcgcgctgctctgcctgtaccacctccttttcctctccctgtccgtcccggacccggcagcagcagcagccgtcccccgccgcgccggtggccaccatggcagcaacgttccgtccgggtcaggaaccgccaacgtcgtcctccgcttcggcctgtccgggcagccgctccgcctccacgaccccgcctccgccgccggcctcccggacatcgacaccttccgcggcaagctcgagcggctgcttcctcccgacgaccacgaccccggctggtcccgccgcttcgacgccgagctcggccccgtgcaccggtacttcggcccggacgcgccgctggacgtgcggcagcggatcgcgtacctgttcgcgatcctcgaccggtcgcccaggggcgtcggcgtcggcgtcggcgtcggcgagctggaggcctggctgcgctggcaggccgccgcccggctggacgccgtcacgcggagggagatggctccgcacgacacggaccgcgacggtgccgtcacgctgcgcgagttcttcgcagactggatcaacatgggacatgacaaaatggggtggtggatgcacaagtttgcgagcgcggacagagacggggatggctcgctcaacgccgtcgaattcaacgacttcctgcatcctgaagacagcagccaagagagcgtgatgctgtggctactcaaggacaagctaagcgagatggaccatgacggagacggcaggctaagccaggaggagttcgtcgctcaatctcacatcatcatctccggcgcgcgtcacgccgacgacggtggccatgcccatgaccttgagcgtgccgaagctgcgaagaagttcacagaactggacgccgacaaggacaactacttgacggtggaagaagcgcgctgcgtactgcagagcctcgtcacgggggagttctcctatgctacctcacatgccaagttcttgatgaaggctgatgtgaaccatgacggcaaactgtcgctggaggagatgctagacgactacatatccttctacagcaccgtgtatatggatgatcattacgccagtgaaggtgaagtagatagtgattcccgcgacgagctatgagcggttaagccaggacaggacagcaagtcggaggttctttactttcaaatacactaggattttgcagccaaaggaaatgggaaatgtacaatcagctgcaaacatcaattttgttcatcgagaccagctgcctatctattctacagtttctttatataaaaaaagctaaacatataacat

SEQ ID NO: 99091 - DNA, 1403 bp, Zea Mays
cgacggcgcaccggtgacttccttccgccgtgccacccaccctcctctcgcggtcgcgggggtagggccgggtgagcacgagcgctgcccgctcgctgaaccatggcgggctccgcggtggccgtcgtcctcctgtcggccgtcgcgctgctctgcctgtaccacctccttttcctctccctgtccgtcccggacccggcagcagcagcagccgtcccccgccgcgccggtggccaccatggcagcaacgttccgtccgggtcaggaaccgccaacgtcgtcctccgcttcggcctgtccgggcagccgctccgcctccacgaccccgcctccgccgccggcctcccggacatcgacaccttccgcggcaagctcgagcggctgcttcctcccgacgaccacgaccccggctggtcccgccgcttcgacgccgagctcggccccgtgcaccggtacttcggcccggacgcgccgctggacgtgcggcagcggatcgcgtacctgttcgcgatcctcgaccggtcgcccaggggcgtcggcgtcggcgtcggcgtcggcgagctggaggcctggctgcgctggcaggccgccgcccggctggacgccgtcacgcggagggagatggctccgcacgacacggaccgcgacggtgccgtcacgctgcgcgagttcttcgcagtttgcgagcgcggacagagacggggatggctcgctcaacgccgtcgaattcaacgacttcctgcatcctgaagacagcagccaagagagcgtgatgctgtggctactcaaggacaagctaagcgagatggaccatgacggagacggcaggctaagccaggaggagttcgtcgctcaatctcacatcatcatctccggcgcgcgtcacgccgacgacggtggccatgcccatgaccttgagcgtgccgaagctgcgaagaagttcacagaactggacgccgacaaggacaactacttgacggtggaagaagcgcgctgcgtactgcagagcctcgtcacgggggagttctcctatgctacctcacatgccaagttcttgatgaaggctgatgtgaaccatgacggcaaactgtcgctggaggagatgctagacgactacatatccttctacagcaccgtgtatatggatgatcattacgccagtgaaggtgaagtagatagtgattcccgcgacgagctatgagcggttaagccaggacaggacagcaagtcggaggttctttactttcaaatacactaggattttgcagccaaaggaaatgggaaatgtacaatcagctgcaaacatcaattttgttcatcgagaccagctgcctatctattctacagtttctttatataaaaaaagctaaacatataacataagggaatgcgtttttttttcc

SEQ ID NO: 99092 - DNA, 1503 bp, Zea Mays
cttccgccgtgccacccaccctcctctcgcggtcgcgggggtagggccgggtgagcacgagcgctgcccgctcgctgaaccatggcgggctccgcggtggccgtcgtcctcctgtcggccgtcgcgctgctctgcctgtaccacctccttttcctctccctgtccgtcccggacccggcagcagcagcagccgtcccccgccgcgccggtggccaccatggcagcaacgttccgtccgggtcaggaaccgccaacgtcgtcctccgcttcggcctgtccgggcagccgctccgcctccacgaccccgcctccgccgccggcctcccggacatcgacaccttccgcggcaagctcgagcggctgcttcctcccgacgaccacgaccccggctggtcccgccgcttcgacgccgagctcggccccgtgcaccggtacttcggcccggacgcgccgctggacgtgcggcagcggatcgcgtacctgttcgcgatcctcgaccggtcgcccaggggcgtcggcgtcggcgtcggcgtcggcgagctggaggcctggctgcgctggcaggccgccgcccggctggacgccgtcacgcggagggagatggctccgcacgacacggaccgcgacggtgccgtcacgctgcgcgagttcttcgcaggtgaactggatcaacatgggacatgacaaaatggggtggtggatgcacaagtttgcgagcgcggacagagacggggatggctcgctcaacgccgtcgaattcaacgacttcctgcatcctgaagacagcagccaagagagcgtgatgctgtggctactcaaggacaagctaaggcacgtacgaatcgatcgatcgcagcttcttgcgagtgatgcatgatccctattttcttcggctggtttgcatatacattgcgtgcgtggagagcagcgagatggaccatgacggagacggcaggctaagccaggaggagttcgtcgctcaatctcacatcatcatctccggcgcgcgtcacgccgacgacggtggccatgcccatgaccttgagcgtgccgaagctgcgaagaagttcacagaactggacgccgacaaggacaactacttgacggtggaagaagcgcgctgcgtactgcagagcctcgtcacgggggagttctcctatgctacctcacatgccaagttcttgatgaaggctgatgtgaaccatgacggcaaactgtcgctggaggagatgctagacgactacatatccttctacagcaccgtgtatatggatgatcattacgccagtgaaggtgaagtagatagtgattcccgcgacgagctatgagcggttaagccaggacaggacagcaagtcggaggttctttactttcaaatacactaggattttgcagccaaaggaaatgggaaatgtacaatcagctgcaaacatcaattttgttcatcgagaccagctgcctatctattctacagtttctttatataaaaaaagctaaacatat

SEQ ID NO: 99093 - DNA, 1318 bp, Zea Mays
acccaccctcctctcgcggtcgcgggggtagggccgggtgagcacgagcgctgcccgctcgctgaaccatggcgggctccgcggtggccgtcgtcctcctgtcggccgtcgcgctgctctgcctgtaccacctccttttcctctccctgtccgtcccggacccggcagcagcagcagccgtcccccgccgcgccggtggccaccatggcagcaacgttccgtccgggtcaggaaccgccaacgtcgtcctccgcttcggcctgtccgggcagccgctccgcctccacgaccccgcctccgccgccggcctcccggacatcgacaccttccgcggcaagctcgagcggctgcttcctcccgacgaccacgaccccggctggtcccgccgcttcgacgccgagctcggccccgtgcaccggtacttcggcccggacgcgccgctggacgtgcggcagcggatcgcgtacctgttcgcgatcctcgaccggtcgcccaggggcgtcggcgtcggcgtcggcgtcggcgagctggaggcctggctgcgctggcaggccgccgcccggctggacgccgtcacgcggagggagatggctccgcacgacacggaccgcgacggtgccgtcacgctgcgcgagttcttcgcagacaaaatggggtggtggatgcacaagtttgcgagcgcggacagagacggggatggctcgctcaacgccgtcgaattcaacgacttcctgcatcctgaagacagcagccaagagagcgtgatgctgtggctactcaaggacaagctaagcgagatggaccatgacggagacggcaggctaagccaggaggagttcgtcgctcaatctcacatcatcatctccggcgcgcgtcacgccgacgacggtggccatgcccatgaccttgagcgtgccgaagctgcgaagaagttcacagaactggacgccgacaaggacaactacttgacggtggaagaagcgcgctgcgtactgcagagcctcgtcacgggggagttctcctatgctacctcacatgccaagttcttgatgaaggctgatgtgaaccatgacggcaaactgtcgctggaggagatgctagacgactacatatccttctacagcaccgtgtatatggatgatcattacgccagtgaaggtgaagtagatagtgattcccgcgacgagctatgagcggttaagccaggacaggacagcaagtcggaggttctttactttcaaatacactaggattttgcagccaaaggaaatgggaaatgtacaatcagctgcaaacatcaattttgttcatcgagacc

SEQ ID NO: 99094 - DNA, 1153 bp, Zea Mays
atggcgggctccgcggtggccgtcgtcctcctgtcggccgtcgcgctgctctgcctgtaccacctccttttcctctccctgtccgtcccggacccggcagcagcagcagccgtcccccgccgcgccggtggccaccatggcagcaacgttccgtccgggtcaggaaccgccaacgtcgtcctccgcttcggcctgtccgggcagccgctccgcctccacgaccccgcctccgccgccggcctcccggacatcgacaccttccgcggcaagctcgagcggctgcttcctcccgacgaccacgaccccggctggtcccgccgcttcgacgccgagctcggccccgtgcaccggtacttcggcccggacgcgccgctggacgtgcggcagcggatcgcgtacctgttcgcgatcctcgaccggtcgcccaggggcgtcggcgtcggcgtcggcgtcggcgagctggaggcctggctgcgctggcaggccgccgcccggctggacgccgtcacgcggagggagatggctccgcacgacacggaccgcgacggtgccgtcacgctgcgcgagttcttcgcaggtgaactggatcaacatgggacatgacaaaatggggtggtggatgcacaagtttgcgagcgcggacagagacggggatggctcgctcaacgccgtcgaattcaacgacttcctgcatcctgaagacagcagccaagagagcgtgatgctgtggctactcaaggacaagctaagcgagatggaccatgacggagacggcaggctaagccaggaggagttcgtcgctcaatctcacatcatcatctccggcgcgcgtcacgccgacgacggtggccatgcccatgaccttgagcgtgccgaagctgcgaagaagttcacagaactggacgccgacaaggacaactacttgacggtggaagaagcgcgctgcgtactgcagagcctcgtcacgggggagttctcctatgctacctcacatgccaagttcttgatgaaggctgatgtgaaccatgacggcaaactgtcgctggaggagatgctagacgactacatatccttctacagcaccgtgtatatggatgatcattacgccagtgaaggtgaagtagatagtgattcccgcgacgagctatgagcg

SEQ ID NO: 99095 - DNA, 771 bp, Zea Mays
ttgcgcccgtttggttgccaaaaccaaaagcagaggggaaagtgccgtcagctctgactctcgggcacttggctgacgacccgttctctctttgcaactgcaactgcaacgcaccaagaaactgccggcgatcgatcggggcaaggagataaacatggtgcacgggaagctggaggtcctcctcgtctccgccaagggactcgaggacaccgatttcctcaataacatggaccccttcgtgatccttacctgccgcacccaagagcagaaaagcagcgtcgcaaatggagcaggaagcgagcccgaatggaacgagaccttcgtcttcaccgtctccgacgacaccccgcagctgcacctcaagatcatggacagcgacctcaccaacgacgatttcgtcggcgaagcaaccatccccctggaggccgtgtttcaggaaggcagccttcccccggcggttcacccggtcgtcaaggaggagaagtactgcggagaggtcaagctcgcgctcaccttcactccagcagcggaaactcgccgccctgatgacaacgaggaggggccgccttacagcagctggagttgatctatctgccatgggatgcatgcatcatatatatccaccaagagaagagaggataattaattaatctactcaagagaagaatcagtgttgctgttatgcgaccctctatctatctatatatatgtgcttaatttgtcatgaacgactgccaatataaaataaactattcagagttgtttgcacgt

SEQ ID NO: 99096 - DNA, 517 bp, Zea Mays
acgcgaatcatctcacgcgaattgcaaacaacacattctcgtcccatcttctgcgagcacagagagtgggagagcaggcctccgaaatcaccgaccgcagagatacacttgcacgggtgtgcgggcgatcagatttttggggagcgtcttcgcgactgctcgcgtgatctgtttgtccagctgcttcgttcgacgtcttcccgagttgacgcgtcctgctgctcttcttcccggcgaccggcgaccgttcgagggactgcacagcgtacatcttcctgcaccgacttcgtacggctacatcgaacaaacacacgagatgtctcgtgtgaatggagccactggtgccttgagcatcggtccctccgctgggtacactccgttcttcgtatttgtgcatgtttcattactgtttactgcttatgcgagtagttatacacacatgcacatacatgtcatcacatatatcgcactgatttctgggattaaattaaaaacttaaaaatgcctaactttctaa

SEQ ID NO: 99097 - DNA, 1703 bp, Zea Mays
gagttttcatctcatgcaattttgacatcaaacgaaacacatcatggttcaagacagaatctcagtgctaaaattgaaagcagccaatacagggttctaaagttggaaagagtagcttttggtgtctcatgtttgtaaataactccttcctcccatctgatctgaaacaatgcgcatcctttgccccccttttgatgagaaaaatacgaaccctaaaatctcagctccacaagggtccccgtccacaatggccaccggcggcggcgcgaacgagacggccgtcggcgccggggaggagaacgcgagcgcttccaggatccccacccgcaggttcttcgtggcgctgcacgtgggcgccggcttccacgctccggcgaacgagaaggcgtaccgcagggccatgaagcgcgcctgcctagccgctgcggccgttctccgcgaggtccgttcaggcggtcactgagcgtttaccattttatggcccactatctccctccttgtcatggcttggtaagttggtatggcgtggcgcttggattttagccgctgatcggaattgtcgagtgcgtagggtacaattgggatcgggagattggggtacactgtccatttgcgtcagtgagacgtggtgcattataaactgagccgaccatgacctacttgttttcagtcctataaatttggggtttctgggtgactaattttattaccgtagcttcaggagattgttgctgttcaaaggataacttcaggttgtgctggaccattcacgtttgcaccatgagcactgggacagtacgatgtgtcgatggcactggcacaagcctggacgccgttgctgctgccattcaagttttggaggatgatcccgtcacaaatgctggtcgtggttcaaatttgactgagagtggtcacgtggaatgcgatgcaagcatcatggatggaagtactggttcttttggagctgttggagctattagagatcagatgtaaagaatccaatccaagtcgctttgcacttggcaaaggaacaaatggcgggaccgtcattgcttggtcggataccccccatgtttctggttggtgagggagcatatcaatgggcaaaatctaaaggaatggacctagttgaatctacatcggaggctaatagttggttggtgactgagaatgcaagagcgcagtgggtgaaatacacatcattgcttgttaataccaaaaaatcactatatcatagtactggttctggttcagaacatcattcagttcaattggaagcacaaggaactgaatctgagaatattgctgatgcaaagaacatatttacagagtcattcatgggagacaatacagatcacataacggatactgttggggttattttgtgtagatagctacggaaatgtagcatcaggtgcatctagtggtggtattgccctgaaggtagatggccgggttgggttagcagctatgtttggctctgggtgctgggcctcgtccaaaggaccctttggtacaccattcgtagttgcttgttgtgcaactggagctggagaacacttgattagaggatttgctgcccgtgaaagttgcatctcatcgtcgttgtcacaatctggtcctgcttctgcgtgcactaaagttctccgctctgtggttcaaagcagcagcaagatgtctcatgatacaggcgctgggtcttg

SEQ ID NO: 99098 - DNA, 1199 bp, Zea Mays
aaacaatgcgcatcctttgccccccttttgatgagaaaaatacgaaccctaaaatctcagctccacaagggtccccgtccacaatggccaccggcggcggcgcgaacgagacggccgtcggcgccggggaggagaacgcgagcgcttccaggatccccacccgcaggttcttcgtggcgctgcacgtgggcgccggcttccacgctccggcgaacgagaaggcgtaccgcagggccatgaagcgcgcctgcctagccgctgcggccgttctccgcgagggcactggcacaagcctggacgccgttgctgctgccattcaagttttggaggatgatcccgtcacaaatgctggtcgtggttcaaatttgactgagagtggtcacgtggaatgcgatgcaagcatcatggatggaagtactggttcttttggagctgttggagctattagagatgtaaagaatccaatccaagtcgctttgcacttggcaaaggaacaaatggcgggaccgtcattgcttggtcggataccccccatgtttctggttggtgagggagcatatcaatgggcaaaatctaaaggaatggacctagttgaatctacatcggaggctaatagttggttggtgactgagaatgcaagagcgcagtgggtgaaatacacatcattgcttgttaataccaaaaaatcactatatcatagtactggttctggttcagaacatcattcagttcaattggaagcacaaggaactgaatctgagaatattgctgatgcaaagaacatatttacagagtcattcatgggagacaatacagatcacataacggatactgttggggttattttgtgtagatagctacggaaatgtagcatcaggtgcatctagtggtggtattgccctgaaggtagatggccgggttgggttagcagctatgtttggctctgggtgctgggcctcgtccaaaggaccctttggtacaccattcgtagttgcttgttgtgcaactggagctggagaacacttgattagaggatttgctgcccgtgaaagttgcatctcatcgtcgttgtcacaatctggtcctgcttctgcgtgcactaaagttctccgctctgtggttcaaagcagcagcaagatgtctcatgatacaggcgctgggtcttgctagttcaggctgatgttgtaaaggtgggtatt

SEQ ID NO: 99099 - DNA, 3111 bp, Zea Mays
atggaggagagggggttccctaacgacgccaccaaggagggcaacgacgcttataagctggcgacttataagctgggtgtggaggttgtaagtgctcatgacctgatgcgcaaggaagggcaaggttctgcaagcgcttgcgtggagctcacctttgatgggcagcgcttccgaactgttgtcaaggagaaggacctgaacccagtctggaatgagcgcttctacttcaatatatcagatccttctaatcttcgtgcccttgcccttgaagcatatgtctatagtgtcaacaaaaccattgaaagttccaggtccttcctcgggaaggtcaggattgctggcacctcatttgtgcccttccctgacgcggtggtcatgcattatccattagagaagcgagggatgttctctcgtgtcaaaggagaaatgggtatgaaagtatacatcaccaatgaccccgctatcaaagcttcaaaccctcttcctgcaatggatcctgtttccaataatcctcctccagccccaagtacagcagagcagattgcagctgatataattggtactaatctgcacaagtctcaggagcataggtctgaggcaaagaccttacacaccattgctaaggaggtacatcataaccatggccatcttccagctagttttggtgagcagccttccaagtactctgttgaccagatgaaacctggatctcaaccacccaggattgtaagaatgtattcagcagcctcccagcagcccatggactacgcacttaaagaaactagtccatttcttggtggtgggcaggttgttggtggccgggtcatacatggcgaaaagaatgctagcacttatgaccttgtggagcgaacgcagtatttgtttgtacgtgtggttaaggcacgggacttgcctgacatggatgtcactggaagcctagatccttatgttgaagtgagagttggaaactatagggggataaccaagcactttgaaaagcaaaagaacccagagtggaacgcagtcttcgctttttcccgggatcgtatgcaggcatctgtgcttgaagttgtggtcaaagacaaagatttgattaaggatgactttgttggctttgtgcgatttgatttgaatgatgtccctatacgtgtgccccctgacagccctctggctccagaatggtacaggcttgttggtaagagcggggataggtccatgggtgagctcatgcttgcagtttgggtcggcacccaagctgatgaagcatttcctgatgcctggcattcagatgctgcaacacttgaagatccatctaccgtaacacacatgaagtccaaagtttatcatgctcccagattgtggtacctgcgagtcaatataattgaggcccaagatgttgctatattagataagacccgctgtccagatgtattcgtgagagcgcaggtggggcatcaacttgggaggacaaaacctgtgcaggctagaaatttcaaccctttctggaatgaagatattatgtttgtggcagctgaaccatttgaggaccaccttgttctgactcttgaggaccgtgtaggtcctaataaagatgaaatgcttggtcgtgtcatcatacctttggcaatggttgatagacgcgctgatgaccgtattgtccatggaaagtggttcagtctcgagaagcctgtacttgttgatgttgaccaactgaagagggataagttctctacccggcttcatattcgtctgtgtcttgatggaggttaccatgtccttgatgagtctacaaactacagcagtgacctgagaccaactgccaagcaactctggaagccctctattggtttgcttgaacttggtgtccttggtgctcaagggattgttcccatgaaaactcgagatggaaaaggttcatcagacacctattgtgttgctaagtatgggtcaaaatgggtaaggacacggaccatcatgaacaacccacatcccagattcaatgaacagtacacctgggaagtctatgatcctgcaactgttctgactgttggtgtttttgacaatggccaacttggagagaagacatctagtggcaaagatgggaagataggcaaggttcggatacgcctttccacacttgaatctggtcgtgtgtacacccactcgtaccctctcctggttctacacccatcaggggttaaaaagatgggcgaactgcacctggcgatccgattttcctcgacatctctagtaaacatgttgtacctgtactctaggcctttgcttccaaaaatgcactatgtgcgcccaataccagtgcttcaggttgatatgctgcgccatcaagctgtccagattgtggctgcccgacttagccggatggagccacccttgagaaaggaagttgttgaatacatgacagattttgattctcacttgtggagcatgaggaaaagcaaagcaaacttcttcagactcgtgacagttttctcaggcttgtttgcagctagcaggtggttcattggtatctgttcatggaagaaccccattactacagtgctagtccacattctctttataatgctggtgtgctttcctgagctcatacttccgacagtgttcttgtacatgtttcttataggaatctggaacttccgctaccgtcctcgttatcctccacacatgaataccaagatctctcatgcagaggctgttcatcctgatgaacttgatgaggagtttgatacattcccgaccagccgcaaccctgagattgtaagggtgaggtatgacaggctcaggagtgttgctggaaggatacaaatagtggttggtgacattgcaacacaaggggagagggttcaagcattgcttagctggagggaccctcgggccacatcagtctttgtcctattttgtttgatagcagcaatagtcctctatgttacaccacttcaagttcttgctgcattaggagggttctatgtgatgaggcacccaagattcagacataggttgccttcagtaccagtaaacttcttcagacggttgccagcaaggaccgactctatgctataaataaaccactatctggtggtcctatcattgtaa

SEQ ID NO: 99100 - DNA, 1508 bp, Zea Mays
accccccatagtagctcacttgctttgttttgtgctctgtccattcacctgcagtcgtgaaatgtatgaagctatagatctgctagcttatactcaaaaccccctatagcaattactgatcattttacaccctgttttctgcggttaattttttcttttttgttagcccaagtttgcagcataccaacggttcttgggggcagagatgggtttttgttagcccaagctgcacgtattatattatcacttatgttctgcaatattttgtacagtgcttgtacacgaaaaagcataccaacggttcatggggcagagatgggtgcatagtccatgtccatccaagcacgcacccgacgctacgcctccttccgttccgtatccattggccccgcccagtaaatttcggcccacacccgacgctacgcctccttccgcattggccggcggagccacagcactcagccagcctctccatctgacttcagtccccacgcgctgttccatccaaccctagccaccgttggtgcctcggcggcatgccctcgtttgccttcgtctccgctcggtacgccgcggatgcggaggcggacttcctccgcatctccgcctcgcaggaagaccttctcgcccgcgcccccttcatcaccttcgacccggaggaggaggaggaggaggccgaggtgtccagcacgccgcctctcacacaccaggccccgcagaggcagggggaagagggcatcgccatgtgctccatgcccttcacccagcctccctccccttctccggctccctcccctcccttggggagtccgagtcgggagcgtttcccctccctcggagactccgagtcggaagcgggtcacttgaaagccgcggaagagggtctgcacgaggaaggtgagaggagccaagctcaggactccgacgccgagctccagcagcccagccccagccccgaagtcgaccctctggccagggccgtgctcgtgacccccaccactccttcagcattcaccagtgatgaggatatcctcgagctcgctcgcagccgcgacatctagagttgcctatgtcacggtgactaagcagccccttctgttatgccaatcaatccatccatccatatgctaataaatatggtgtggttggatttttatgcgtttccatcaactacatatgactgtcttgttcggttcatgttgcaagtcgcagtattttgggcatgtggaagttaactatgccgtgcttgattggcacaagaaaactcactgtattttgggcatgtggaagttagctatgccgtgcttgattggcacaagaaaactcactgtattttgggcatgtggaagctaactatgccgtgcttggttggcacaagaaaactcactgtattttgggcatgtggaagttaactatgcttgcttgattgttgattggcacaagaaaactcactgtattttgtgcatgtggaagttaactatgccttgcttgattggcacaagaaaact

SEQ ID NO: 99101 - DNA, 315 bp, Zea Mays
atggcgaagcagactgagagtggagaagagagctacgagctgcggcggtcccaagtggcaaggagttcaacgccctggacgatagacctctggatgagagggagggaggacctggctgcaatcttcaaggtcctcggagccaagatcgcactgtcgctggctgcactggagctacgcagcaagcggccgcgtgggcagcaggacggcacggagactctgccggcggtgcccaggacagcaagccgccgtcggcttgacaccgcgaaggtcgtcgacaagtccactgggacaggacggaggcggccaagattgtga

SEQ ID NO: 99102 - DNA, 504 bp, Zea Mays
gaacggcaatcagcgggtaccttgagagggcgagggctgatgcttcttggcggtgcccggcggccggccgcgccgcttcttctgcgaagagtcctctatcccggcgctgctgatcatgttgggaccagacggccctatccttggctgtgcggcgacgagctgctgctgcttcatggtgccgtcgggaccgtatttgcgcggtctccctcttttgcgcttgaccggctccgtgggggccgcggggacggcaccgggggtggaggtaggagccgaggcacccatggcggcggtgtgcagcaatggtggcggcggcgggtccatttggaactgcataccggtgaaggagcccccgccgatagagttaaggatcgccgacgggctcatgttcatgttgggcatggggcgaatgacggagtgcatcccggccagcgaggacgggctatgctgcccgccgccgccgccgccgaaggcccggtggtgctgctgctgctgctggtagaatga

SEQ ID NO: 99103 - DNA, 465 bp, Zea Mays
atgcttcttggcggtgcccggcggccggccgcgccgcttcttctgcgaagagtcctctatcccggcgctgctgatcatgttgggaccagacggccctatccttggctgtgcggcgacgagctgctgctgcttcatggtgccgtcgggaccgtatttgcgcggtctccctcttttgcgcttgaccggctccgtgggggccgcggggacggcaccgggggtggaggtaggagccgaggcacccatggcggcggtgtgcagcaatggtggcggcggcgggtccatttggaactgcataccggtgaaggagcccccgccgatagagttaaggatcgccgacgggctcatgttcatgttgggcatggggcgaatgacggagtgcatcccggccagcgaggacgggctatgctgcccgccgccgccgccgccgaaggcccggtggtgctgctgctgctgctggtagaatga

SEQ ID NO: 99104 - DNA, 2260 bp, Zea Mays
accgccaccgggtagaccggctttggctgcaaaatgtatccgttgcccctcttcctcctcggcctccgatctccgagatttgaaaccgcctgaaccgccgccgctccgccctaccgtaccgccatgccctccgcagctaccgccatggacaggccgtcatcccgtccatcctgctccacctccaagccccggaagacctccccgtccccttccccatcaccggtgacggcgcctaagcccaagaccgttggttctagccgccgccgtagcccgctatccgacatcaactcaagggacgccttggccgcgcgcgagcgccttgggtgcttccgctttttcctcccctccgcctccgcctccgggtccagggccaggtccgcgtccaccccgcggaccccgaagcgccccgactccaagccccggcccgggaccaggaggccgaaccagctcccggataaggaatcgaggactagggggcagaaatgtcccgggaaagagccgacaatatgtggtcgggagccgatcggtgcgcgtatcaacaagatcgggccggccgccggcaacaagcagtggctggcgaaggacgagcagctggatcagttccaggccttgacgccggagaagaaagcggattccgaggccacgccgtctaccggcgcgacgccgcctgtccacgcgtcgatctcgcccgaggtggccgcggcgtgcgggtccgcgacgcccgcgtgcttcgcggccggccaccacgttgtccccggcgtcggggaccgccgcaagtgccggcctcggggaatcctggcgatcgcgggggaggggttgactagccaggacctcgacgaggagccgtctcgcgcgtccatccactggctgtcctcgccgtcgggggcggtggcctggacgtcctcgacgaaatgtggcaacgaggaggcgtcggtgaactggctggtgtccccgcgcgacgaaggcggggtggacctgctcgaagatgagatcttcgtgcccagatgctcctcggaggacgcgttctggcgcttctctccggactgcactgggctgttaggctcgccgctgctcagcggtctgctggattccggcactccgtcgtcggaaatgtctggggcaacgccgtcgtcagggtttctcccagtgcagaagactccaagcagtggcgatagcatcagtcctttctctcttattgtcaagcgagcatcggagtcctctgccagatttcggactttgtgtgcccagcagggactgggcagcagctaccggtacgattcggtggcggatccgacaccaatttctggtgagtcatggcctgaaagtgttagcaattgtacacggtcagggttgacaaggacaggcagtcgtcccctgaagatgatggatccagtgatggaatgtcttgagatgatgagtttgtctccaaggcctggggacgatgactatgatggaaatggcacactgcctgcaccattgcctcagcatagcttccagtttgcaggggatccgacgcctctggaatccatagacttgacctcttttaagaggtctcctcgtgacatagaattgaaggcaaaggacacaagtttccggaaatcagtcatggaagacactcggatctcttggcgggaggggcttgtcagcagaatgtttgatatgggtgacttggattgctgcaaatggctgtctgacgatgaagattcaccagtgtttttgcacactgacaaggctttggctgatggtaccaattttgagccatgtaatggttgttgcctgcatgagggtggcgaccgacaggaagcatgcggctttggctctgttgagctcagttgcattggtgatgaactgaacaatgatagcatcaaggcctctccaaatcctgttacagttgcagagtccatgaatgcagaaggattcgagcttgtcacatcggatgactctgattggactctcttctacaagaattacttgtttgaatcatgagatatctgaactgcagctggtttctttgctcagatgttttgtactaattgtaccactagaaccattgcaaacacacatttgtgtttgctgcatccttgtacttttttgtcaacatttgaagtttccttttacattctttggtaactcatgtaaattatgttagtacataaatttgtttctggaataaccacttgtggtcccttttaatctattggaaataattcagggagtattttacaaagaaattgttttttttatcaacaattcattcgag

SEQ ID NO: 99105 - DNA, 1117 bp, Zea Mays
cgcttcccctacgtgtccatggacacggagttcccgggcgtcatccaccaccctcccccgtccgtccaccactcggcgctcaccccgccgcagcgctacgcgctgctcaagtccaacgtcgacgcgctgcacctcatccaggtgggcctggccttcgcgccgtccgcctcgtccccgcccgcgctcgccttccaggtcaacctccgcgagttcgacccgcgcctgcaccgccacgcgcccgactccgtgcgcctgctcgccgccagcggcctcgacctgcccgcgcaccgtgccaggggcgtcagcgcgcgcgccttcgccgcgctgctcatgtcctcgggcctcgtctgcaacccggacgtggcctgggtcaccttcgcctccgcctacgacatggcctacctcgtcaaggtgctcatggggcgcaagctgccgagggcgctcccggagttcctccgctacgtccgcgtctacttcggcaacgcagtgtacgacgtcaagcacatggcgagggtagcctccgcccccgcgctgctcggcgggctcgagcgcgtcgccgccgcgctccgggtgcgccgcgccgcgggccggagccaccaggcggcgtccgacagcgtgctcacgtgggacaccttccgggagatggccaggctctacttccccaaggaaggcagcctggagatgtgcgccggcgtgctctacggcctcgagctccacgacgacgacggccgcggcaccaagccgcgggccgagtacgcgctgctgagatgatcaagaataccatagcttgttcgtgttatcatcttgtacagtgcagtcagttccacccgaactgaattcggggcgggaaataacataaagaaagacaagcaagcacggttctttgattggataataaattcttctaggcattgtttgaatggatcctccgttccgaagcatgaaaatgcgggcgaccatcgtcgatctgaacgaagagtgatagcgtcccggcaccggcagccagcggggcagggactgcgatccatcaactcaaattggttgcttcgcatcggtcaacatgtaatagagaattgcttattcgcattactctctgtgcaaggcacgttagttactg

SEQ ID NO: 99106 - DNA, 735 bp, Zea Mays
atggcgaggctggcggtggccacgagggcgttctccgcttcggcctccgtcggtgacactggaggcggggtcggcgacaacatggggaggaagaccacggcgacacggttttccaaattgacctttatctctgaacttggggagctccccattgcacataagacctcaaccttagacgttatttgtcaacttatcccccttcttactcaaggagcattaattatatatggaaatgaaccatcaaatgcttcggagctaccaaagaacacaaaagctaagaagaaaagtttgaaagagccacttatcattcggatcatgcagacaagggaaggattaaagctaggaatcagttgcctcaagcatggcagtacaaagggtaataacatccatcctattataatttttgttacaccttttacatggccatcagtaatcacagttaagggttggataaaggcactatgtagtgtggcccttctaattgtgttgctgaagttcttattgaggttattaaggcacagcccagcaaataaacgaagccaagcaatgatcaaatgggcacagaacaaaccgattatcatcagtgctgttactggtcccttgccaacccatgcagtgcggcccggcgccggcgatccagtggcgactgtttgcctcttggcagcctgcatttctgcatgttccacaccagtggatctgtttagaaagaagaggcctacggacacctacagctag

SEQ ID NO: 99107 - DNA, 732 bp, Zea Mays
tcgcgcgcagcagcagcagcagaagcagccatggtcaggaagctcgcgctcgcctccctcttcttcaacgccagcgagggaagccagtgcctttcctcctcggcctccttcagcacggcggcgtcgtggcagtggccgtcttgcacgcaggcgaggacgcgctccttccggggcgagatcgtgtccatgcgccacgtcgacaccagcagcaggcgagaggagcaggaggggtacaagacgagcatgaacccagcctacgtcgtccacgactgctactccagctccctatccgactcctccgcggcgccagcagagcccgctgcggacgaggacgaggccatcatccacggcctccgctcgtccaccacccgtcggctcctgttcgagcccgagtccacgagctccatcgtgaagaagacgaaaaaggaggcggcgttcagcggggccacggcgctggccatcgagtccgccgatccgtacggtgacttccggcggtccatggaagagatggtgctgagccacggcgccggcgacgactgggcctggctcgaggagatgctgggctggtacctcagggccaacggcaagaggacgcacggcctcatcgtcggcgccttcgttgacctgctcgtggcgctcgcctcctcctctgctccctctcccgccgtctgctcctccagcttgaagcagagcagccatcttattcttgaggctgctgccgagatagagtga

SEQ ID NO: 99108 - DNA, 1391 bp, Zea Mays
gtccgtccgtcgtgagcgtgtagaggtagagatgacctgcaaatggtcaaatcaatcaggccacccacccaaggcgcaacgggccaacggctacaactcccctacaagtgtccggcgccccttggtctgtctctgtccaccaccaccactagtccacgacggccgccagccatttcgccgcggcttccacttcgtgttcgttcccccaattgcgtctcctccttccaactccacgcgcttcaatcccacaaccgcgtcgccgtcccgatcccctcccctcccctccctttctcttccatataaaaaaccctcaccaggtgcatcaattgaaacccaatccagccccatccgtcgattggaacccagatccgcaggccgcagcacaagagggtgggatcggatcggatcggagcagagggggaccgaccagaatccgccggcgaccaccatgggctccgcgagccgtgccgtctcgtgcctgtgctgcccctgcaagtgcctggcgtgcgggctcctgagctgcctgtgcagcatcctcgtctcgctcgccgtcgtcctcggcgtcgtcgccctcatcctctacttcatcttcaagccgcacatgatcgccgccaccgtggactcggcctcgctctcccagttcgcgctgtcggcgtcctccacgctctcctacgacctcaacgtcaccatgacggtgcgcaaccccaacacgcgggtggggctctactacgacgacgtccaggcgctggccctgttcagcgaccagcgcttcggctacgccccgctcgacgccttctaccagggcacccaggcgtccacccagctcagccccgggttccgcggcacgcagctcctccagggcgacgtcaccgccgccgagttcaggcaggagcagtccgcgggcaacttcgccgtcgacgtcgacctcaacgccaagctcagggtgaaggtctgggcgttcaaggtccgcgggcccaaggctaaggtcacctgcaagctctccgtccccgcacccggcgccgccaacgcctcgcccttccagcccaccgtttgcaaagtctggttctgattttccatgttgtgggatttagatttacctggtaggcattctactagtagtagtagataatgttaccagctgatgctgatgtcgattattgttttctttcgttcattcgttggtcgtcagtcccgctctggattttgctttatgtatatatatactgctctccttcattcgtaccagcactctgctctgctgtatacacttttgtttgctctcagtttttattactactgtagacaaatttactagttgtcccggctaatctcgtgattctttagacttgagatgattgctttgctgaaatattgatcgaattgttcggttg

SEQ ID NO: 99109 - DNA, 834 bp, Zea Mays
gatcagctgctggccgatggattagtagacaaggcccgggcggcggccggggctcggcggcgacagaggagacggagtcttcttcggcgggggctcgatggggcccacgtgggagcggaatcccgcggagaccaccgcgtcgcgcacgcaccagtggaacgccggctgccgcatggccgccgccgccgcctcgcactcggggcacggggacggtcgtcgcctcggggaccactgctgtgggtcctcgttatccggatgccccgccgccaccgacaagtgcaagtaggcggggtccagacccggacccgcacccgcggtgctcatcaagtaccagtcgcgctgccgctgcagctcccgcagccgcgcctcgtagtcgtcgtagagcacgagcggcccgggcgaggcaccggcactggcgcggggagggagagggagagggctgaccagagacgccagatccgtgggcgggaggcgcttcaggatggtcttctccacggccgcgccgttgactcccttcctgtcgcggcgggaccggccgccccggcgggagcggcggaacccagcgatgacgtagcacccggaaccctcccgcgcgacggcggcggcgaggtcggtggcgtcgtcgaggggcacatggcgggcgcggcggggccgcgccagggacgccgagatctggtgcggcgcggcgcccacgcggtctgccacgacggcctgaagccgcttcacgccgccaaacgacggctgcacggtcaccgtgcccaagtccacgctctgctcgccgtcgacgaagacaaccgccagcacgcgtgcgtcctccatgtccgacgcacgctc

SEQ ID NO: 99110 - DNA, 217 bp, Zea Mays
tcgtatatgactcgtgtacagtgttgagttggatcgagtcagctcgtgtctctatgtttgacgtgtcaggtcaggttttttcgagttaggtcaggttttaagtaaaaaatcagggcatgtacttgacccgtgaattattacgggtcagaaattatggtccgtatccacccgttgcattggtcggatcaggtttttttggacgggtcaggtgggttag

SEQ ID NO: 99111 - DNA, 2105 bp, Zea Mays
attatccacggaatggaatcgaatcgtccaggaaaggggaggaccggagcgagagcgagatggtagtggtggccgccgcggccgcacgcggccgcgctgtaaagcccctgttcctcgtcctcgtccaccacagccgccccgcgccccgcctcccccgccgaaccgcccgcgcccggccgctgcgcttcctctcctgctcgacctcagcgccgccgctgttcgcagccgtcgcatccatggactcgccgccccagggttaccgcaccaacgtcggcatctgcctcgccgacccatccctcaccaagattttctcggcttctaggatcgacattcctagcgcgtggcagatgcctcagggtggtatagatgcaggggaagaaccaagggcggctgccttcagggaattgagagaagagactggtgtcacatccgcagagatcgtggctgaggctcccgtctggttaacatatgatttcccgccagatgtcagaaccaaactgaatgccaggtggggaaccgattggaaaggccaagctcaaaaatggtttttatttaggcttactggaaatgacgatgagattaaccttaatggtgatggatctgagaagccagagtttggtgaatggacatggatgacacccaaggaagttatcgaaaaggcagttgatttcaagaaacctgtatatgaggaagcattgaaacactttgccccctacctgcagtcagatccagccgcttcatcatagaagatttggccaatttgcttgcatccctgctgtatctggacccccaataatttgacacgacgcaatgtagccatgaggtgtgctatacaatttgatagtgtgtggcctgtttgagtgaattatatatgccagcattggatcctcgccctctacttagtcacataagtatacaataagtggtggaaacagtttcagccaatctggaacatggtggccagtgtatcttgtctgccaatgactgaatgctttaggttgaagcaataccataattccagagagactgcggtacagcaacctcaggttatgtggggggtcgtcggcaaaacgacgctcgtttggcattggctacggcagaaactagtgtctggctgccattggttgtgggaggagcagaggaaaacaaattgttggttacactctgtactactgcgtcatgatattgtcggctttcgctttgtggcttttggaggaaaactggagatgtggcagctttggctttacgcatcttggaggaacaggagatataaacacacgcatttcgtttttttttttgttgagttgctgtgctccgtcttcgctgcagaatccagatcaaatgtggtggtggtggtgctgctgctgctggctacacgaatgtggatagcagcatttgtcgtccttgaatgcctgccgagaaagcaacgaattccaacactgtgcgaaaacaggcaagggggaggaccgggagacaagagagacacatgtactgctgcttattatcccatggatggaatgatggatgcatctgatccgatcaccggccgtctgccgagtgttactgatctgccactggcgcctgctgagaggttcgcagcacttttccgtgatcaggacattggaatggtagaaaaaatagctatggaccttgcagatatagcttatggtgataatgcacactggaagttgcggaaccttgttaaggaggggcatcatgtcttaatcttttcgcagacccgtaaaatgctgaaccttattcaggacttccaagagggtcctggagctccaatatttttactaaccacacaagttggtggacttggacttaccaaggcagcacgcgtcatagtagttgatcctgcttggaacccaagtacagacaatcaaagcgtagatcgtgcttaccgaattggccagaacaaagatgtgattgtatacagctatcttgtttgtgccctcaggagattccagagctttttagtttgccacaacaaggttttgatgtttccctcacgcataagcagttgcaagaagagcatggtcaacaagttgttatgtaagagatctgttttagctgaacttcctttaatcgagcacggttaa

SEQ ID NO: 99112 - DNA, 1874 bp, Zea Mays
ctcgtctcgtctacctctgtgttctcttctctctcgcctcctcagatgggatggcattacatgtttccttcctggagaagaggctaccgaggccttttcttggtgacgtcgatgcgccaccagccccagtcactgccactgcccactgggaccaaccccgcggacggaggaccacttgtacaccaggtcgatcacgaccataccgtgggctggcctgcagatcttcaagtatacgtgccagtctttatcttggcataaacagatagtaccagtgcacgtagcctctagccagagtgcatgagtcaaagcgctatattctctgtagtgaagtgaagcacgcacgcacgttgcttttccttcactccatcggccaccaagttattaatgcattgcatgccagctggcccatctgattcctagcgacaggaacatcattaagcaactagtactagagtaatgtaggttgatgtcgatgatgtgtcccctcagaatttttgttgacactcgttgctggacctggacctgactagatggcggatggggggccattaccatcatccattcattgtgcgtgcagtactcctgctaccgcctccacggctctccatccatccatccatccatttgcatgcatgacccatcaagtatggaggaagcattacactacacatgtcttggccgaccatattctgctcgacggaaaaaagccagagattggagtctcaacactgactggaattacacatgaaaaaaaaaacaaatgagatgcctaccaccaatgccaaaaaaaaaaaaaaaaactaggaaacatatcatcatgatcatgtatctacaaagcagagcaggagaagaagaagcataaggttgtgcacatggacgacgttcgtttgtacctacagcaacgaattccaacactgtgcgaaaacaggcaagggggaggaccgggagacaagagagacacatgtactgctgcttattatcccatggatggaatgatggatgcatctgatccgatcaccggccgtctgccgaggtgaaggactcggcgaagccggcggggcgggcggggatgctgcccttgctgtcgtccaggctcatgacgctcccgccgccgtccgtcaggccgccggcctccgcgtcctgccagctcttcaccatctgcagcagcggcaggtgcaggtcgatgcccaggtagtcctcggcctcgtccttgacttggcgctggaaagatgaagctcaacaactttatggagaaatggaagagaagcattccttcaggaatgtgctgtccggatcttgagatgcttgaaggggaagtgttgtgtgaaaagcttggggctgagacctgggtgcatgctttcagtgttactgatctgccactggcgcctgctgagaggttcgcagcacttttccgtgatcaggacattggaatggtagaaaaaatagctatggaccttgcagatatagcttatggtgataatgcacactggaagttggtcaggatgtctcatgcaaactatcattcatcatgtctttgctgcggaaccttgttaaggaggggcatcatgtcttaatcttttcgcagacccgtaaaatgctgaaccttattcaggaagcaatattattagagggctacaagtttttgcgcgaccaaggtttctgagcgcgaaaggattgtgaaggacttccaagagggtcctggagctccaatatttttactaaccacacaagttggtggacttggacttaccaaggcagcacgcgtcatagtagttgatcctgcttggaacccaagtacagacaatcaaagcgtagatcgtgcttaccgaattggccagaacaaagatgtgattgtatacagctatcttgtttgt

SEQ ID NO: 99113 - DNA, 1238 bp, Zea Mays
cgccggttcgcccacctggccttcagcttccagcgcatcgttcttctccgtgctcgccagtgggttgctgacagagatggtagtggccgccgcggccgcactctacctcgctgtaaagcccctgcccctcgtcctcgtcctcgtccaccacagccgccccgcgccctcctccgcgctccgcctcccccgccgaaccgccagcgcctggctgccgcgcttcccctcctgctcgacctcagcgccgccgccgttcgcagccgtcgcatccatggacgcgccgccccagggttaccgcaccaacgtcggcatctgcctcgccgacccatccctcaccaagattttctcggcttctaggatcgacattcctagcgcgtggcagatgcctcagggtggtatagatgcaggggaagaaccaagggcggctgccttcagggaattgagagaagaaactggtgtcacatccgcagagatcgtggctgaggtttttatttaggcttactggaaatgatgatgagattaaccttaatggtgatggatctgagaagccagagtttggtgaatggacatggatgactccccaggaagttattgaaaaggcagttgatttcaagaaacctgtatatgaggaagcattgaaacactttgccccctacctacagtcagatcccgccgcttcatcatagaagattcgaccaatttgcatacattatattttttttttatttggaaactaccctgctgtatctggacccccaataatttgacacgacgcattggagccatggaggtgtgctacaatttgatagtgtgtggcctgtttcagtgaattatatatgccagcattggatcctcgccctctacttagtcacataagtatacaataagtggtggaaacagtttactgtaatgaccgctacagcttcccccgtcgcatgattgggcttgtgcctttagtttcagccaatctggaacatggtggccagtgtatcttgtctgccaatgactgaatgctttaggttgaagcagtaccataactctagagagactgctgtacagcaacctcaggtttatagcactggctacggcagataccagtgtctggctggctggctggcatttgttgtggggagcacagaggaaaacaaattgttggttacactctgtactactgcgtcatgatattgtcggctttggcttttggaggaactggagatttatttggcagctttggctttatg

SEQ ID NO: 99114 - DNA, 1390 bp, Zea Mays
cgccggttcgcccacctggccttcagcttccagcgcatcgttcttctccgtgctcgccagtgggttgctgacagagatggtagtggccgccgcggccgcactctacctcgctgtaaagcccctgcccctcgtcctcgtcctcgtccaccacagccgccccgcgccctcctccgcgctccgcctcccccgccgaaccgccagcgcctggctgccgcgcttcccctcctgctcgacctcagcgccgccgccgttcgcagccgtcgcatccatggacgcgccgccccagggttaccgcaccaacgtcggcatctgcctcgccgacccatccctcaccaagattttctcggcttctaggatcgacattcctagcgcgtggcagatgcctcagggtggtatagatgcaggggaagaaccaagggcggctgccttcagggaattgagagaagaaactggtgtcacatccgcagagatcgtggctgaggctcctgtctggttaacatatgatttccccatggatgtgagaaccaagctgaatgccaggtagggaaccgattggaaaggccaagctcaaaaatggtttttatttaggcttactggaaatgatgatgagattaaccttaatggtgatggatctgagaagccagagtttggtgaatggacatggatgactccccaggaagttattgaaaaggcagttgatttcaagaaacctgtatatgaggaagcattgaaacactttgccccctacctacagtcagatcccgccgcttcatcatagaagattcgaccaatttgcatacattatattttttttttatttggaaactaccctgctgtatctggacccccaataatttgacacgacgcattggagccatggaggtgtgctacaatttgatagtgtgtggcctgtttcagtgaattatatatgccagcattggatcctcgccctctacttagtcacataagtatacaataagtggtggaaacagtttactgtaatgaccgctacagcttcccccgtcgcatgattgggcttgtgcctttagtttcagccaatctggaacatggtggccagtgtatcttgtctgccaatgactgaatgctttaggttgaagcagtaccataactctagagagactgctgtacagcaacctcaggtttatagcactggctacggcagataccagtgtctggctggctggctggcatttgttgtggggagcacagaggaaaacaaattgttggttacactctgtactactgcgtcatgatattgtcggctttggcttttggaggaactggagatttatttggcagctttggctttatggttcttggaggaacaggagattcacacatgcattttgcttttttttttttttttttt

SEQ ID NO: 99115 - DNA, 456 bp, Zea Mays
tttggaaactaccctgctgtatctggacccccaataatttgacacgacgcattggagccatggaggtgtgctacaatttgatagtgtgtggcctgtttcagtgaattatatatgccagcattggatcctcgccctctacttagtcacataagtatacaataagtggtggaaacagtttcagccaatctggaacatggtggccagtgtatcttgtctgccaatgactgaatgctttaggttgaagcagtaccataactctagagagactgctgtacagcaacctcaggtttatagcactggctacggcagataccagtgtctggctggctggctggcatttgttgtggggagcacagaggaaaacaaattgttggttacactctgtactactgcgtcatgatattgtcggctttggcttttggaggaactggagatttatttggcagctttggcttt

SEQ ID NO: 99116 - DNA, 927 bp, Zea Mays
atgcctaccaccaatgcaaaaaaaaaatcatgtatctacaaagcagagcagagcagagcaggagaggaagaagcacaggcaaagcagagcaggagaagaagaagaagcacaaggttgtgcacatggacgacgatcccatgtactgctttcttttgtacctacagcaacgaatgtgcgaaaacaggcaagggagggaccgggagacgagagacatttgagagacacatggatgcatgcattgcatgcatccgatcaccggccatcggccgaggtgaaggactcggcgaagccggcggggcgggcggggatgctgcccttgctgtcgtccaggctcatgacgctcccgccgccgtccgtcaggccgccggcctccgcgtcctgccagctcttcaccatctgcagcagcggcaggtgcaggtcgatgcccaggtagtcctcggcctcgtccttcacgggcctccacttctccaccatgggcaccagcacgttcaccgcgtgccccatgtccggccgctgcgacggctcccgggccgtgcagtgccccgccagctccgcgatcacgccgatgctctccattgtctcgccgtcgcccacgtccagggccgggtcgatcgccgcgcgcagctgctccgcgtccttccgtatctggctgaaccagtacgccaggtgccgggtctcctcgccctcgcccacgcggctgtcgtcgatggccgtcgtccctgttatcagctccagcagcactacaccgaagctgaacacgtctgctttcgtcgagatcttcccggtaactgcatactcaggagccaagtacccgaacgtcccggcaagtctggtcgccacagagtagttcccatccggcgcatctttcatgagcccgaagtccgccaccttggcccggaagtcgtcgccgaggagaatgttcgctga

SEQ ID NO: 99117 - DNA, 2085 bp, Zea Mays
accccacccgacccgggcacacaacaccaattcaccaaacttctcaagactgtcactgtccactccaccacctcacttgcgatgcgaacaagagcaaagccctgaaatccttctccccctgcacgcacctgcagacctgctctctcgcgcgcatctcccgtgcccctcactgtttagtggcgacgactgggcgacagtcgccgccgccgcccgctaggggccgtgcccctggtctccatcttcgggcgcttcgcccaccagatatgagcagctggcaattcgattttgaggccattatttgataacccgggacaagtgcactgttacctgaccattttagcttgttcagatggctacacagttgccatgcttcacacagctcagtccaccgtcttgtagttggataaaagatgtcgggaactgcaaggctacgcctgatagggtagccagaagtgcccgagctttgggccactgtcacttccggtgctgtgcaggcccccgtagtgcaaactctttcaagaagaaagactctttcgagaagaaagactctttcctcgaacttcatccggaggtatctctgctccgtggcgagaagagtgccgaggttgtgccaatgaaaggttcctctgatgggggtctgttagagggactgggggtgccgccggaccgaaatgattacagtgaggctaagatcaaggtagttggagttggaggcgggggttcgaatgcagtcaatcggatgattgagagctccatgaacggcgttgagttttggatcgtgaacactgatgtgcaggccataagaatgtctcctgtgctcccccacaatagactgcagattggacaggagttgactcgaggcctgggcgctgggggaaaccctgatattgggatgaatgcagcaaaggagagcagcgagtccattcaggaagctctttttggtgctgacatggtttttgtgacggctggaatgggtggaggaactggaactggaggtgctcctgtgattgctggaatagccaagtccatgggtatactaaccgttggcatagtcacaacgcctttctcgttcgaggggagaagacgggcagttcaagctcaggagggaatagcagcattgagaaatagtgtggacaccctaatcgtcatcccaaatgataagttgctgtctgctgtttctccaaatacacctgtaactgaagcatttaatctggctgatgatattcttcgtcaaggcattcgtggcatatctgatataattacggttcctgggttggttaatgttgattttgctgacgtacgtgctatcatgcaaaatgcagggtcatccttgatgggtatagggactgctacaggaaagtcaagagcaagggatgctgctcttaacgccatccagtcgccgctgcttgatattggaattgaaagagccacaggcattgtgtggaatatcactgggggaactgacctgactttgtttgaggtgaatgctgcggccgaaattatctacgaccttgtcgatccaaacgctaatctgatatttggcgccgtcatagacccgtcactgagtgggcaggtgagcataaccttgatagctactggcttcaaacggcaggatgaaccagaaggccgcgtgtcgaagggtgggcaacaaggtgagaatggccgacgcccatccccagcagagggcagcagcacggtggagatcccagagttcctgcgacgaagaggaccttctcgcttcccacgagtttgactgtcctgtcctgcacctgtatgatatgctccacccacccttaggtcagaattagatgatcttgtatggcacctagtcttctctaggcatcgatcgtctctagcggtttgttctttctagttttctttttttccccgccaccaattcttatggttatggtcatcaataatgtgtagctgctgtgagctctctagcgctatatgtaatgtagtccgtggagaatgtgttttccctgttacactggatctgattagaatggtagctgaagaagtgatggttgcctgcattagtatggtagctgaccaaggccatgtttgttttcctcccagatt

SEQ ID NO: 99118 - DNA, 1841 bp, Zea Mays
ccattttttactgtagatatgagcagctggcaattcgattttgaggccattatttgataacccgggacaagtgcactgttacctgaccattttagcttgttcagatggctacacagttgccatgcttcacacagctcagtccaccgtcttgtagttggataaaagatgtcgggaactgcaaggctacgcctgatagggtagccagaagtgcccgagctttgggccactgtcacttccggtgctgtgcaggcccccgtagtgcaaactctttcaagaagaaagactctttcgagaagaaagactctttcctcgaacttcatccggaggtatctctgctccgtggcgagaagagtgccgaggttgtgccaatgaaaggttcctctgatgggggtctgttagagggactgggggtgccgccggaccgaaatgattacagtgaggctaagatcaaggtagttggagttggaggcgggggttcgaatgcagtcaatcggatgattgagagctccatgaacggcgttgagttttggatcgtgaacactgatgtgcaggccataagaatgtctcctgtgctcccccacaatagactgcagattggacaggagttgactcgaggcctgggcgctgggggaaaccctgatattgggatgaatgcagcaaaggagagcagcgagtccattcaggaagctctttttggtgctgacatggtttttgtgacggctggaatgggtggaggaactggaactggaggtgctcctgtgattgctggaatagccaagtccatgggtatactaaccgttggcatagtcacaacgcctttctcgttcgaggggagaagacgggcagttcaagctcaggagggaatagcagcattgagaaatagtgtggacaccctaatcgtcatcccaaatgataagttgctgtctgctgtttctccaaatacacctgtaactgaagcatttaatctggctgatgatattcttcgtcaaggcattcgtggcatatctgatataattacggttcctgggttggttaatgttgattttgctgacgtacgtgctatcatgcaaaatgcagggtcatccttgatgggtatagggactgctacaggaaagtcaagagcaagggatgctgctcttaacgccatccagtcgccgctgcttgatattggaattgaaagagccacaggcattgtgtggaatatcactgggggaactgacctgactttgtttgaggtgaatgctgcggccgaaattatctacgaccttgtcgatccaaacgctaatctgatatttggcgccgtcatagacccgtcactgagtgggcaggtgagcataaccttgatagctactggcttcaaacggcaggatgaaccagaaggccgcgtgtcgaaggtacctcttggtgggcaacaaggtgagaatggccgacgcccatccccagcagagggcagcagcacggtggagatcccagagttcctgcgacgaagaggaccttctcgcttcccacgagtttgactgtcctgtcctgcacctgtatgatatgctccacccacccttaggtcagaattagatgatcttgtatggcacctagtcttctctaggcatcgatcgtctctagcggtttgttctttctagttttctttttttccccgccaccaattcttatggttatggtcatcaataatgtgtagctgctgtgagctctctagcgctatatgtaatgtagtccgtggagaatgtgttttccctgttacactggatctgattagaatggtagctgaagaagtgatggttgcctgcattagtatggtagctgaccaaggccatgtttgttttcct

SEQ ID NO: 99119 - DNA, 2454 bp, Zea Mays
gcggacaagcccgccggcctcgtgcacgtcaagggctggggtcttgggtctcggcgcgcgcggcggcgacgaggtcgcggcgaccctggcggaggagggcagccgcctgcacgccatccgcgccgcgctagaggacatcgaggaccacttcgagtgcttgcttatactataaaaccatacttgtttgcgtctgtggaatgtgcacacccatgggaatttttcttgatggtccactgctgacatgcacagacatctcttctaccactgccatctcaaaggccatgctgctataccagcggtagctgcaacgattcatctagttgtggcaaattttggcacatccccaacactcgagagatcaagaaagcaaagacatgccaaccttcaaaatgcattgagaattttggaccttgtaccatccaagcatcatcatgaccaagaggaagttccgtcacatcaccgccttatcaatggctgtatgggtgacatctcggcagtccaatcaagactgcacactatgcgtaagggtaaagagagttttgctaactcaagctcaaatcaagcacagcctaaacacagtaacattgtctcaaataatacctcagtttgccccttcataactagactcacaaaggaggacatgtttatgcaaattgtggagttacataggagtggacaaattagttcagatgcatccattttggtatctgcactgagttactgtgctgctgagaaaattgttaccgcaggtgtacagttccatgctcaactagtgaaagtaggatatgtctcatctatctccactggcaactcgctgatcagtttttattcacgatgcagccaattggaaatcgctcatcgggttttccaaaatatgacagcaaaaagtaccgtgacatggacagcattaatttctggctatgcccaggataatcaggtggaaccgtgtctccatttatttgcactgatgaggcactctgtgtgcaagcccaatgacgtcacattcgcaactatcttcagtgtctgcactaatcatgcatttcttgtacttggtaaaagtgtgcaagccctacagatgagaatgggttttgattcgtatgtgcatgtgtccaatgcattgatatcaatgtatgcaaagtgcgggagtattggtgaagcacgagctgtatttgagagcattagatgcaaagacttggtctcatggaactccttgatctttggatattcacagcatggccttgctgagcattgcctatatttgctaagagaaatggaagggcatataacaccggatgcaatctccttcctaggtgtgctctcatcatgccggcatgcatgccttgtggcagagggccgacggtgcttcagggcaatgattgaacatggagtagtaccagagatagatcactactcatgtatggtggatctttttggccgtgcagggctgcttgatgaagcatgggatctgatccagacgatgcccatgcctccaaatggtgttgtatggggctcccttctagcttcctgtagggtgcatggaagcacttggatcggcatacaagctgcagagcaccgtctaaagctggaaccaagttgtgctgcaattcatgttcagctagcgaatttgtatgggagcattgggtgctgggatgatgtggcaagagtgaggaaggtgatgaaggagagagggctgaaaacaaacatcgggtgcagttggatagaagttggcaataaagtttatacatttacagcagaaaacagatcaaagaaccaggtaaacaatgtcctggttgttcttgattgcttgcagtcacatatggatcacgagtatgatatactactgatcgagggtctggattgggattatcctgagcatatcaagttaagtttaaacactatataaatttgaagatgattgctcgttatgttcaagttcatttgaagaggcactcaataggaattgacatcacacctcaaatatctgcaacctagatgtaacatatgtaagtttaacacctgtgtttgagcatttgaaacgattagatttgctcagtttacttttatctgagctactgctgatatccatattcattttgtaccaactgtattaacctagattagggtggttgtaattatctaaagtagtgtttggtttaggagcgagatggaattgagcggcggagtgactattttcctaatatgctgaatctcgacgactctaagggctagtttggcaaccgcatttttccatggtattttcaatttcccaagtgaaaataaactaattttctttgggaaaacgaaaaacccttgagaaaatgtggttcctaaactagtctaaaaaaaactagtcctaaaaggagaatgttcctctctctactttttccgaaaattatcataatgaggccttttcccctgaccgggagcatcaacatgactgcagagattgtgccg

SEQ ID NO: 99120 - DNA, 543 bp, Zea Mays
tcaacgatgcccagccgatcgtcctccatggcgtcgccgctgctgcagcgcccccacgacctgctgggcccgcgcccggcgccgctcaaggtcagcaccggcaccacgacgacgggcacggcggacctgcagctgcaggtcgtgaacaggcggcggcgccggcagccggtgatcatctacgtggagtcgccgagagtcgtgcacgcgcacccggccgagttcaagtccgtcgtgcagcgtctcaccggcaccgcacccgctctcccgctgccgctcaagttcccgttccatttccacttcccgtcgtcggtgggagctgcaagccgcgcactgctgccactgactagcagcactagcagcggcgtcatgtcggtggtgacggttgctgatactacctgtggcggtggctcaccagtccagcagctgccaaatcaccatatgcttgtctccagcgatccgtgtgatctcccgccgccgccgtctcttgccgcgtgttatcatcaacaccacggcggtggtctcctcatcgaccaacaccagtaa

SEQ ID NO: 99121 - DNA, 1759 bp, Zea Mays
cggcttgcctgctctagacgagtccggcaaaagtcgccgttggatcgtaccgctcggagcggacgacgcagattgcgagactgtacactgtagagagagacgtcgtcggcctgagcgccgtgcaagcaagcaagcggcggcaatggcggcggctcttcaagccacgccgatcaaaaccctagccacctcccgctggcgcgtcgaaggtgcggaggcgcggccgcggccgcggccgattgcggtgagcttccgttgctccgcggcggcgaggagctacaacatcacgctcttacctggggacggcatcggcccggaggtggtcgccgtcgccaaggacgtgctatccttcgccggagccctcgaaggcgtcgagctccggtttcaggagaagctggtgggcggctcggcgctggacgccaccggcgtgccactccctgacgagacgctcgacgaggccaagggttccgacgctgttctcctcggcgccattggaggctataagtgggataccaatgagaagcacctcaagcctgagaccgggctgctgcagctacgtgccggactcggggtctttgccaatctgcgaccagctgcagttttgccgcagttggtagacgcatccactctgaagaaagaggtagctgaaggtgttgacatcatggttgtcagggagcttactggaggcatctactttggcaaacccaggggttttggaacaaatgacaagggagacgatattggcttcaacacagaagtttattcagcttctgagatcgatcgtattgcacgagttgcatttgaggtcgctcgcaagagaagagggaaactatgctcggttgataaagcaaatgtgctggaggcatccatgctttggaggaaaaaggtgactgcactagcctctgaattccctgacattgagctctcacacatgtatgttgacaatgctgcaatgcagcttgtcaggaatcctaagcagtttgatacaattgtcacaaacaatatttttggtgacatattatctgatgaagcatcaatgattacgggaagcattggaatgcttccatctgcgagtgtcggtgaatcgggacctggtctttttgaacctattcatggctctgcccctgatattgctggacaggacaaggccaatccattagctacaattcttagcgcagcgatgctattgcgatatggcctaggagaagaaaatgctgcgaggagaattgaagctgcagttacagaaacactgaaccatgggttccgaactggggacatatattctcctggaacaacactggttggatgcaagcggatgggggaggaagtcttgaagacagtggagtcactgaaggaagtggctgctgtgaactgatgcatgctggtacttgattcattgcattttattagaagtcgagccgagcgtaagagagcatggtgtctgggttattgttgatgttgaattgaaagtttagtggctgaaccgatagccacttcgcatttctgtggtttgtttgtctccctgtagttttttctttggtacaaggaaaggataggcatatgtttgctcaataaaatgggatagtttatgccgctttgaataaaagatggagttctgttttggactaaatatctttaaaactcctactgttagcagattgaaacagtacagaccagatcacaacagattgaaacgttggccacatggctctttggagaaggaaatggacgcgaacagaaaaccaagacgacgagcactggg

SEQ ID NO: 99122 - DNA, 185 bp, Zea Mays
tttgaaatgttccttttcctttttttctcatatcagtgcctcttgccagtttttttcttttctttctatccaacaatcgagcagtggttacatagcatagatgttattattgacatgtatagctgaagaccgatagtgataacagtggagcatgtcctgttactaattactacattgaaaccaca

SEQ ID NO: 99123 - DNA, 624 bp, Zea Mays
atggccagcagcgtcggcaagatggctgccgtggtggacaccgagaacccggcggccaccgtcgtcgtggggccgccgtgcgcggtggacgacgacgacctgtcgcagcgcgccaactggctgcgcgcggcggtgctgggcgccaacgacggcctggtgtcgacggcgtcgctgatgctgggcgtgggcgccgtgaaggcggacgcgcgcgccatggtcatctccgggttcgcgggcctcctggcgggcgcgtgcagcatggccatcggcgagttcgtgtccgtgtgctcccagcgcgacgtggagctggcgcggctggaccgcggcgccgaggaggagaaggcactgcccagccccgtgcaggccgccgcggcgtccgcgctcgccttctccgtgggcgcgctcctgccgctgctggccgccgggttcgtcaccgactacaggctgcggattggggtggtggccgccgtggccaccgcgacgctggccgcgttcggctgcgtgggcgccgtgctggggcgagctcccgtggcgaggtcgtgcgcgcgcgtggtaagcggcggctgggccgccatggccgtcaccttcggcctcatgaggctcttcaaggccagcggcatatga

SEQ ID NO: 99124 - DNA, 1792 bp, Zea Mays
gtcccaatccatttcgctacccgtcccccgtgtcccaaagacccctctcttcggtcacgaggcagccgagagcgcacttgcatagcggtagcggcgtgccgtgtcgtgtcctctcgtctcgtctcgtctcgtctgcagtagcagtctccgcatccgctccctcctcctcctccgtcgatttggattcgcagcggcggcggcggccaatcaaagcaatcatcacccagtcgcccagcccaacagacgctccagtccccagccctcccacccgcatcgatcgatgcgaggcacaatgccggccaccgactcctcctcctcgtcgtcgccggcggcggcgccgctgtcctccatcggccgctccatccgctcgctccgccgtgaccagaaccagatccactccttcccgccgccgccagacgccacagacgccttccagcgccgcgccgcccaactcctggccgacctcccggcagccgacgacgtcctctccctcgcctggacgcgccgcctcctcgaatccttcctcctctgcctcgaggagttccgcgccctgctcttcggctccggggactcgcccgccgcgcggcccccgctcgaccgcctcgtcgccgacttctccgaccgcgccgtcaaggcgctcgacctctgcaacgccgtccgcgacggcctcgacctcgtccgccagtggcgcaagcacctcgccatcgccgcagccgtcctcgcctcgtcctctgattcctcctcgccgctcggggaggcccagatccgccgcgcccgcaaggcgctcaccgacctcaccatcctcatgctcgacgacagggacggcgggggcgtcgtcggcccagcgcaaccgatccttcggccgcgccaacgagaagccccctcgccaccaccgccggagcagcagcggcgggagctccggctccggctccggctcccacctcaggtccctctcctggagcgtgtcccgggcctggtctgccgcgcgccagctgcaggccatcgggggaggactccccgtgccccgcccgcacgacaacgctgccacgggaggcctcgcctccgccgtctacaccatgggcgccgtcctcttcatcgtcgccttcgcgctcgtcgccgcaatcccgtgccaggaccgcggcctccacgcgcatttctccgtcatcaggaacctcccctgctcggcccccatcacaacgctctacgagcgcatcctcgacgagtccaagaagaaggaccgcaagaactcgtgcggcctgctcaaggagatccaccagattgagctctgctccaggcacctcatggagatcactgacgccgccgacttcccgttgcgcgaggacaaggacgccgtcttgcgggaggccgcgcaggacctagtgcacctgtgcgaatccatcaaggaagggctcgacccgctcgagcgccaggtcagagagatgttccacaggattgtgcgcacccgcacagaaatccttgactgcttgagtaagccacatggcaccgggtgatgggatacaggagattgccagcccgtttgcttgctgtgatgccccttaaccaaacattcttgtgaaatgcagcagcggtgttcagatgaggtagccttttctctgcataagttagcaactactgcatcatacaaatgcgtcttcatagaggcttgtccttctgttttatataaattggtttgtttattatttttatttcattttctcatctgtgtagattgtgaatccatacttggcagtgcttcgtagtaatggtctaatactatttgttccattctttt

SEQ ID NO: 99125 - DNA, 1660 bp, Zea Mays
atgcgaggcacaatgccggccaccgactcctcctcctcgtcgtcgccggcggcggcgccgctgtcctccatcggccgctccatccgctcgctccgccgtgaccagaaccagatccactccttcccgccgccgccagacgccacagacgccttccagcgccgcgccgcccaactcctggccgacctcccggcagccgacgacgtcctctccctcgcctggacgcgccgcctcctcgaatccttcctcctctgcctcgaggagttccgcgccctgctcttcggctccggggactcgcccgccgcgcggcccccgctcgaccgcctcgtcgccgacttctccgaccgcgccgtcaaggcgctcgacctctgcaacgccgtccgcgacggcctcgacctcgtccgccagtggcgcaagcacctcgccatcgccgcagccgtcctcgcctcgtcctctgattcctcctcgccgctcggggaggcccagatccgccgcgcccgcaaggcgctcaccgacctcaccatcctcatgctcgacgacagggacggcgggggcgtcgtcggcccagcgcaaccgatccttcggccgcgccaacgagaagccccctcgccaccaccgccggagcagcagcggcgggagctccggctccggctccggctcccacctcaggtccctctcctggagcgtgtcccgggcctggtctgccgcgcgccagctgcaggccatcgggggaggactccccgtgccccgcccgcacgacaacgctgccacgggaggcctcgcctccgccgtctacaccatgggcgccgtcctcttcatcgtcgccttcgcgctcgtcgccgcaatcccgtgccaggaccgcggcctccacgcgcatttctccgtcatcaggaacctcccctgctcggcccccatcacaacgctctacgagcgcatcctcgacgagtccaagaagaaggaccgcaagaactcgtgcggcctgctcaaggagatccaccagattgagctctgctccaggcacctcatggagatcactgacgccgccgacttcccgttgcgcgaggacaaggacgccgtcttgcgggaggccgcgcaggacctagtgcacctgtgcgaatccatcaaggaagggctcgacccgctcgagcgccaggtcagagagatgttccacaggattgtgcgcacccgcacagaaatccttgactgcttgagtaagccacatggcaccgggtgatgggatacaggagattgccagcccgtttgcttgctgtgatgccccttaaccaaacattcttgtgaaatgcagcagcggtgttcagatgaggtagccttttctctgcataagttagcaactactgcatcatacaaatgcgtcttcatagaggcttgtccttctgttttatataaattggtttgtttattatttttatttcattttctcatctgtgtagattgtgaatccatacttggcagtgcttcgtagtaatggtctaatactatttgttccattcttttcatctggtttgatgtggtagtgattagttaatgtttatatggttagcatctgtgccaacacagaaacgaagcaggcttagtgcccgttcgtttatctcagattgagaccaggaactatttgagctaatcataccattccagagtaaac

SEQ ID NO: 99126 - DNA, 2651 bp, Zea Mays
gcctctgcgtctcttattccctctcttttttttttatagtacaacacaatccacccgcgtcggcacgagcacccacagcagttggcgcgcaccaaaaccctaccctccctctgctctcagccgccaacgccatgggctccaccgccgctgcctccgtgctcccggtgtccgccggctccggcgagaacctcgtcctcatcctcgactacggctcgcagtacacgcacctcatcacccgccgcgtgcgccagctcggcgtcctctccctctgcgtgtccggcacggcgccgctcgcctccctggagggcctccgcccacgcgccgtcatcctctccggcgggccccactcagtccacgcccccggggcgcccgccttccccgagggattcctgggcttcgcggctgccgcgggcgcgcacgtgctcggcgtctgctatgggatgcagctcctcgtgcagtcccttggaggcgccgttgtgtccggggagcgccaggagtacgggaaaatggacgttgaggtgacggcggcctcctccgcgctctacgggcaggcggagaccgggaagcgccagacggtgtggatgagccatggcgacgaggtggttaggctgccggaagggttcgaggtggttgctcgcagcgtgcagggagccgtcgcggccattgagaaccgggagaatcgcttttatgggctccaataccaccccgaggttacacattcagcccaaggaatggaaacactgcgccgctttctctttgatgtttgtgggatcaaagctgattggaagatgcaagatgtgctcgatgaagaaatcaagaccatccaaagcacggttggccctgacgagcatgttatctgtgcattgtcaggtggtgttgattcaacggtcgccgccactctcgttcacaaggcgataggagataggcttcactgtgtttttgttgataatggtctattaaggtacaaggagggagagcgagtaatgacaacctttgaaagtgatttgcacctgccagtgacatgtgttgatgcctcagagcaatttctcagcaagttaaagggtgtcgaagacccagagaagaaaagaaagatcattggcagggaattcatagctgtctttgatgactttgctcacaagctggaacagaagataggaaaaaggcccgaatatttagttcaagggactttgtaccctgatgtaattgaatcatgcccacctcctgggagtggaaggacacattcccacaccatcaaaagccatcacaacgtaggtggccttccaaaagatatgaaattaaaacttattgaaccactcaagctcctattcaaggacgaggtgcggaagttggggggtattttgaatgtcccagattcatttttgaagcgacacccatttcctgggcctggtcttgcagtacgtgtcctaggtgatgttacacaaggcaatgctttggaggttcttcgtcaggtggacgagatatttgttcagtctattaaagacgcaggcctgtatgataaaatttggcaagcttttgctgtgttcttgccagtacagacagttggagttcagggtgaccagcgaacccactccaatgccgttgttttaagggcaatcaccagtgaggatggcatgactgcagattggtactattttgagcatgcattcctggtagatgtggtaaacaagatttgcaacaatgtgcgtggcatcaaccgcgtttgccaggacatcacatctaagccgcctgcaacggtggagtgggagtaggaggatgggagggaccctatggtctggtctgtctgtctgtcttgggttaaaacccgctatgtcatgtcactgctctcaacacgttgcatggatgtcacaaatagcaagcagttaagagtgaccattcgtcagtcaatacattaggtttatcatgaattgtttgttacttaatacaaggactgcattgcatggattgtaaagtgtaaccaccagtagctaagccttgtagacaacgacaaagcatgggaggatggccctggggttgaacaccagcagctcctccaggttggagtacaccccggccgaccccgcaaccgagtcgtactctgactcctcggcggcgtcggcgacggcctcctcctctggtaccgcttctttgggccgcttcacccttcccgcgatgacccggcacaccagcatcgcccttggagtggtttcctcatccagtccggcgccagcctccgcagcgtcgtgcgcgcggccgctcgtggccatggtcagcaccccgccgctgctgaagccgtcgcggatgatgccgcacgctgcgcaggtccccgcggcgtcgcagaggtgcgtggcgccgttgaggccgagcgagcaggccagggtggcgcagtggaaccggagcagctcgttgccgtcggcggtgcagcgcgggtgcctgttgctgttggccgccgctaccgccagctgctcggcgcccgccctggccttgacagcgtcacggtactcctcgaagcgggccagcgttctgggcgtgttgttcaccttgaggatgcggtcgaccttgcacacggggctctgcttcttgagccagctggactggaagatgatctcgatgatgttgcggctcgtgtcatcagtgccaagctcggacactgc

SEQ ID NO: 99127 - DNA, 2491 bp, Zea Mays
gcctctgcgtctcttattccctctcttttttttttatagtacaacacaatccacccgcgtcggcacgagcacccacagcagttggcgcgcaccaaaaccctaccctccctctgctctcagccgccaacgccatgggctccaccgccgctgcctccgtgctcccggtgtccgccggctccggcgagaacctcgtcctcatcctcgactacggctcgcagtacacgcacctcatcacccgccgcgtgcgccagctcggcgtcctctccctctgcgtgtccggcacggcgccgctcgcctccctggagggcctccgcccacgcgccgtcatcctctccggcgggccccactcagtccacgcccccggggcgcccgccttccccgagggattcctgggcttcgcggctgccgcgggcgcgcacgtgctcggcgtctgctatgggatgcagctcctcgtgcagtcccttggaggcgccgttgtgtccggggagcgccaggagtacgggaaaatggacgttgaggtgacggcggcctcctccgcgctctacgggcaggcggagaccgggaagcgccagacggtgtggatgagccatggcgacgaggtggttaggctgccggaagggttcgaggtggttgctcgcagcgtgcagggagccgtcgcggccattgagaaccgggagaatcgcttttatgggctccaataccaccccgaggtggtgttgattcaacggtcgccgccactctcgttcacaaggcgataggagataggcttcactgtgtttttgttgataatggtctattaaggtacaaggagggagagcgagtaatgacaacctttgaaagtgatttgcacctgccagtgacatgtgttgatgcctcagagcaatttctcagcaagttaaagggtgtcgaagacccagagaagaaaagaaagatcattggcagggaattcatagctgtctttgatgactttgctcacaagctggaacagaagataggaaaaaggcccgaatatttagttcaagggactttgtaccctgatgtaattgaatcatgcccacctcctgggagtggaaggacacattcccacaccatcaaaagccatcacaacgtaggtggccttccaaaagatatgaaattaaaacttattgaaccactcaagctcctattcaaggacgaggtgcggaagttggggggtattttgaatgtcccagattcatttttgaagcgacacccatttcctgggcctggtcttgcagtacgtgtcctaggtgatgttacacaaggcaatgctttggaggttcttcgtcaggtggacgagatatttgttcagtctattaaagacgcaggcctgtatgataaaatttggcaagcttttgctgtgttcttgccagtacagacagttggagttcagggtgaccagcgaacccactccaatgccgttgttttaagggcaatcaccagtgaggatggcatgactgcagattggtactattttgagcatgcattcctggtagatgtggtaaacaagatttgcaacaatgtgcgtggcatcaaccgcgtttgccaggacatcacatctaagccgcctgcaacggtggagtgggagtaggaggatgggagggaccctatggtctggtctgtctgtctgtcttgggttaaaacccgctatgtcatgtcactgctctcaacacgttgcatggatgtcacaaatagcaagcagttaagagtgaccattcgtcagtcaatacattaggtttatcatgaattgtttgttacttaatacaaggactgcattgcatggattgtaaagtgtaaccaccagtagctaagccttgtagacaacgacaaagcatgggaggatggccctggggttgaacaccagcagctcctccaggttggagtacaccccggccgaccccgcaaccgagtcgtactctgactcctcggcggcgtcggcgacggcctcctcctctggtaccgcttctttgggccgcttcacccttcccgcgatgacccggcacaccagcatcgcccttggagtggtttcctcatccagtccggcgccagcctccgcagcgtcgtgcgcgcggccgctcgtggccatggtcagcaccccgccgctgctgaagccgtcgcggatgatgccgcacgctgcgcaggtccccgcggcgtcgcagaggtgcgtggcgccgttgaggccgagcgagcaggccagggtggcgcagtggaaccggagcagctcgttgccgtcggcggtgcagcgcgggtgcctgttgctgttggccgccgctaccgccagctgctcggcgcccgccctggccttgacagcgtcacggtactcctcgaagcgggccagcgttctgggcgtgttgttcaccttgaggatgcggtcgaccttgcacacggggctctgcttcttgagccagctggactggaagatgatctcgatgatgttgcggctcgtgtcatcagtgccaagctcggacactgc

SEQ ID NO: 99128 - DNA, 80 bp, Zea Mays
catttcacttcaacagactatctatctaattttgttagtcaggtgactagacaaatttggctaatgagagagtcaatttg

SEQ ID NO: 99129 - DNA, 1468 bp, Zea Mays
gctgcttgcggcacgaggaagaaggcacacacacttagacttagctatagtagctactactgtagtagatatatatgggtatggctgcaacaaggaggacgagagcaagctcaggtaataatgtcctcctcctgctggccatcggccttgtgttctccgcggcatcgacgacgacaccggctgtagcagctgcggcgttgaacggcagcgacgacgacattggtgctgctgccagggcggcgggcctgtccgtggacttccacgcggcgtcgtgcccggacctggacggcatcgtgcgctccgccgttgaggaggcgcggcggtgggacgcccaggtcacggcgggcctcctccgcatcttcttccacgactgcttcccgcagggctgcgacgcgtcgatcctgctgggcaggaaccagggcggcagcgagcaggacgcaccccagaacacgggcctgcagcaggcggcgctggacctcgtcgagaggatccgcggcagggtgcactcccgctgcggcgcctccgtctcctgcgccgacatcctggcgctcgccaccagccacgccgtcaaccaggccggcggccccttcatccctatggagctgggccgcagcgacagcaggggccccgctccaggatgggccgtcaacaggctcccgccccccaccgatggcgtctccgagctcctcggcaacttcggtaacaggggcctcgatggctccgacgtcgtggtgctctccggcgcgcacaccgtgggcgtggcgcgttgctcctcgttccaggaccgtatcgacaagaagaccggcaaggataacttcgagtgggggctcaccggctactgcaacggagacaaggagaagaagcacgcgctggaccgtacgcccttcaacttcgacaacagctacttcgtggagctgcagaacggcagaggggtgctcacctccgaccaggcgctctacagggacggccgcaccaggtggctcgtcgaccgctgcgcctccagccaggacgaattcttcaagcgcttcgtggaatccatgctcaagctcagcaggctcaggggggccgatccgggcccagtgcgcaacaactgcttcgtccgcgccagcttcggcgctagtagcgctaccaaagacgaccttgtcattgacaccaccgccggagacggagacggagacgaggaccttattcttgcagcagctgcatgatcgctgctgctacagtgtacttacatccgatccggccgctatcatatcgtcgtcgtcgtcgaataattaagcagatcaacatgtttgtttatttgcttattagtttctattccgcagtccgcactagctagctagctgctgtagtacctctcgtaatacaatgcatgcatgtaccttgcgtgttttagcgtggcacgcctccttaattcactcggtatttctttgatcatgcaacaaagcattttggcaaggtgacattt

SEQ ID NO: 99130 - DNA, 1604 bp, Zea Mays
attacaatcgcaaataacttcatccgcaccagaggcgttctccctcccccgctgcaccttctgtcacgagtccctcgcccggtgcggcgcgccgcctgctcgacgaaatggggcagtgggacgcgctagtggacgccgcgctcgcgaggctggaggccaggagcctgctacgtgccacgcgccccatcgcgctcgcggcgccgaccgcggcgccgaggaccttcgacggcccggggccttgggaccatgccgccgtcgagatccgcctcgaccgcgacaccctgcaccagtggctggccgaagatttggttaggcgatgaggcgggtggacaggaagaacagctggatggaaacctgatcctcttctcagggaatgactacatgggcctcagctcgcatccggcagtccgtgaggctgctgtgaaggcagctcaagattatggcatggggccaagaggctcggcgttgatatgtggttatactacttatcacaaattggtggaggaatcattagcacgactgaagaaaaaagaggattgccttctttgccccactggattttctgccaacatggctgcaattacagccctggggagtattacctctcttttgtcccctggaagaaaacctgcagagcacgagagaattgccatcttctcagatgcgctgaaccatgcttcaatcattgatgggattcgccttttggagcggcagcaagaagcattagtgtttgtgtacaagcactgtgacatgttccatctcgatttcctgctgtccagttgctcattggaaaagaaagttgttgtcacagatagcctgttcagcatggatggtgatttcgctccatttcctgaacttattaaattacgcagaaagtatggttatttgttggtcatcgatgatgctcatgggacacttgtttgcggtgagaatggtggtggtgcagctgagctgtttgaatgtgaaaaggacattgacataggtgttggcaccttaagcaaggctgccggctgccagggtggttttataacatgcagcactcaatggaaaaggctgattcagtcgcgaggtcgctcgttcatattttcaactgctttgccagtgccagttgttgcttctgtgcatgcggcactctatgtctcgagtaaggagacatggcggagatcagtgatctggaggcatgtgcagtattttgcctcattgaccaagctcgagataactagtcccataatttccattgtggttggaagtgaagcaggagcgctcagggctagcaggtatttgctaagatctggatttcatgttacaccaatcagaccacccacggtgccacccaactcgtgcaggctgagaatcactcttagtgcttcccattcctcggacgacatcaaaaggctggttgatgcactcacaccatggctccctgtcaaatatggtaatgggagctatgctacagcttcgaaactctaacccatcggaggagagtctggtatcctgcggaaagaggcggcatgctagtgggtggttgacgcgtacgcatttatatattctgtggcgtgacgcctacgtccttccccatttataagcaaatactactgttttgt

SEQ ID NO: 99131 - DNA, 1867 bp, Zea Mays
attacaatcgcaaataacttcatccgcaccagaggcgttctccctcccccgctgcaccttctgtcacgagtccctcgcccggtgcggcgcgccgcctgctcgacgaaatggggcagtgggacgcgctagtggacgccgcgctcgcgaggctggaggccaggagcctgctacgtgccacgcgccccatcgcgctcgcggcgccgaccgcggcgccgaggaccttcgacggcccggggccttgggaccatgccgccgtcgagatccgcctcgaccgcgacaccctgcaccagtggctggccgaaggcgatgaggcgggtggacaggaagaacagctggatggaaacctgatcctcttctcagggaatgactacatgggcctcagctcgcatccggcagtccgtgaggctgctgtgaaggcagctcaagattatggcatggggccaagaggctcggcgttgatatgtggttatactacttatcacaaattggtggaggaatcattagcacgactgaagaaaaaagaggattgccttctttgccccactggattttctgccaacatggctgcaattacagccctggggagtattacctctcttttgtcccctggaagaaaacctgcagagcacgagagaattgccatcttctcagatgcgctgaaccatgcttcaatcattgatgggattcgccttttggagcggcagcaagaagcattagtgtttgtgtacaagcactgtgacatgttccatctcgatttcctgctgtccagttgctcattggaaaagaaagttgttgtcacagataggcaagtcaccactgactaagcgttggtgtttttgttaatgctgatgcgtagcaattgcttgtatatgtactttattagactaacaatatgaaaaccccttttattttataataaagtgcagcctgttcagcatggatggtgatttcgctccatttcctgaacttattaaattacgcagaaagtatggttatttgttggtcatcgatgatgctcatgggacacttgtttgcggtgagaatggtggtggtgcagctgagctgtttgaatgtgaaaaggacattgacataggtgttggcaccttaagcaaggctgccggctgccagggtggttttataacatgcagcactcaatggaaaaggctgattcagtcgcgaggtcgctcgttcatattttcaactgctttgccagtgccagttgttgcttctgtgcatgcggcactctatgtctcgagtaaggagacatggcggagatcagtgatctggaggcatgtgcagtattttgcctcattgaccaagctcgagataactagtcccataatttccattgtggttggaagtgaagcaggagcgctcagggctagcaggtatttgctaagatctggatttcatgttacaccaatcagaccacccacggtgccacccaactcgtgcaggctgagaatcactcttagtgcttcccattcctcggacgacatcaaaaggctggttgatgcactcacaccatggctccctgtcaaatatggtaatgggagctatgctacagcttcgaaactctaacccatcggaggagagtctggtatcctgcggaaagaggcggcatgctagtgggtggttgacgcgtacgcatttatatattctgtggcgtgacgcctacgtccttccccatttataagcaaatactactgttttgttagataccaatgttgaaataggcttattattattattattattagcaagacaccgtcgtgacaccataaatatttaggttgcatctagttttggaacgattttctctattttctataatgggatgatctcacgaagcaatattattgtttgt

SEQ ID NO: 99132 - DNA, 1796 bp, Zea Mays
attacaatcgcaaataacttcatccgcaccagaggcgttctccctcccccgctgcaccttctgtcacgagtccctcgcccggtgcggcgcgccgcctgctcgacgaaatggggcagtgggacgcgctagtggacgccgcgctcgcgaggctggaggccaggagcctgctacgtgccacgcgccccatcgcgctcgcggcgccgaccgcggcgccgaggaccttcgacggcccggggccttgggaccatgccgccgtcgagatccgcctcgaccgcgacaccctgcaccagtggctggccgaaggcgatgaggcgggtggacaggaagaacagctggatggaaacctgatcctcttctcagggaatgactacatgggcctcagctcgcatccggcagtccgtgaggctgctgtgaaggcagctcaagattatggcatggggccaagaggctcggcgttgatatgtggttatactacttatcacaaattggtggaggaatcattagcacgactgaagaaaaaagaggattgccttctttgccccactggattttctgccaacatggctgcaattacagccctggggagtattacctctcttttgtcccctggaagaaaacctgcagagcacgagagaattgccatcttctcagatgcgctgaaccatgcttcaatcattgatgggattcgccttttggagcggcagcaagaagcattagtgtttgtgtacaagcactgtgacatgttccatctcgatttcctgctgtccagttgctcattggaaaagaaagttgttgtcacagatagcctgttcagcatggatggtgatttcgctccatttcctgaacttattaaattacgcagaaagtatggttatttgttggtcatcgatgatgctcatgggacacttgtttgcggtgagaatggtggtggtgcagctgagctgtttgaatgtgaaaaggacattgacataggtgttggcaccttaagcaaggctgccggctgccagggtggttttataacatgcagcactcaatggaaaaggctgattcagtcgcgaggtcgctcgttcatattttcaactgctttgccagtgccagttgttgcttctgtgcatgcggcactctatgtctcgagtaaggagacatggcggagatcagtgatctggaggcatgtgcagtattttgcctcattgaccaagctcgagataactagtcccataatttccattgtggttggaagtgaagcaggagcgctcagggctagcaggtatttgctaagatctggatttcatgttacaccaatcagaccacccacggtgccacccaactcgtgcaggctgagaatcactcttagtgcttcccattcctcggacgacatcaaaaggctggttgatgcactcacaccatggctccctgtcaaatatggtaatgggagctatgctacagcttcgaaactctaacccatcggaggagagtctggtatcctgcggaaagaggcggcatgctagtgggtggttgacgcgtacgcatttatatattctgtggcgtgacgcctacgtccttccccatttataagcaaatactactgttttgttagataccaatgttgaaataggcttattattattattattattagcaagacaccgtcgtgacaccataaatatttaggttgcatctagttttggaacgattttctctattttctataatgggatgatctcacgaagcaatattattgtttgtaatgaggatggagccatcttggggtgatcatcatcaaaacacaagtaaaa

SEQ ID NO: 99133 - DNA, 1467 bp, Zea Mays
gataagaaatggtgagcaggcaagcatggagtggagtgcttttaaatttgggtgtcgctgtcgttgaaagcgatgggtggctagttttacagacagacagcagcacctgctcctccgtctggactgactgactagtgactcagctccacccacatcccccttcgtcgtcttctccctccctgctagctgacctccaatccacgataaggcaagataagctagctaggaaggcaagggatccgatggacaagtacgagcccgttcgcgagatcggggcgggcaacttcggggtggccaagctgatgaggaacaaggacacgagggagctggtggccatgaagttcatagagcgaggaaacaggatcgacgagaacgtgttccgcgagatcgtgaaccaccgctccctccgccaccccaacatcatccggttcaaggaggtggtgctgactcccacgcaccttgcgatcgtgatggagtacgctgcgggcggggagctgttcgagcgcatctgcgacgccgggcggttccacgaggacgaggcgcgctacttcttccagcagctggtttgcggcgtcagcttctgccacgccatgaacatctgccaccgggacctcaagctggagaacacgctgctggacggcagcccggcgccgcgcctcaagatctgcgacttcggctactccaagtcctcggtgctgcactcgcgaccgaagtcaacggtgggcacgccggcgtacatcgcgcccgaggtgctgtcgcggcgagagtacgacgggaagcacgccgacgtctggtcgtgcggagtcacgctctacgtcatgctggtgggggcgtacccgttcgaggatccaaaggacccaaagaacttcaggaagacaatacagcgcatcatgtcggttcagtacaagatccccgagtacgtgcacgtctcccacaactgccgccacctcctctcccgcatcttcgtccagaacccgtacaagaggatcaccatgagcgagatcaagacccacccctggtacctcaagaacctgccgagggagctcaaggaggaggcgcaggcagcctactactacagccgccagggagacagcagcagcagcagcagcaataatgcgacagcagcacccgcctactcgtcgcagagcgtggaggagatcttgaggatcgtgcaggaggcgcagacggtgcccaagccaccgtccaggcccgacgaagcagagcaacaggaagaagaagacgaccatgacgatgacgacgactacgacagaacggtgcggcaggtgcacgccagcggagagttcgacatgattatgagcagactccaaatctgactcttagtatcttgcctgccattggtagttttgtgttgtaatgcgtgcctgtaacatgaatttcagtcaaactatacactatcataatggtgatggtattgatgaaaatattcagtggtaggattctctctca

SEQ ID NO: 99134 - DNA, 669 bp, Zea Mays
atggtgtacgtggattcctgggacgagttcgtggagcggtccgtgcagctcttccgcgccgaccccaacaccacccgctacgtgatgaagtaccggcactgcgaggggaagcttgtgctcaaggtcactgatgaccgcgagcttatagaattgggtgatcgaaggatcataagttcttttgttggatggatctgtctgaacttcagaggcgtcatggattgctgtagcaaatggcgttgcaggcctaatgtcgagtatctgttcatgctcatactatgtgcctccatgtgcacatttcagttgctaactgagatttctaattatacggaaacaattgaagccgacatggagtacaacacaaaactatctgagttctgtttagcaaaagctggtccttcgggtgataaagctcatatgcctgaacctgaagacatattggacaagggcatggaatcagtgggcactggcactctagacaatgatgggacacaaacacaaccatcacaatcacaaggggctgctgatcaagaggctgtagcctttcatacattggtcatgcaatggaggttgcagcttacaagttacaagatcacaaaaagcctggaggttgtagcttaccagtccacggtcagcaaagagttgtgtgaggctgtgactttgagaacttga

SEQ ID NO: 99135 - DNA, 112 bp, Zea Mays
gccgatgcatagtgtttatgagtgtaaaatgttatcgtaacagattaaaatatctcgaggatgttcccaagagttttttggaatctttggaatgtttctttgagtattaaat

SEQ ID NO: 99136 - DNA, 1900 bp, Zea Mays
tatctatatatgtgacacacgctttttttctgttctccatcgtcaaccccacgcatggccgcatgcaactttttgcctgcattggtgcgtcttgtgcggttgagaaaatagaggaaagaaatatcatatgggtcccacttcctattttctctcttggcgtaatctgcatgctacccaaaccaaccacgctcggcctctctctccagtctccacccaccgcgcatgccatgcgtcgtagctgcgcatcgcgcccaccaggccgcccaatctcctattcatcttctccaaactgcctctccccacccatctcgcccatgttcgcgaaacccagagccgaaccgcccccagtcgacctcggctctccggcgagctgccctccatgtcctggccacacagtcgttcgtcgcgccgatcgcccaggaagatctgtgatgcgctcgtcgttgccgagggttatggtatgctgacgctgtcggcgacggtgccggcgctgcagccgtcgcacatgccctgcagggaggatggcgtctcgtcgtcgtcatgccaacccgggtggccgcaggtggccttcttctacgtgtccctgtacctgatcgccatcgcgcagggcgccgacaagccgtgcgggctggctttcgcggcggaccagttcgacgcggagcaccagggggagcgcgcctcccgcgggtccctattcaactggtggttcttctgcatggccatcggcatctccgtgtcagtctccgtggtgggctacatccaggagtacgtcgggtgggggctcggcttcggcgtcccctgcgccatcgtgctctgcgccttcctcgtcttcctgttgggcaccccgacgtaccgcctgtacgcacccacgccggaagccaagtccccgttccgccgcctggcacgcggcctggccgccaacgccaacaaaacaggaggcctctccgcctcgcattcggaggaggaggaagcggcagcagacgcgcggtgcgtgctgcgcctgctgcccatctgggcggcgagcctggcgtacggcgtggtgtacgcgcagattatgacgctgttcaacaagcaggggcgcaccctggaccgccacatcggggacggccttgagctgcctccggcggcgctgcagacgctgggccccgcgagcatcctgctgttcgtgcctgtttacgaccgcgcggtggtgccggcgctgcggtgggcgacgggcaacccgtcggggctgagcatgctgcagcgcgtgggcgcgggcatggcggtgtcgctggcgggcgtggcggtggccgcgctggtggaggcgcggcggctggcgatggcgcgggagcacgggttggtggacgacccgtcggcgacggtgcccatgagctgggcgtggatcgtgccgcagtacgccatgatgggggtggcggacgtgctggccgtggtgggcctgcaggagctcttctacgaccagatgcccgacgggctccgcagcctggggctggcgctctacctcagcgtcatgggcatcgggggattcatcagcagtctgctcatctccctcatcgacggcgtcaccggcagcggtggcggggacagctggttcgccgacaacctcaaccgcgcgcacgtcgactacttctactggctgctggcggggctcagcgccgtcgaactcgcgctcttcctctactttgcgcgctcctacgtctacaagcacaagcccaattaatcctgctagtgcagtctgtacagatgaatggaaagcagatgcaggcatgcagcccgtcgtcttcatgttttacttgtccttgtaaaacaaggcaaactcagctcaaagtcaaattcagattctagcccccaataattttcgtcggccgccgcgtggctcgctatccggacatggtggccgctc

SEQ ID NO: 99137 - DNA, 2056 bp, Zea Mays
ctgtcagccgagccaagttccgaatgggggtggcttggcttggctggctacaagtcactcaaattgaaataagactgaaacggacaaaggcaaacacagcaagcaaagcaggaatcggaggtagacgacgaccaccacggggataacaaccaaacctcccaaataccatccacgaacgaaagggaagggaaggtcgtttaggcggcgcgccgaggccgtggctatggaccccaacggcggcggcgacaccatcctcggcgatcccctccttcccctctcgcagtccagcaagcagcagcaggatcctctcgccggcgtctccgactaccttgggcggtccgtgcaccgcggaagctccgggggatggagatccgcgctcttcgtcgtgggcgtcgagatcgccggtagcttcgcctacttcggcatctctgccaacctaatcacgtacctgactggtccgctacgacagtccaacgcctccgccgccgcctccgtcaacgcctggtccggcacggcctgcatcatgcccctgctcggcgccttcctcgccgacgcctacctgggccgctaccgatccgtcatcatcgcctgcaccctctacgtcctgggttatggtatgctgacgctgtcggcgacggtgccggcgctgcagccgtcgcacatgccctgcagggaggatggcgtctcgtcgtcgtcatgccaacccgggtggccgcaggtggccttcttctacgtgtccctgtacctgatcgccatcgcgcagggcgccgacaagccgtgcgggctggctttcgcggcggaccagttcgacgcggagcaccagggggagcgcgcctcccgcgggtccctattcaactggtggttcttctgcatggccatcggcatctccgtgtcagtctccgtggtgggctacatccaggagtacgtcgggtgggggctcggcttcggcgtcccctgcgccatcgtgctctgcgccttcctcgtcttcctgttgggcaccccgacgtaccgcctgtacgcacccacgccggaagccaagtccccgttccgccgcctggcacgcggcctggccgccaacgccaacaaaacaggaggcctctccgcctcgcattcggaggaggaggaagcggcagcagacgcgcggtgcgtgctgcgcctgctgcccatctgggcggcgagcctggcgtacggcgtggtgtacgcgcagattatgacgctgttcaacaagcaggggcgcaccctggaccgccacatcggggacggccttgagctgcctccggcggcgctgcagacgctgggccccgcgagcatcctgctgttcgtgcctgtttacgaccgcgcggtggtgccggcgctgcggtgggcgacgggcaacccgtcggggctgagcatgctgcagcgcgtgggcgcgggcatggcggtgtcgctggcgggcgtggcggtggccgcgctggtggaggcgcggcggctggcgatggcgcgggagcacgggttggtggacgacccgtcggcgacggtgcccatgagctgggcgtggatcgtgccgcagtacgccatgatgggggtggcggacgtgctggccgtggtgggcctgcaggagctcttctacgaccagatgcccgacgggctccgcagcctggggctggcgctctacctcagcgtcatgggcatcgggggattcatcagcagtctgctcatctccctcatcgacggcgtcaccggcagcggtggcggggacagctggttcgccgacaacctcaaccgcgcgcacgtcgactacttctactggctgctggcggggctcagcgccgtcgaactcgcgctcttcctctactttgcgcgctcctacgtctacaagcacaagcccaattaatcctgctagtgcagtctgtacagatgaatggaaagcagatgcaggcatgcagcccgtcgtcttcatgttttacttgtccttgtaaaacaaggcaaactcagctcaaagtcaaattcagattctagcccccaataattttcgtcggccgccgcgtggctcgctatccggacatggtggccgctc

SEQ ID NO: 99138 - DNA, 1676 bp, Zea Mays
cttgcgcttttcactagtttggattcggacttcctgagctccgccgattccttcctcctccacctcctctcctcccccagccgccgccgctgctcatcttatctttatctcatccccatcgcccgcccttgctccgcccccgggaatcgtcgatggcggcgtcggcgttgtggcagccgcaggagcaggggctccgcgagatctgcgcccacctggaggcgcatatctcacccaactctgaccaggcccgcatctggcagcagctccagcagtacagccagttccccgacttcaacaattacctactcttcatcctggcccgcggagaggggaaatctattgaagttagacaggcagctggtctattactgaaaaacaatctgcgaacgacttacatttccatgcaatcttcatcccagcattatgttaagtctgagctgttaccatgtataggggcaaccaatagggcaattagatccacagttggaacagtgatcagtgtgcttttccaaattgtacgagttgctggatggattgagttgtttcaggcactccataagtgtttggagagtaatgacctggatcacatggaaggtgctatggatgcgatatacaagatctgtgaggatgtccctgaagagcttgatgttgatgttcctggtttgtctgaacgaccgatcaacgtgtttatgccaagaatactgcagtttttccagtcaccacatgcaagtttgagaaaactatcattgggtatcataaaccagtacatagtagtgatgccatcggcactctacatgtctatggatcagtatattcagggattattcaaccttgcaaaggactcttcagcagatgttcggaaactggtttgttcagcctgggttcagctcattgaagttcgcccatcaattttggagccacatcttaaaaatgttactgaattgattctgcaagctaataaagattcagatgatgaagttgctctggaagcttgtgagttctggtctgcatactgtgatgtgagcatgcctcctgaaggtttacaggagttcttgccgcacttaatcccgactttgttgtcgaacatggtatatgctgacggcgatgagtcccttgatgatgctgaggaagatgaatcctttccagacagggaccaggatttgaagccccgcttccatgattctcgattgcatggatcggaaactggagatgacgatgatgatgctgatgctgtaaatgtctggaacctgcggaagtgtagtgctgctgggttggatgttctctctaatgtgtttggtgacagcatccttccaactttaatgccattgattgagcaaaacttggctcgaacagatgatgattcttggaaggagagggaaactgctgttttatgtctaggcgctatagcagaggggtgcattagtggtctatacccacaccttcctcagattgttgcctttctaatcccacttcttgatgataaatttcctcttatacggagtattacgtgttggacgctctctcgatacagcaaattcattgttcagagccttgatcatccaaatggacgcggacaatttgataagattcttatgggagtgctcagaaggatattggatactaacaaaagagtgcaagaggctgcttgttcggcgtttgcaatccttgaagaggtc

SEQ ID NO: 99139 - DNA, 950 bp, Zea Mays
gttgcacagagcaatttgagagatctacttttgcaatgctgcatggatgaagcagctgatgttcgacaaagtgcccttgcacttcttggagacctttctagggtttgcccaatacatttgcatccacgccttcaagaatttcttactgttgcagcgaagcaactgaaccctcaatctgtgaaggatgcggtatcagtagctaacaatgcttgttgggctattggagaattagcaatcaagattggcaaagaaatagcgcctgtggtgatcaccgttgtttcgtgcttggttcccattctaaaatccccagagggttcgaacaagtcacttgttgaaaacagcgcgatcactcttgggaggcttagctgggtgtgtccagacatcgtggcccctcatatggagcatttcatgcaagcatggtgcaaggcgttgtgcatgatcagagatgattttgagaaagaggactcgtttcatggattgtgtgcaatggtggcagcaaaccctacaggaggcgccggttcattagcttacatctgccaggcctgtgcgagttggactgagataaaaagtgaaggtcttcacaatgaggtgtgccagattctgaatggctacaagcagctgcttggaaacggtgggtgggaacaatgcatggccaccctgcaaccggatgttgtgcagaaattagctagatacggagtatgatggcagtggtcgtgtggtttcatcatctttttacgctggagacagagatcaggatggttggttgggtcacttgctcgtccctcccgcctcccagtcccaggcaaggcgacattgatgaaagaaaggtttttgtagcgtgtaattcttttcttcctcttcctcttagcaggtgagtccaaaattacattaccaattcatttttgcccaataataaaagatgaagatccatgggatttgtttatccccca

SEQ ID NO: 99140 - DNA, 96 bp, Zea Mays
gccttctgacaccttgctcatggcaagcgttcagtacattggaggtcccattgatattgacctcatcagatctcttagtctacaacatttccttcc

SEQ ID NO: 99141 - DNA, 381 bp, Zea Mays
atggcggcggcggccgcacccgtgtccctggtcttcttgtgcacgcgtgggcagcagcagctggtacttgtcgacgccaccaagccccctctgcccctgcgcagccgcgctttctccgtccgcgccgctcagcagcagcagcagcagcagcaccgcgcccgcccacggccccctcgcaggaacaagccccccggacccgcgcgccgtccgcccagggtccctctggaccaagatgaatacgacggcggctatgatgaccgggaggaggggaggttcgctgggggcacccgggccgccgccatgcccaagccaccggccggcttcgtgctggatgaccagggcaggtgcatcgccgcagcatccaagcgcatcgtcaccatc

SEQ ID NO: 99142 - DNA, 649 bp, Zea Mays
atctgttgcctatgcccttgccagagtacatatgcactttgtagaaagcggattctgttatacagcaaggggtggcttctgctttcctgaagaggccattcaagagtttcatgattccggtgaaggtgtgccttttgaaggtgtagagatttgctgcttcaatttggatggtgcacactatatgatttatacaccagttgatcctcttctttttgtcgcaatcaaggataaggatggtgtgctacgcatcgctgaggatgatctgatggaagaccctgcagttctggatgcggtagatgaagagacagaatttacagctctagtggaggaggaggaggcccttcttgaaacggtacttggtgaaaggtgatggatgccagggagtacttgtacaggaagaggaagagagactcgtctgattgtagtagaatagaatggaatggaatggaatggagtgcatttgcaactgtaagcagctgcaacctgcaatacttggagtggagtgatggacaacgcagttgataagcaactgctgctgctaatctttgtctagtgtaggatagatagctcaatgggacgatcaaagctatttatgatgtgctcatgtgtttgaattaattaataaaattaccccaatctgaatagaata

SEQ ID NO: 99143 - DNA, 885 bp, Zea Mays
gattaacgattctggtggggagggaaagggaacgggagcgggaggggaatccaattgcgatggcctccgactcgggcgatttcggtggggagaacaagtcgttggaaacggcgaggcggctgctggaggagaccttcacgagtgaggcagaggcggaggcgctaccgagcttgccctcggggttctacgacgccttcgtcctgaggggaatccgcgtcgtccaggccctccagcccggcacactcctctgccacttcaacgtgccctccagactactcgtgagccaactctctctctctctctctctctctctctctgcccccgagtcgagttctgaatcctccctgatccctgaatgaggcagaactcgggcggcttcctgcacggcggcgcaaccgcctccctcgtggatctggttgcctccgccgccttcgccactgccgggctacgcaccaggggctcaccccttgagatgaacatctcctaccttgatgctgcttttgctgatgaagagattgatatcgaggcgaaggttcttcgcgctggcaaggcagtaggggttgccgttgtggaactgaagaagaaatctggcaaaatcatcgcccaagctcgctactccaaatatcttggtgttagtaaactctgaatcatgatgctgcctcccatatatacggggatatggtagcagcaagcaagcagggtgtggtttggttcgacagcaagtgttgttactactctacattatatcttggtgttagtaaactctgaatcatgatgctgtattactgttactcaaccatcatctcagctacttattattcttgtgttatgagtcttcctcggattgcattaaactaaactacagtatacagcaaatacttgtat

SEQ ID NO: 99144 - DNA, 799 bp, Zea Mays
gattaacgattctggtggggagggaaagggaacgggagcgggaggggaatccaattgcgatggcctccgactcgggcgatttcggtggggagaacaagtcgttggaaacggcgaggcggctgctggaggagaccttcacgagtgaggcagaggcggaggcgctaccgagcttgccctcggggttctacgacgccttcgtcctgaggggaatccgcgtcgtccaggccctccagcccggcacactcctctgccacttcaacgtgccctccagactactcaactcgggcggcttcctgcacggcggcgcaaccgcctccctcgtggatctggttgcctccgccgccttcgccactgccgggctacgcaccaggggctcaccccttgagatgaacatctcctaccttgatgctgcttttgctgatgaagagattgatatcgaggcgaaggttcttcgcgctggcaaggcagtaggggttgccgttgtggaactgaagaagaaatctggcaaaatcatcgcccaagctcgctactccaaatatcttggtgttagtaaactctgaatcatgatgctgcctcccatatatacggggatatggtagcagcaagcaagcagggtgtggtttggttcgacagcaagtgttgttactactctacattatatcttggtgttagtaaactctgaatcatgatgctgtattactgttactcaaccatcatctcagctacttattattcttgtgttatgagtcttcctcggattgcattaaactaaactacagtatacagcaaatacttgtat

SEQ ID NO: 99145 - DNA, 646 bp, Zea Mays
ataagctctgctaggtcgtcgatcgcatgtgcatgtgtactttttaacttgttcgatcgatcatcatctccatccaccgcccgccgtagctagctagatctgctgccatggcttcctttggcgaggctcccggcggtgacgccggcagcggcgagaagatcttccgcaccaagtgcgcgcagtgccataccgtggagcgaggtggcgcgcacaggcagggacccaacctgcacggcctcttcggtcgtcagtcaggcaccaccctcggctatgcctactccacggccaacaagaacatggccgtcgtctgggaggagggcaccctgtacgactacctcttcaaccccaagaagtacattccaggcacaaagatggtcttcccggggctcaagaagcctaaggagcgaaccgatctcatcgcctacctcaaggaatccacggcttaacttcttctagctatcttaattaattcaccatgcacgcacgcacatcaataaatcaaggtaggaatctacttttccatttcttttaccttttaagtacatccatctatatattacatcggtctctgtgagttgattccacttttgttgttctttgctacggtttttatatattatataaattgatattgagatatttattc

SEQ ID NO: 99146 - DNA, 560 bp, Zea Mays
tgcggaggtgcgcgtgtaggcgatctcgacgagcacacggttctcaggcttccacttgtgcgccgcctcgttagccagcaatgcatcacgctccgctgggttgagcgtccacaggatcacgaccctttggtcccatcacaacctggtcatagagagagatttggagacgattcatgcagaggaagatgcccgcacatgtggcaatgatcattggtgggtcactttacctcgaagtcgctggagatctcattcgtgatggagcaaaggagctcctcgccgtaggcctcggcataagcgcgacagatggcatggcactgcgtggcgtcgcgatggccgaggatggagatgatgagcgcctcgttcgtgcccccaccttgcaagcaaggggggcaacaaacacaccgtcagacggtataaacaatggtgatggtggaggttgcgggtgacgacggcgacagattaggttagagcagttggggcacgtgggatcgttgtggtggggtctcacaatatggtcacgggtcgcggttgaccgagtggatgcagtcgtaatcagggag

SEQ ID NO: 99147 - DNA, 180 bp, Zea Mays
atgcacaagcgacaccctcttaggtgcgcatggtggcggtggctccccgaggcgcgagcgcagcgacggttgcccgagggcgcgcaacagcagtggcccactgaggcgcacgtgacggcgacgttgtccgaggcggaagcggcgacagcgacctcccctaggcgtgagcgacggtggtga

SEQ ID NO: 99148 - DNA, 1368 bp, Zea Mays
gtgatgaagccgggcggcaccctcaagtcccggcgaggcagtgccggggacgaggaggaggcctacatcgtcggcttcccggtgaccccgcgcaaagactactgctggtcgtcgtggctgctcaaggccgtggtggtgctggtgatgctgatggccggcgtgttcatcgggctgtcggccaacgtcaacgtgtcgcgctactactactacagcagcattgggtcctcgtcacccttgttatcttcttcctcttccctgcaggccggcagcagtggtaataataatggcgatgtcgtggctgcttccaccgcgagccgcagctgcaggaataataatactaagaagaagaggatccagcagaaggtgacggcggcggtgcttctggacttccgtggtttcgtggatcccggcccgacatggggccactcgatgtcggaccctgagctgttctggcgggcgtccatggcgccgcgcgtggaggagtacccgttccagcgcgtgcccaaggtggcgttcctcttcctgacgcgcgggccgctgccgttcgcgccgctgtgggagcgcttcttccacggccacgaggggctctactcggtgtacgtgcacgcgctgccaggctacgcagggcgctaccggccgtcttcgccgttccacgggcggcagatcccgagcggggaggtgtcgtggggctccatcacgctggtggacgcggagaagcggctgctggcgaacgcgctgctggactggtccaaccagcgattcgtgctggtgtccgagagctgcgtgccggtgttcaacttccggacggtgtacgagtacctggtgaactcggcgatgagctacgtggagtcctacaacatcgatgtgccccagtgcgcggggcggtacaacccgcagatggcgccggaggtgctggaggagcactggcgcaagggctccgagtggttcgagatgagccgggacctggccgtcgacgtggtggcggaccagcgctactacgcgctgttccggcgccactgcacgccgtcgtgctacccggacgagcactacatcccgacgttcctgcacctgcggcacggcgcgcgcaacgccaaccggacggtcacctgggtggactggtcgcgaggggggccgcacccggcgcgcttcggcaaggctgccaccacggccgacctcatggccgccatccggagcaacggcacgctgtgcctctacaacggcaagcccaccacggtctgctacctcttcgccaggaagttcgcgcccagcgcgctgcccatgctgctcaacttcagcaacacgctgctagacttctgaattttctcattctgttttttttcccttttctactgagtgtctaggatagca

SEQ ID NO: 99149 - DNA, 291 bp, Zea Mays
atgacatatatacttattttctgtgctctgcagactgacgatgaacgtgaaatgtgtgcaaggactatctaccgcacaaacattgacaagaaggtcactcaagcagatctaaagttattctttgagtccatatgtggtgagctaaaagtttgcagaaatggtaccatcaagatcgatctggagaccaacaagatcatggacttcatcaagtttgacgtcggcaatgtggtcatggtgaccggcgggaggaacaccgggcgtgtaggagtgatcaagaacagggagaagtag

SEQ ID NO: 99150 - DNA, 838 bp, Zea Mays
gaatgagatatatcgatataaaacagaagaatattcttatgatgctgtcaacaagttcaacatttaccctgatcagatttctccatggcttgttgagtggatacctcctaagggtggttactttattggaaacctccagccagctcatatggacttccgattcttttcactgggaaatttatggtcaatagaatggaaaatcatcactgggagtgaccctaaaaacacgccttggtcataccacaatggaggatcctggccaacattactgtggcagctcacagtggcatgcatcaagatgaacagaccagaacttgctgccaaagctatagaagtagctgagaggcgaatcgctactgacaaatggccggagtactacgacaccaagagagcacgattcattgggaaacagtcgcggctgtaccaaacgtggtctattgctgggttcctagtagccaagctactaatagaaaagccagacgctgctaggattctgtggaacgatgaggatgctgaaatccttaatgcttcgagcacaaacagaaaacgtggcaagaaagtgttgaagaaaacatacatcgtgtgagttctcgcagcaagttcgattaaattcctcagttagcatttttaagttgtaatataggaagtgttgtccctgtatataaacttaaatgaggttgcatttttgctggggagggtgcctgctgttggaattggatgctgttattgtcgatgcatctggctttgcaacaaatcatagacctgcctcgtagtttcgctatacactttatttggcatgacaagttttcggagtctcattaccggactgaagccatat

SEQ ID NO: 99151 - DNA, 2325 bp, Zea Mays
ggttggttggggtggaggaccgtcgccttccccgtttcgtcttccggtcctcgttttatcccctcgcccttgcactcctccgccgcacccctttcctccttccgccctccgccgcgcctggctttctcccttcccgagaggccacgctccatccccgcccgcgctgcctcccctggcgatcggcggcgaccgcggcccaacgaaagcgtcgtggtcggccgctgtcacgcttcttgcagacgctgggcggactgggaacaagcgccaatggggatcgcggtggtggctctacacaccatgccgggggcgttcaccacccactccccggcatccattctgtcccttcggccagactttacgaggataaacagccgcaccaattcggtgccaaacgccaggacactgcaaggcgtcctaaggatcccgaggctgaggtcggtcaggcggctgtgccagcggatcgatgaccgggttacagaggggaacggtccttgggtcaaggatgccatgaataacgctagccaggttcttggcgacatcagcgtgcttggtcaagctgtaagtggcaatggtggtctaaatgggagtgctgccaagactccacctcagaggcggaagtcctcttcggttgaggatgaggcctgggaacttctgcaggagtcaatggtttactattgtggcagtcctgttgggacgattgctgccaacgatccaaatgacagtgatccggtgaactacgatcaggtgtttattcgggacttcataccatccggcattgcttttctacttaagggggaatatgaaattgtgcgtaatttcattctacacacacttcagcttcagagctgggaaaaaacaatggactgccatagtccaggtcaaggtttaatgcccgccagcttcaaagtgcggacaattccacttgatggtgatgaggatgcaactgaggaggtcttggatcctgattttggggaagccgcaataggccgtgtggcacctgttgattcaggtctatggtggatcatattgctgagggcatacggaaaatgttcaggggatctgtcagtacaagagagaattgatgtccagaccggaatgaaaatgattctgaagctttgcttagctgatggtttcgacatgttccctacattgctcgtaacagatggttcatgcatgattgatcgtcgaatgggaatccatgggcacccacttgaaattcaggcactcttctattcagccctcttgtgtgcgcgtgagatgttgactcaagaagatggatcagctgacttaatccgtgccctgaacaatagacttattgcactgtcctttcatatcagagagtactattggcttgacatgcaaaaattgaatgagatatatcgatataaaacagaagaatattcttatgatgctgtcaacaagttcaacatttaccctgatcagatttctccatggcttgttgagtggatacctcctaagggtggttactttattggaaacctccagccagctcatatggacttccgattcttttcactgggaaatttatggtcaatagtaagcagcttggcaacaactcatcagtcgcatgccattttagaccttattgagtctaaatggtctgatttagttgcagagatgccactaaagatatgctatcctgctcttgaaaaccaggaatggaaaatcatcactgggagtgaccctaaaaacacgccttggtcataccacaatggaggatcctggccaacattactgtggcagctcacagtggcatgcatcaagatgaacagaccagaacttgctgccaaagctatagaagtagctgagaggcgaatcgctactgacaaatggccggagtactacgacaccaagagagcacgattcattgggaaacagtcgcggctgtaccaaacgtggtctattgctgggttcctagtagccaagctactaatagaaaagccagacgctgctaggattctgtggaacgatgaggatgctgaaatccttaatgcttcgagcacaaacagaaaacgtggcaagaaagtgttgaagaaaacatacatcgtgtgagttctcgcagcaagttcgattaaattcctcagttagcatttttaagttgtaatataggaagtgttgtccctgtatataaacttaaatgaggttgcatttttgctggggagggtgcctgctgttggaattggatgctgttattgtcgatgcatctggctttgcaacaaatcatagacctgcctcgtagtttcgctatacactttatttggcatgacaagttttcggagtctcattaccggactgaagccatat

SEQ ID NO: 99152 - DNA, 2307 bp, Zea Mays
ggttggttggggtggaggaccgtcgccttccccgtttcgtcttccggtcctcgttttatcccctcgcccttgcactcctccgccgcacccctttcctccttccgccctccgccgcgcctggctttctcccttcccgagaggccacgctccatccccgcccgcgctgcctcccctggcgatcggcggcgaccgcggcccaacgaaagcgtcgtggtcggccgacgctgggcggactgggaacaagcgccaatggggatcgcggtggtggctctacacaccatgccgggggcgttcaccacccactccccggcatccattctgtcccttcggccagactttacgaggataaacagccgcaccaattcggtgccaaacgccaggacactgcaaggcgtcctaaggatcccgaggctgaggtcggtcaggcggctgtgccagcggatcgatgaccgggttacagaggggaacggtccttgggtcaaggatgccatgaataacgctagccaggttcttggcgacatcagcgtgcttggtcaagctgtaagtggcaatggtggtctaaatgggagtgctgccaagactccacctcagaggcggaagtcctcttcggttgaggatgaggcctgggaacttctgcaggagtcaatggtttactattgtggcagtcctgttgggacgattgctgccaacgatccaaatgacagtgatccggtgaactacgatcaggtgtttattcgggacttcataccatccggcattgcttttctacttaagggggaatatgaaattgtgcgtaatttcattctacacacacttcagcttcagagctgggaaaaaacaatggactgccatagtccaggtcaaggtttaatgcccgccagcttcaaagtgcggacaattccacttgatggtgatgaggatgcaactgaggaggtcttggatcctgattttggggaagccgcaataggccgtgtggcacctgttgattcaggtctatggtggatcatattgctgagggcatacggaaaatgttcaggggatctgtcagtacaagagagaattgatgtccagaccggaatgaaaatgattctgaagctttgcttagctgatggtttcgacatgttccctacattgctcgtaacagatggttcatgcatgattgatcgtcgaatgggaatccatgggcacccacttgaaattcaggcactcttctattcagccctcttgtgtgcgcgtgagatgttgactcaagaagatggatcagctgacttaatccgtgccctgaacaatagacttattgcactgtcctttcatatcagagagtactattggcttgacatgcaaaaattgaatgagatatatcgatataaaacagaagaatattcttatgatgctgtcaacaagttcaacatttaccctgatcagatttctccatggcttgttgagtggatacctcctaagggtggttactttattggaaacctccagccagctcatatggacttccgattcttttcactgggaaatttatggtcaatagtaagcagcttggcaacaactcatcagtcgcatgccattttagaccttattgagtctaaatggtctgatttagttgcagagatgccactaaagatatgctatcctgctcttgaaaaccaggaatggaaaatcatcactgggagtgaccctaaaaacacgccttggtcataccacaatggaggatcctggccaacattactgtggcagctcacagtggcatgcatcaagatgaacagaccagaacttgctgccaaagctatagaagtagctgagaggcgaatcgctactgacaaatggccggagtactacgacaccaagagagcacgattcattgggaaacagtcgcggctgtaccaaacgtggtctattgctgggttcctagtagccaagctactaatagaaaagccagacgctgctaggattctgtggaacgatgaggatgctgaaatccttaatgcttcgagcacaaacagaaaacgtggcaagaaagtgttgaagaaaacatacatcgtgtgagttctcgcagcaagttcgattaaattcctcagttagcatttttaagttgtaatataggaagtgttgtccctgtatataaacttaaatgaggttgcatttttgctggggagggtgcctgctgttggaattggatgctgttattgtcgatgcatctggctttgcaacaaatcatagacctgcctcgtagtttcgctatacactttatttggcatgacaagttttcggagtctcattaccggactgaagccatat

SEQ ID NO: 99153 - DNA, 1828 bp, Zea Mays
gaagctgcaatactacaatggagctcacgtgggatgtcattgtactggctgcctgcagcttcctcattcctctcgtcttcctccgcaacgctaagaagcaccggcggcggcgcgcgccccctgggccggccaccgtacccatcatcgggaacctggcatggctagagttgcgccacgggtggatggatgagatgaacatcctgcgacggatgcactcgcgctttggcccgctgctgaaggtccgcctgggttcctcggagcaggtgaacgtgatggaccgccgtctcgcacatgccttgctcgtggagcgtggcgccgcggtggctgaccgctcgccgctgctggtgtccaccgacaggttcggagtcttcgactctttcagcatacacgtgtccagctacggcccgcggtggagtgttctccgccgcaacttcgcggcggagatcgtgagcccagcgcgcttccggcagatggcggcctcgcgggagctggcgctttccggcctcatccggaagctgcagctggaggagggcggcgtcgtctgcagggacgcgttccagcacgccatgtccagcctcttcatcgccatgtgcttcggcaaggtcctcgacgactcgtctgtggacagcatcgccgtcgcagtgcgcgacttcgtcctccacgacgacgggtcggagacggggatggcgaaattcttgttcctccctgctctcaccacgcgactcttccgtgacttcgtgcgggagagggaagccaagctccaaaagctggaaaccgtgtattgcctgccattgatccatgagcggagagagcgcaggaagaagcagcagacgcaggagctggagcacccgcactgctacgttgacacgttgctcgatctcaggctcggcgagggacgacaagacggtggccgccctcctctcacagaccacgagatagctagtctgtgcatcgagatcctcatcgttggctcagatctacctgggacggcgctggagtggaccatggcggagctagtaaagaacccaggcgtgcaggacaagctctacgaggagatgatgaaagccaaaggcactggtggtgttgttgctgcaggtggcgtgccgttctcggaggatgacttgcccaagataccctacctgagagcggtggtgctggagggtctccggcgccacccgccggcgcagcagatgccgccacgcagggtgagggaggacgtggaggtggatgactacgtggtgcccaagggctcagcgatcaacttcatgctgtacgacctaggcatggacgacgccacgtgggaccgcccagcgctcttcatgccagagaggttcctgcccggcggggaagctgaggagttggacatcaccggcgccaaggagatgaagatgataccgtttggggccggcagaaggatctgcccgggcctcaggatcgctctcctactcctcgagtacttcgtcgccaacctcgtagcggccttccactggaaagaggtggaaccgggcgacgttgatgtcacctccgaggacgttcgggtcagcatcctcatggggaagccgctccgggcgcgcctgcttgcaagactgcctgctgcaccgtgatgatgatgggtgacagtagtgtgacactgctccatctatggatccacgcaccgacatgaacggacgagacgacgacgacgatgcttttaatttcttcttttcctcatcaccgtcatcatggtctgtcctttttctttgtatgcatgcatgtacacgacagagtgtatgtatatatgcatgtatctcagtgtctcaccaaataattaatgcgaataaagatcaag

SEQ ID NO: 99154 - DNA, 1738 bp, Zea Mays
atatacatacatataatggaccggagcgaggtgtggtgaggtggaactgaatactacaatggagctcacgtgggacgaatgggatgtcattatactggctgcctgcagcttcctcatccctctcgtgttcctctgcaatgctacgaagcggcggcggcggcgcgcgccccctggcccggccaccgtacccatcatcgggaacctggcgtggctaacgttgcgcgacgggttgggtgagctggacatcctgcgacgactgcactcgcgctttggcccgctgctgtcggtccgcttgggttcatcggagcaggtgaacgtggcggaccgccgtctcgcacacgccttgctcgtggagcgtggcgccgctgtggctgaccgctcgccgctgctggtgtccaccgagaggttcggggccttcggctctttcagcatacacgtgtccagctacggcccgcgctggagtgttctccgccgcaacttcgcggcggaggtcgtgagcccagcgcggttccggcagatggcggcctcgcgggagctggcgcttgccgacctcatccggaagctgaagctgcaggagggcgtcgtcgtctgcagggacgcgttccagcacgccatgtccagcctcttcatcgccatgtgcttcggcaaggtcctcgacgactcgtccgtggacagcatcggcgtcgcgctgcgcgacttcgtcctccacggcggcgcgtcggggatggggatggcgctattcttgttcctccctgctctcaccacgcgactcttccgtggcctcctgcggtctaaggaggccaagcgccagaagctcgaaaacgtgtactgcctgccattgatccatgagcggagagagcgcaggaagacgaagcagctgacgcaggagcacccgcactgctacgttgacacgttgctcgacctcaggctcgacgaggaacaggatggtggccgccttctcacagaccacgagatagcaagcctgtgcatcgagatcctcatcgttggctcggagctaccggcgacggcgctggagtggatcatggcggagctagtaaagaacccaggcgtgcaggacaagctctacgaggagatgatggtgaaagccaaagccaccactgacgcttctgctggcgtgctcccgttctcggaggatgacttgcccaagataccctacctgagagcggtggtgctggagggtctccggcgccatccgccggggcaccagatgccgccacgcagggtgagggaggacgtggaggtgggtgactacgtggtgcccaagggctcagcgatcaacttcatgctgtacgacctgggcatggacgacgccacgtgggaccgcccagcagtgttcatgccggagaggttcctgcccggcggggaagccgaggcgctggacatcaccggcaccaaggagatgaagatgataccgtttggggcgggcagaaggatctgcccgggcctcaggatcgctctcctgctcctcgagtacttcgtcgccaacctcgtagcgaccttccactggaaagaggtggaagagggcgacgtcgatgtcaccaccgaggacgctcagctcaccgtcctcatggggaagccgctccgggcgcgcctgcttccaagactgcattcgtctgcttaattttcttcatcatcatggtgtatgatgtcagtgtgtcaccgaataattaattaatgcgaataaagatcaagcttcaaagactcttcacagttcaca

SEQ ID NO: 99155 - DNA, 190 bp, Zea Mays
tgggtaggtctggcgctaccagtagtgcaacggtcaaatgacacgcgagaacctagtaagccaatgtggtggacctttcccataaaaataaaatttaatatcgaagtgaacatatagtcccatacaagatattaaactgataagaacaaatattacattttatcttagtcaaaaggctgagaaagatatg

SEQ ID NO: 99156 - DNA, 1403 bp, Zea Mays
cttctctacttaattaaatgacatgcacctgcgttgtccatggcaaataattcagttggcaagcgctatgttatcatagatgtgctctgttattcatggcaaataaatttagttggcaagctctatgttctaccatcagatttagttttgtgcatcgttaggcacaactaactagttagtgagtgtctttggagcagatcagcagagtaaataatagcatcatgttagtcttgagtgccacatagccagcgtttttgcaaaagtgagtgtcggtgtctatataaactaatgtttcatagaaagcttgccccacatgcttccacatgggcatgtcctggacagcataagagaaagcaggctccatttgctgcatgttgtactttaaatttgttttcacaccttataagaccatatatttgcaaattactttttcctttggtgttgaatcctattgatttatcaggtgctggttgactttattttgatgtaatcgtgaatcaactgaaaagaaaaaggaataaaattaagagcgattgtgattagatgatgtcagcttaaaaccaacttcatgttttctgttgattttgggctgtgaattagcaccatgtttcactcatttatttctatctatgttctagattgatggtcttgctaaaatttgctgtgtgtgtgtgtgtgtgtgtgaaaacagcccacagaattggggaaacccggacggtatcaaatgtgtaagagagacgcttccatatcagaactacagccaacacttggatctttaccatgacatgcggctgtatgacttagtggtcaatgtggccagctccatggagaaggtcccagtgacagtgatcaatatcacaaggatgtcagattaccggaaggacgcccacacgtccctgtacaccatccggcaagggaagctgctgacgcctaagcagaaggcagaccccgagaagttcgcggattgcatccactggtgccttcctggcgtgccggacgtgtggaaccaaatactctacacgaggattctttcgaaatcatcatggcattctaattttagcccccctccatcccagtctctgcctcttcctccccaatgagaatcagaagtgggggcttggtttttgtcggagaatgtatgatttttcattctttttccttcctttttgggtagattgagtaaaatgatagcacgaaaaggaaaatgaatgttctgattactgatggtatagcatgtaagaagattcagctgaagtgtaaattagttgtgagttagccaattgagaaaacaacagcgacctagtataaagtgcatatacatatactgctggttcacaggcaaaattacctatatataagccttttttcctgatggatgaaaaaaatgtgcctatctttttttt

SEQ ID NO: 99157 - DNA, 1865 bp, Zea Mays
tcgggctgggcttgttggcctcgcctcggttggtgccctctctgccgccgcggacgagagtcgccaccaccaccaccatccagccagccccttcccttccccagcagcagtctccagccgcagccatggccaagccaccgccgcccacctccacctccgaccccgcgctccccaccactgctacaaccacctcgtcggcccccaagtcgtcgtctcgcccctccccccgcccccggggcctcctcgatccgctcgcagcctccgcgcgctccctcctcgcctcggcgcgccgctccccggtcaccacgttagccgccgccttcttcctcctcgcgctcgtcatgtacggcgaggacgcccgcaccatcgccgagctctccatcgacgactacctctacccggacgccgacctctacaacgtctccggcctgccgcccctcgcgctgcccccgctcacctgcgacctctccagcggcagatgggtcttcgacaacgtctccgttccggcgtaccgggagaaagactgcaccttcctcaccaagcaggtctcctgcctcgccaacggccgccccgacgacatgtggcagtactggagatggcagcccaacgagtgctccctccccacgttcgacgctcggagattcatggaggcgatgcgcgggaagcggctcatgttcgtgggggactcgctgaaccgcaaccagtgggagtcgctggtgtgcctcgtgcagtccatcctgtccaagggcaggaagaagatcgtcaagcggggctccttcaacaccttctacgccaaggagtaccgcgccacgctcgagttctactgggcgcccttcctcgtcgagtccaactctgacaaccccaacttccacagcatcaaggaacggatcatcagtcccgagcggatcgaggcgcacgccaagcactggaaggatgctgactacctcgtcttcaacacctacatctggtggatgaacaacgccgatatcaaagtcaggagacccaattcgaggtactggtctgacaacgatgaggttcccaggattgaggcgtacggccgtgtgttcaagacatggtctgattggctcaatgacaacatcgatcctgcccgaacgtccatcttcttcatgacgatttctcctcctcacctcagcccacagaattggggaaacccggacggtatcaaatgtgtaagagagacgcttccatatcagaactacagccaacacttggatctttaccatgacatgcggctgtatgacttagtggtcaatgtggccagctccatggagaaggtcccagtgacagtgatcaatatcacaaggatgtcagattaccggaaggacgcccacacgtccctgtacaccatccggcaagggaagctgctgacgcctaagcagaaggcagaccccgagaagttcgcggattgcatccactggtgccttcctggcgtgccggacgtgtggaaccaaatactctacacgaggattctttcgaaatcatcatggcattctaattttagcccccctccatcccagtctctgcctcttcctccccaatgagaatcagaagtgggggcttggtttttgtcggagaatgtatgatttttcattctttttccttcctttttgggtagattgagtaaaatgatagcacgaaaaggaaaatgaatgttctgattactgatggtatagcatgtaagaagattcagctgaagtgtaaattagttgtgagttagccaattgagaaaacaacagcgacctagtataaagtgcatatacatatactgctggttcacaggcaaaattacctatatataagccttttttcctgatggatgaaaaaaatgtgcctatctttttttt

SEQ ID NO: 99158 - DNA, 1618 bp, Zea Mays
tttagatggactaatagcatctgcctacctgcactggactcaaaaacatgcctgccgtaggatcctgtgatgtgtccattcgcgtgttgagtcggcggcttgtgaaggcatccgacccctccctccagccgcacgtcgtcaccttctcaaacctagatctctacccggacaacgtgcaggcctccatagtgtgcctctaccccaagctgtcaacaaagtccggcccgggcggcggcttcgacgccgtcgtctccaccttcgaggccgtcctgccgaccttgcttaaccacttctaccctctcgccggtcgcattgtcgtcaacccaagctccggcgtccccgagctccactgccacaaccagggcgcggagctcgtggtgggagaggtcggcgtcgccctgggcagcctggattacggtcttgccgaggagtccctgaagaagatcatgatgccgtaccctgaggacgtcacgctctcggtgcagctgctgtccttcgcgtgcggcggcttctccgtcgtgtgggccaacaacaacctcctcaacgacggcaacgccatcaccatgtgcgtcaggatgtggtccgagctggcacgggccggcgggagcatcgccaccgtgggagcggtgtcagtgaaccacgaccgctcgatgttccgcccccgcaacccgccggcctacagcgacgcgctcgacgccatgttcgccacgtacgacgaccaccggacggtgaacgccctgacggccgccgccagcttcgtggagcgcctctactacgtcgaggcggccgacatcgccaagctgcgggacatggccactgtcaccgagctccagcgtccctcacgcgtccaggcggtgtccgcctacttgtggaaggtcctcgccgccgtcgtggccgcgtgccgcgtgcccgaggagcggtgctgcatgggctggatggtggacgctcggcggcgggtgaagtcgcccgagctgatccccgcgatgcgcaactacttcggcaacgtcacggcctacgcgctgggcggcgcggccgtggaggagatccggcggaagccgctggccgaggtggcggccatggtgcgggagaccatcacgtccatagactacgacgagtacctgcaggagctggtggactgggtggaggtgcacaagacggagcacgtgatggagaagggcgtcctcgggctgggctcgccgacgttgaaccagaccgtgttcgcgtcgttcccgctcgacacgaacttcggcttcggcgacgccgcgctcgcgctgcccatctgcgactatgggaggctttgttcgggctacctgtccgtcggagcgcggcctggaggcgacggctcctggctcctcagcgcctacatttggccgcagatggcggcggcgctggagtcggacggcgtctttaagcctctcacggcggagtatctcggtctcacagtcacaccctagcggcgacgtggtcgatctacatgcgctgcatgcatatcagatcagaatcatgcatgcgcgctaccttgcattgtgtacgtcgttcgtgtaataatgttgcatggtctcgggccagtgctaaataaaaatctctgttaattttcttcaaaagagacatgaaagaa

SEQ ID NO: 99159 - DNA, 1741 bp, Zea Mays
tcccctcttcagtctttgctctcaactgctgccatggcaaacgcatccgacagcgatattccatccgtcactcacgacctcgacgaggatgaagaattcgacgacgacgacctcgatgacgaagacgacgatggcggcgaacccctcgcgtcctcatccgaggcggctcgcctagaggccgtgctccggcgtctcaccgcggacgaggtccggatccgggtgcaccaggtcacgatccggggctgcgcccgcacgcgccgcgccgcggtcgaggcggcggtcggcccggacgtgtcgcgcgccgccaccgtgcgggacctcgtgcgcgccgccgccgccgctggtgaccggctccgttgcctcggcgccttcgacacagtctcgatcaccctcgacgcggcgccgcccgggatccctggcagcgccgtcgtcgtcctcattgatgttgcggaggcccgcggccgcgctgccggtgatttcggcgtcttcgccaacacacagagtagatcatgctcacttgaaggttcagtgaagttgaagaacctatttggatactgtgagacctgggatgcatcaggcgctcttgaattagataagacagcagaactaagtgccggagtccaaatgcctaggatcggagcaataccaactcccttgatggctagaatatcgtttgtatctgacgactggttaaagtcctcactgaaagaacacttgatgggcgtttctgtcggcttgctctccaccataaaccacaacattgcttacaatttgacatggagaaagttaactgatccaacacgcatgtcatccaattctgtacaagaggaattaggacatagccttttgtcctctattaagtacgcgtacaaggttgaccgaagggactcaagcataagacctgcacgcggatatgcttttatgtcgacttctcaagttggagggcttgcaccagggagcaaatattcacgttttcttaggcaggaatttgatcttcgagtggctttgcctctgggtgtgctgaatggtgctctcaacgccggagtggctgcgggagtcatccatccattggaaaggggatctgcaggatctgtctcaccacttgtagaaagatttaacttgggtggtaatagggctctcgtgtgccgcttgggtggaccatcttcactattaggcttcaaaacaagagggctacgggcagcaacagagtccagaacacaagaccccaacactcctggcaatggcacttccccttcccctgagctaaatggtcttggaggtgaagtagcggtgacagccttcgccgacctgtcatttgatctgcctctgaagccgctcagggagctgggaatccatggtcatgcttttgtctgtgctggaaatcttggtagattaacggagtgtgatctgcggaagttccctgttactgaattcctgcagacgttcagaagttgtgcaggatggggcgtagttgtgccgaccagactgttccgcgtagagatgaattactgctacatcctaaaacagcttgatcatgacggggggaagacaggcatacagttgaacttctcatcctcctaatttgtaagatgaaaccaaacagagccctagtggtaacaaagctccttgtaaacatctcaatggcaaacctcaaaaaaccggatttattaataaaaaataaggtcaaaaaccggatgtgaaagattacgtaaaaaaaaaaccggagttctttagactttca

SEQ ID NO: 99160 - DNA, 2003 bp, Zea Mays
aacaaaatgtcccaagcagatccgcaagagtccagagagaggctcggccactgcaggcgggccccacctgagcaaagacaggcgaccatttcctttccttcacctcactggctcgctcgctcgcctttctctccgtgcggcgaccacggactgggcaaccgccaccgccctccctttccctgcgctagcgacgactgggcgaacgctgcctcgcttcgtcacctcttcgccggcggcgacgatcacccaccaggttgatgccgattttttggttgacaatttgaagattactaacttctatgatcctgagggcaagaagtaatgatccgcccaggctcaaaggactcgcaaaattatgataacaataatcaaagagtccatcctcaaccaatcgacgataacatgaatcagaacggggactcaatggacactgtgatcgggaggatattcaacaacatatcctctttaaaatccgcctacattcagctgcaggaagcccacaccccatatgaccctgacaagatccaggaagctgataaacttgtcatagaggagcttacgaggctttcagaactcaagcacgcttacagagaaaaacatcctaagccaatagctgcatcccctcaagattcacgcttgctttctgaaatacaagagcagcagaacttgttgaagacctacgaggtcatggtaaagaagttccagtcccagatccagtccagagacactgagataacccatctacagcagcaaattgatgaagctaaacttcggaaatcaaagctagagaagaaactgaaacagaggggcctacttaacagggagtcggaggaatctgacgaagaagagaactacttttccattgaattgacaccaagtttgtttacatctgccgttgataatgcctaccagtcgatacatgacttctcgaagcctttgatcaacatgatgaaggctgcaggttgggatcttgatggggctgctagtgcgatcgagcctggtgtggtttacacaagaagggctcacaagaagtttgcttttgaatcctatatttgccaaagaatgttcagtgggttccaagaagaaagcttttctatcaaggattctaacatcagtgtttccaatgaggctttcttccaccaattcctcgcggtgcgagccatggatcctctggatgtcctgagccagaaccctgattcagtattcggaaagttctgcagaagcaagtacctatcgcttgtgcatcaaaaaatggaaggttctttcttcggcaacgtggatcagaggaactacgtcatgagcggcggccatccaaggacacctttctaccaggcattcctaaagctagcaaagtccatatggttgctgcacaggttggcgcactccttcgatccaaaggcaaaggtgtttcaagtgaaaaagggaagtgaattttcggatatccacatggagagcgtcgtgaaggacatcatcctagaagatgtcgcggagaggccgaaagttggcctgatggtgacgcctggtttcctgatcgggaccagtatcatacagtcccgtgtgtacctttcaggtgccaagtgtgctgactgactgactgactgaagatgcagcagctacacaaggagctagatagagggtcatttgcttcttggaatcttgggagagcttcagagctaccagctgcataagtttaaggtggactgtgctgtcctgtatgtaacgcgtgagagacctgttgtttatctgccgtgctgggttggacgccttttgccttttgtggagttttccatgtgccatgcgattctgtctaatggtacgatatgtttctgttcccctatgctgggtttccgtgtgctatactgctatgtaattctgcccaaatgtttgtacatgttatcagtgtgattggagagcctatgtgatgctcgtataggatgcacttttcatccgaaatgttttattttttttgacagatcagatgattgtattgtattgtcgtgtgc

SEQ ID NO: 99161 - DNA, 3681 bp, Zea Mays
ctcgagctctcgcactcctccgtcgtcctccaaaccctaggccagaccagagctgaagtcgagcggaagtccaaggtgagttctctctcccctaatccgcccgacgccacctctctcttcccacctcaccgtggcccgatccgcgcaggcaccgccgcgaccccccatcctccgcacgacctggatctgacgcgcctccccctgccgccgtccgcctcacacctcctcgcggcggccgccgtgctcgggctcctaggcggcctcctactctacatgcttccccggaagcggggggtcgacgccggcgaggtccaggatttgcacaacaaggccccccgcgccgccccagcccaggacaaggacagggaggaggttgcggagatggccggcagggcgcccgagatcgatgaggacctccatagccgccagctcgccgtctatgggcgcgagaccatgaagcgcctcttcggctccaatgtcctcgtctctggactccagggactaggcgctgagatcgcaaaaaaccttgtccttgcgggtgtcaagtctgtaaccttacatgatgatggcaaagtcgagctatgggacttgtcaagcaatttcttcctctcagagaaggatattgggcaaaaccgtgctcatgcttgtgttccaaagctacaggagcttaacaatgctgtcatcatctctaccgtaactggtgatttgaccaaggaacaactttctaactttcaggctgtggtctttactgatatcagcatagaaaaagcagttgagtatgatgaatactgtcatagccaccagccgccaattgctttcattaagtccgaagtttgtggcctttttggcagtgttttctgtgactttggtcctgagttcactgttttggatgtcgatggcgaggaaccacatacaggaattgtggcatcaatcagcaacgacaatccagcacttgtttcttgtgtggatgatgaacgtctggagttccaggatggtgatctagttgttttctccgaagtgcatggaatgaccgaactcaatgatggaaaaccaagaaagattaagaatgcaaggccttattcttttactctagaagaagacaccacctcatatggcacttactttagaggtggtattgtcacacaggtgaagccaccaaaggttcttaaattcaaaaccttgaaggatgcaatcaaggagccaggagaatttctcatgagtgatttctccaagtttgaccggccacctcttctacatttggccttccaagctttggacaaatttaggtctgagttggcacgatttcctattgctgggtcagatgatgatgcacagaagctgatagaccttgctattagtattaacgaaactcttggtgatagtaagcttgaagaaattgacaagaagctcctgcagcatttcgccagtggttccagggctgttttgaatcctatggctgcaatgtttggcggtattgtaggccaggaggttgttaaagcatgctcagggaaattccatccactttaccagttcttctactttgattctgtcgaatctctgccagttgaaccgttggagcctagtgatttgaagccagagaacagtagacatgatgcacaaattagtgtctttggggctcagcttcaaaagaaactggagcagtcaaaaatcttcatggttggttctggggctcttggatgtgaatttttgaagaaccttgcgttaatgggtatttcttgcagtcaaaatgggaagctgactgtgacagatgatgatgttatagagaaaagcaatctcagtcgccagtttctcttccgtgactggaacattggacagcccaagtccacagttgctgcaactgccgctatggcaattaatcccgagcttcatgtggaggcccttcagaatagagcaagtcctgagactgaaaatgtgtttaatgatgccttttgggagagcttggatgctgttgttaatgcattggacaatgtcactgcaagaatgtacattgactctagatgtgtatatttccagaagccacttcttgaatcaggtactctgggtgccaagtgcaacacacagatggtcattcctcacttaacagaaaactatggggcatccagagatccaccagaaaagcaggcacctatgtgcactgtacattcatttcctcacaatattgatcactgcctgacatgggccagatctgagtttgagggtctacttgagaagactcccactgaagtaaatgcttttctgtcgaaccctggtggatatgcaaccacagcaagaactgctggtgatgcacaggctagagaccaacttgagcgagttattgaatgccttgagacagacaagtgtgagacattccaagattgtattacctgggcccggttgaagtttgaggattatttctccaaccgtgtaaagcagctgacattcacttttcctgaagacgcaatgactagctctggtgctcctttctggtctgctcctaagcggttcccgcgaccactggagttctcatcttctgactcaagtcaccttaacttcttgttggctgcttctatattaagggcagagacatttggaatacccatacctggttgggcgaaaaacccaaagaaactagctgaagctgtggacaaggtcattgttccggatttccatccaaaagagggtgttaagatagagacagatgagaaggctactagcctatcctctgcgtctgttgatgatgctgccgtcattgaagagcttattgcaaagctgcaagcaatttctaaaacattgtcaccaggattccgtatgaaccctatacagtttgagaaggatgatgataccaatttccatatggacttgattgctggttttgctaacatgcgggccaggaactacagcatccctgaagttgacaagttgaaggcgaagttcatagcgggaagaatcatcccggccatcgccacctcaactgcgatggccaccggccttgtctgcctggagctttacaaggtccttgctggtgggcacaaggttgaagactaccggaacacatttgcgaacctcgcaatccccctcttctccatggcggagcctgtgccgcccaagaccatgaagcaccaagacatgtcctggaccgtgtgggaccggtggaccgtaactggcaacatgacgctgagggagctcctggagtggctgaaggagaaggggttgaacgcgtacagcatatcctgcgggacctcgctgctgtacaactccatgttcccgagacacaaggagcggctggacaagaaggtggtggatgtggccagggaggtggccaaggtggaggtgccttcctaccgccgccatctggacgttgtggtggcctgtgaggatgacgatgacaatgacgtcgacatcccgcttgtgtctatttacttccggtaaagaggagggtgtcgctacctgtttacatggaacctgtctgtgcgatgtttatcagaaggatcgagtctataagttgcgcatgcaaccgagaactaggctgtgttcaatgtaaacacatactgatgagtctataagttggctgggaatcgtcgccgagatttgggttcaccgttatggaattcttggagcatataaaacatcgtgatagttattgcatgtcaatgtcactgctagatgttgttgtcctcatgc

SEQ ID NO: 99162 - DNA, 3752 bp, Zea Mays
gcagcattggatttgccccagtgtactacagactcgacaggtacggtgagcataaaagaggagagccgataagcacaatggcgcctgaggaaaggatgaagcagacagagggcagtcacaaggtggtaacagcagcagcagcaggtggcaagatggcggtgctccactctccggtcggagtgaggagcatcgtgacctccctggtggctttcttcatcctagccagctccgtggtgttcctcctcctcgacagagaagccgggctccaagaagaaccggcgataagagccggcggcggcggcggcgacgaggagtgcagctggtctcgggggcgctgggtgtacgacaacgtgtcccggccgctgtacgacgggctcaagtgcgccttcatcttccccgaggtggcctgtgacaagtatggcaggaaggatgtcatgtaccagcactggagatggcagcctcatggtcatggatgcgacctcccaagattcgatgccatgaagctgcttgaagagctgaggaacaagagactggtgtttgtgggtgactcggtgaacaggaaccaatgggtctctctcgtgtgcatggtggaggcctcgatacctgacgacaggctcaagatgcgcatcttcaatggctcgctcatctccttcaaggcactggagtacaacgcgacgatagatttctactggtcgccgctgctggtggagtctaacagcgacaaccccatcatccaccgggtggagtaccggatcataagggcagacaggatcgagaagcacgccagcgtgtggagggacgccgacgtcatcgtcttcaactcttacctgtggtggaggaagcagaaggatgacatgaggatgaaggtcatgtacggttcatttgaagatggtgacgcaaagctagacgagatggaaatggcggatggtttcgagatagctatcaagaaactgacggaatggcttgcaaagaacattgacaagaacaagactaggatatttttcgcaggatcatcaccaacacattcctgggctagcaactggggcggacaagacaagaacaagtgcctgaacgaaacggagccgatcagctacagacccggcggcgggtacaaggctgcaaccacggactacagcctgatggccatggccaggtcctacttccggcggacgctggagccgagaggcatacgcgtccagatactcaacatcacggagctgtccgactaccgcaaggacgggcatcccacggtgttcaggaggcagttcgttcccctgaccaaggagcagatcgcggacccggccagctacgcggactgcacgcactggtgcctcccaggcgtccccgacgtctggaacgagttcctgtatggctacctcacgcagcagagcaaatgacgatgcattattacaagaatggccttgttatatgtagtagtgtacagtgcagtacagattgccagctgctccgtttagattattagggatggacctgctgttacatgtagagagagacagacaggagatctgtcttgcccaacattaattctagtatctgtaaatcttgttcttcttgtccaacattaattctaggatctgctgctaaccattttttttggatttatgtaaactgagtgattatctgaaatagaatgatctgagtttgctgttccagtactgagcaagtaaaaaaaccaaaaaaacaaatcgcccaccgtggggctcgaacccacgaccacaaggttaagagccttgcgctctaccgactgagctagacgggcttgttttccctttttttttctttggctataaattggatccgcatcagtcagctcaacacttgttacggagcaactaaacatagagagagagagagagggtggatgacgaggacggcctactgctttctttgagacagcatgcatgcatggcctgagcttgctttgagccctcctcgctcgctcgctcaccttcttatctcctccatccatccaaaaatatctccatgcgctcagacggggacgagacgacgggagaaggaggaggagggcgcccgcccgccacgcgcctcctccaaatcccagccgtccacgtgtcccagtccgcgacccccacgcgcctatatccatccatcatcctattcctatcccgccacatagtccaccaccacctattattccgctcccgacgcccagaattcacgagaacgcacccgcccgcctcctccttccgtccccatccagatgatgcttagggtttccgcgtctccggccgccgcggtggccaaccatctctctggtggggccgcggcgaccacggctcctgccagggtgacggcgcagcgcagcggcgtctcgctgtccgccgccgccgccgccggcaaggggaaggaggtgctcagcggggtggtgttccagcccttcgaggagatcaagggggagctcgccctcgtgccccagtcccccgacaggtcgctcgcgcgccacaagttcgtcgacgactgcgaggcagccatcaacgagcagatcaatgtggagtacaacgcctcgtatgcgtaccactccctcttcgcctacttcgaccgcgacaacgtggccctcaaaggatttgccaagttcttcaaggaatccagcgacgaggagagggagcacgctgaaaagctcatggagtatcagaacaaacgcggaggcagggtgaggctccagtcgattgtggcgcctttgaccgagtttgaccaccccgagaaaggcgatgctctgtacggtaagttgcgttgccgccgcatctgacttccgggttaggaattaggataggacgtgtaatttattctgcatctgaacctagctttatcagctgcagctttcaagtatatgcatcgatggatgattagattcaaagactaacaaatttaggacgacggcttatacagaatagaatagaatagaaggctggctacgttaattggaagccaatgctctgttttctattttttttatttttgatgggtttcagctatggagctgactctggctctggaaaagctggttaatgagaagctgcacagcctgcatggtgtaagttgctctcacatgcttgtttatttacagagaaatatatattgcgtgcttcgcttaaggcatatatacagacttggataatgtatgtgcagatataaattgaatgagtgttgggtcactacatgtaacatgctattattgtaattaacaggtggcaacaaggtgcaatgatcctcagctgatagacttcatcgagagtgagttcctcgaggagcaggtggaagccataaataaggtctccaagtatgtcgcgcagctgaggagagtgggcaacaaggggcacggttagtctgttgctaataaacttggtttcatctgctatatatgtctcgtgcccaaagttacgatattgttgagacgtggcttgcgtgcaggggtgtggcactttgatcagatgctgcttcaggaaggggcctgaaggccaacaagggtggcgtggacggagctgagctctgggtggtgtattcttttctttttcttttctttccagttggttagtgttttagttgtagaacggtgttgcgttgcccacatgacatgatggatgttacgtggaggattgtctcttatatttgaacattatattgtcgttcgtttttggcatggctctgcaactgtcgtgagaagatctggactaagaatagatcctaacccaataagtagaaaaataacaaga

SEQ ID NO: 99163 - DNA, 3508 bp, Zea Mays
gcagcattggatttgccccagtgtactacagactcgacaggtacggtgagcataaaagaggagagccgataagcacaatggcgcctgaggaaaggatgaagcagacagagggcagtcacaaggtggtaacagcagcagcagcaggtggcaagatggcggtgctccactctccggtcggagtgaggagcatcgtgacctccctggtggctttcttcatcctagccagctccgtggtgttcctcctcctcgacagagaagccgggctccaagaagaaccggcgataagagccggcggcggcggcggcgacgaggagtgcagctggtctcgggggcgctgggtgtacgacaacgtgtcccggccgctgtacgacgggctcaagtgcgccttcatcttccccgaggtggcctgtgacaagtatggcaggaaggatgtcatgtaccagcactggagatggcagcctcatggtcatggatgcgacctcccaagattcgatgccatgaagctgcttgaagagctgaggaacaagagactggtgtttgtgggtgactcggtgaacaggaaccaatgggtctctctcgtgtgcatggtggaggcctcgatacctgacgacaggctcaagatgcgcatcttcaatggctcgctcatctccttcaaggcactggagtacaacgcgacgatagatttctactggtcgccgctgctggtggagtctaacagcgacaaccccatcatccaccgggtggagtaccggatcataagggcagacaggatcgagaagcacgccagcgtgtggagggacgccgacgtcatcgtcttcaactcttacctgtggtggaggaagcagaaggatgacatgaggatgaaggtcatgtacggttcatttgaagatggtgacgcaaagctagacgagatggaaatggcggatggtttcgagatagctatcaagaaactgacggaatggcttgcaaagaacattgacaagaacaagactaggatatttttcgcaggatcatcaccaacacattcctgggctagcaactggggcggacaagacaagaacaagtgcctgaacgaaacggagccgatcagctacagacccggcggcgggtacaaggctgcaaccacggactacagcctgatggccatggccaggtcctacttccggcggacgctggagccgagaggcatacgcgtccagatactcaacatcacggagctgtccgactaccgcaaggacgggcatcccacggtgttcaggaggcagttcgttcccctgaccaaggagcagatcgcggacccggccagctacgcggactgcacgcactggtgcctcccaggcgtccccgacgtctggaacgagttcctgtatggctacctcacgcagcagagcaaatgacgatgcattattacaagaatggccttgttatatgtagtagtgtacagtgcagtacagattgccagctgctccgtttagattattagggatggacctgctgttacatgtagagagagacagacaggagatctgtcttgcccaacattaattctagtatctgtaaatcttgttcttcttgtccaacattaattctaggatctgctgctaaccattttttttggatttatgtaaactgagtgattatctgaaatagaatgatctgagtttgctgttccagtactgagcaagtaaaaaaaccaaaaaaacaaatcgcccaccgtggggctcgaacccacgaccacaaggttaagagccttgcgctctaccgactgagctagacgggcttgttttccctttttttttctttggctataaattggatccgcatcagtcagctcaacacttgttacggagcaactaaacatagagagagagagagagggtggatgacgaggacggcctactgctttctttgagacagcatgcatgcatggcctgagcttgctttgagccctcctcgctcgctcgctcaccttcttatctcctccatccatccaaaaatatctccatgcgctcagacggggacgagacgacgggagaaggaggaggagggcgcccgcccgccacgcgcctcctccaaatcccagccgtccacgtgtcccagtccgcgacccccacgcgcctatatccatccatcatcctattcctatcccgccacatagtccaccaccacctattattccgctcccgacgcccagaattcacgagaacgcacccgcccgcctcctccttccgtccccatccagatgatgcttagggtttccgcgtctccggccgccgcggtggccaaccatctctctggtggggccgcggcgaccacggctcctgccagggtgacggcgcagcgcagcggcgtctcgctgtccgccgccgccgccgccggcaaggggaaggaggtgctcagcggggtggtgttccagcccttcgaggagatcaagggggagctcgccctcgtgccccagtcccccgacaggtcgctcgcgcgccacaagttcgtcgacgactgcgaggcagccatcaacgagcagatcaatgtggagtacaacgcctcgtatgcgtaccactccctcttcgcctacttcgaccgcgacaacgtggccctcaaaggatttgccaagttcttcaaggaatccagcgacgaggagagggagcacgctgaaaagctcatggagtatcagaacaaacgcggaggcagggtgaggctccagtcgattgtggcgcctttgaccgagtttgaccaccccgagaaaggcgatgctctgtacggtaagttgcgttgccgccgcatctgacttccgggttaggaattaggataggacgtgtaatttattctgcatctgaacctagctttatcagctgcagctttcaagtatatgcatcgatggatgattagattcaaagactaacaaatttaggacgacggcttatacagaatagaatagaatagaaggctggctacgttaattggaagccaatgctctgttttctattttttttatttttgatgggtttcagctatggagctgactctggctctggaaaagctggttaatgagaagctgcacagcctgcatggtgtggcaacaaggtgcaatgatcctcagctgatagacttcatcgagagtgagttcctcgaggagcaggtggaagccataaataaggtctccaagtatgtcgcgcagctgaggagagtgggcaacaaggggcacggggtgtggcactttgatcagatgctgcttcaggaaggggcctgaaggccaacaagggtggcgtggacggagctgagctctgggtggtgtattcttttctttttcttttctttccagttggttagtgttttagttgtagaacggtgttgcgttgcccacatgacatgatggatgttacgtggaggattgtctcttatatttgaacattatattgtcgttcgtttttggcatggctctgcaactgtcgtgagaagatctggactaagaatagatcctaacccaataagtagaaaaataacaaga

SEQ ID NO: 99164 - DNA, 3478 bp, Zea Mays
gcagcattggatttgccccagtgtactacagactcgacaggtacggtgagcataaaagaggagagccgataagcacaatggcgcctgaggaaaggatgaagcagacagagggcagtcacaaggtggtaacagcagcagcagcaggtggcaagatggcggtgctccactctccggtcggagtgaggagcatcgtgacctccctggtggctttcttcatcctagccagctccgtggtgttcctcctcctcgacagagaagccgggctccaagaagaaccggcgataagagccggcggcggcggcggcgacgaggagtgcagctggtctcgggggcgctgggtgtacgacaacgtgtcccggccgctgtacgacgggctcaagtgcgccttcatcttccccgaggtggcctgtgacaagtatggcaggaaggatgtcatgtaccagcactggagatggcagcctcatggtcatggatgcgacctcccaagattcgatgccatgaagctgcttgaagagctgaggaacaagagactggtgtttgtgggtgactcggtgaacaggaaccaatgggtctctctcgtgtgcatggtggaggcctcgatacctgacgacaggctcaagatgcgcatcttcaatggctcgctcatctccttcaaggcactggagtacaacgcgacgatagatttctactggtcgccgctgctggtggagtctaacagcgacaaccccatcatccaccgggtggagtaccggatcataagggcagacaggatcgagaagcacgccagcgtgtggagggacgccgacgtcatcgtcttcaactcttacctgtggtggaggaagcagaaggatgacatgaggatgaaggtcatgtacggttcatttgaagatggtgacgcaaagctagacgagatggaaatggcggatggtttcgagatagctatcaagaaactgacggaatggcttgcaaagaacattgacaagaacaagactaggatatttttcgcaggatcatcaccaacacattcctgggctagcaactggggcggacaagacaagaacaagtgcctgaacgaaacggagccgatcagctacagacccggcggcgggtacaaggctgcaaccacggactacagcctgatggccatggccaggtcctacttccggcggacgctggagccgagaggcatacgcgtccagatactcaacatcacggagctgtccgactaccgcaaggacgggcatcccacggtgttcaggaggcagttcgttcccctgaccaaggagcagatcgcggacccggccagctacgcggactgcacgcactggtgcctcccaggcgtccccgacgtctggaacgagttcctgtatggctacctcacgcagcagagcaaatgacgatgcattattacaagaatggccttgttatatgtagtagtgtacagtgcagtacagattgccagctgctccgtttagattattagggatggacctgctgttacatgtagagagagacagacaggagatctgtcttgcccaacattaattctagtatctgtaaatcttgttcttcttgtccaacattaattctaggatctgctgctaaccattttttttggatttatgtaaactgagtgattatctgaaatagaatgatctgagtttgctgttccagtactgagcaagtaaaaaaaccaaaaaaacaaatcgcccaccgtggggctcgaacccacgaccacaaggttaagagccttgcgctctaccgactgagctagacgggcttgttttccctttttttttctttggctataaattggatccgcatcagtcagctcaacacttgttacggagcaactaaacatagagagagagagagagggtggatgacgaggacggcctactgctttctttgagacagcatgcatgcatggcctgagcttgctttgagccctcctcgctcgctcgctcaccttcttatctcctccatccatccaaaaatatctccatgcgctcagacggggacgagacgacgggagaaggaggaggagggcgcccgcccgccacgcgcctcctccaaatcccagccgtccacgtgtcccagtccgcgacccccacgcgcctatatccatccatcatcctattcctatcccgccacatagtccaccaccacctattattccgctcccgacgcccagaattcacgagaacgcacccgcccgcctcctccttccgtccccatccagatgatgcttagggtttccgcgtctccggccgccgcggtggccaaccatctctctggtggggccgcggcgaccacggctcctgccagggtgacggcgcagcgcagcggcgtctcgctgtccgccgccgccgccgccggcaaggggaaggaggtgctcagcggggtggtgttccagcccttcgaggagatcaagggggagctcgccctcgtgccccagtcccccgacaggtcgctcgcgcgccacaagttcgtcgacgactgcgaggcagccatcaacgagcagatcaatgtggagtacaacgcctcgtatgcgtaccactccctcttcgcctacttcgaccgcgacaacgtggccctcaaaggatttgccaagtgagtcgctgtcgccgtcgtcgtcgtcgcctgcctctcgctaccaaccaacttcggctatccgtctgtaaacaataaatcacagcattaccgttgatgtggttctgcacacctgttctgttcctccaggttcttcaaggaatccagcgacgaggagagggagcacgctgaaaagctcatggagtatcagaacaaacgcggaggcagggtgaggctccagtcgattgtggcgcctttgaccgagtttgaccaccccgagaaaggcgatgctctgtacgctatggagctgactctggctctggaaaagctggttaatgagaagctgcacagcctgcatggtgtggcaacaaggtgcaatgatcctcagctgatagacttcatcgagagtgagttcctcgaggagcaggtggaagccataaataaggtctccaagtatgtcgcgcagctgaggagagtgggcaacaaggggcacggttagtctgttgctaataaacttggtttcatctgctatatatgtctcgtgcccaaagttacgatattgttgagacgtggcttgcgtgcaggggtgtggcactttgatcagatgctgcttcaggaaggggcctgaaggccaacaagggtggcgtggacggagctgagctctgggtggtgtattcttttctttttcttttctttccagttggttagtgttttagttgtagaacggtgttgcgttgcccacatgacatgatggatgttacgtggaggattgtctcttatatttgaacattatattgtcgttcgtttttggcatggctctgcaactgtcgtgagaagatctggactaagaatagatcctaacccaataagtagaaaaataacaaga

SEQ ID NO: 99165 - DNA, 3259 bp, Zea Mays
gcagcattggatttgccccagtgtactacagactcgacaggtacggtgagcataaaagaggagagccgataagcacaatggcgcctgaggaaaggatgaagcagacagagggcagtcacaaggtggtaacagcagcagcagcaggtggcaagatggcggtgctccactctccggtcggagtgaggagcatcgtgacctccctggtggctttcttcatcctagccagctccgtggtgttcctcctcctcgacagagaagccgggctccaagaagaaccggcgataagagccggcggcggcggcggcgacgaggagtgcagctggtctcgggggcgctgggtgtacgacaacgtgtcccggccgctgtacgacgggctcaagtgcgccttcatcttccccgaggtggcctgtgacaagtatggcaggaaggatgtcatgtaccagcactggagatggcagcctcatggtcatggatgcgacctcccaagattcgatgccatgaagctgcttgaagagctgaggaacaagagactggtgtttgtgggtgactcggtgaacaggaaccaatgggtctctctcgtgtgcatggtggaggcctcgatacctgacgacaggctcaagatgcgcatcttcaatggctcgctcatctccttcaaggcactggagtacaacgcgacgatagatttctactggtcgccgctgctggtggagtctaacagcgacaaccccatcatccaccgggtggagtaccggatcataagggcagacaggatcgagaagcacgccagcgtgtggagggacgccgacgtcatcgtcttcaactcttacctgtggtggaggaagcagaaggatgacatgaggatgaaggtcatgtacggttcatttgaagatggtgacgcaaagctagacgagatggaaatggcggatggtttcgagatagctatcaagaaactgacggaatggcttgcaaagaacattgacaagaacaagactaggatatttttcgcaggatcatcaccaacacattcctgggctagcaactggggcggacaagacaagaacaagtgcctgaacgaaacggagccgatcagctacagacccggcggcgggtacaaggctgcaaccacggactacagcctgatggccatggccaggtcctacttccggcggacgctggagccgagaggcatacgcgtccagatactcaacatcacggagctgtccgactaccgcaaggacgggcatcccacggtgttcaggaggcagttcgttcccctgaccaaggagcagatcgcggacccggccagctacgcggactgcacgcactggtgcctcccaggcgtccccgacgtctggaacgagttcctgtatggctacctcacgcagcagagcaaatgacgatgcattattacaagaatggccttgttatatgtagtagtgtacagtgcagtacagattgccagctgctccgtttagattattagggatggacctgctgttacatgtagagagagacagacaggagatctgtcttgcccaacattaattctagtatctgtaaatcttgttcttcttgtccaacattaattctaggatctgctgctaaccattttttttggatttatgtaaactgagtgattatctgaaatagaatgatctgagtttgctgttccagtactgagcaagtaaaaaaaccaaaaaaacaaatcgcccaccgtggggctcgaacccacgaccacaaggttaagagccttgcgctctaccgactgagctagacgggcttgttttccctttttttttctttggctataaattggatccgcatcagtcagctcaacacttgttacggagcaactaaacatagagagagagagagagggtggatgacgaggacggcctactgctttctttgagacagcatgcatgcatggcctgagcttgctttgagccctcctcgctcgctcgctcaccttcttatctcctccatccatccaaaaatatctccatgcgctcagacggggacgagacgacgggagaaggaggaggagggcgcccgcccgccacgcgcctcctccaaatcccagccgtccacgtgtcccagtccgcgacccccacgcgcctatatccatccatcatcctattcctatcccgccacatagtccaccaccacctattattccgctcccgacgcccagaattcacgagaacgcacccgcccgcctcctccttccgtccccatccagatgatgcttagggtttccgcgtctccggccgccgcggtggccaaccatctctctggtggggccgcggcgaccacggctcctgccagggtgacggcgcagcgcagcggcgtctcgctgtccgccgccgccgccgccggcaaggggaaggaggtgctcagcggggtggtgttccagcccttcgaggagatcaagggggagctcgccctcgtgccccagtcccccgacaggtcgctcgcgcgccacaagttcgtcgacgactgcgaggcagccatcaacgagcagatcaatgtggagtacaacgcctcgtatgcgtaccactccctcttcgcctacttcgaccgcgacaacgtggccctcaaaggatttgccaagttcttcaaggaatccagcgacgaggagagggagcacgctgaaaagctcatggagtatcagaacaaacgcggaggcagggtgaggctccagtcgattgtggcgcctttgaccgagtttgaccaccccgagaaaggcgatgctctgtacgctatggagctgactctggctctggaaaagctggttaatgagaagctgcacagcctgcatggtgtggcaacaaggtgcaatgatcctcagctgatagacttcatcgagagtgagttcctcgaggagcaggtggaagccataaataaggtctccaagtatgtcgcgcagctgaggagagtgggcaacaaggggcacggggtgtggcactttgatcagatgctgcttcaggaaggggcctgaaggccaacaagggtggcgtggacggagctgagctctgggtggtgtattcttttctttttcttttctttccagttggttagtgttttagttgtagaacggtgttgcgttgcccacatgacatgatggatgttacgtggaggattgtctcttatatttgaacattatattgtcgttcgtttttggcatggctctgcaactgtcgtgagaagatctggactaagaatagatcctaacccaataagtagaaaaataacaaga

SEQ ID NO: 99166 - DNA, 1047 bp, Zea Mays
aagcttgcacatctccgcctcctcgctcctcttcccgctctccgaatccaccgctctccccactttccgcgaccccgacgatgagcccccccaaaagcgctgcgaggcccccggcatccctgacgagcccgaagaccggcgctaacaaacggcagcggaaggcggcgtcggcggtgccgctgggcgacatcaccaacctcctagtcctcgctgagtccccgaccccgagcaagcccaggaggacagcacgccgggccctccccgctacctctgacgtctccgcggtctcctccacctgctcctcctccgcctccgtcacgcccgcgcccaagccttcctccgccgctgtcttcgaggaggagcacagcgtggtcaaatcgccaaccatctccacagttcaccgcaggaccactggggctcaagagaggtgtaggaggaaccccgcctccgccaacaacaagggcaaggaaccggtcgctgccacggcgagctgccccccgcttgggaaatctgcaaggacccacagcaggaaaaaggatactcggcccatctccgcatcagttccctgtcatgaaggtagaaagaagcggcccattgcaagcacacccaacttactagaggaccttttggagaagcagagagcatactttgcagatatcgatgcctttgagctggtagaggaagaggtgtcggaatccgagctggagtaaaaaccaaagcagatatggcctttcttttttttttcttgtacagaagcaaattactggaaccaccggcgaggtatggtagcaatgtgtagctagctctacttgtaacacggggggcactaatcgctcgatatttcgtgtgcttgggaatttgttgctctggattatattatctaatatacttgtactctgtaggagagagggggtaggcaagtgtttgcaaactggttttgctactcgcagcagttgaaactgctgggtaagatgatgtctagtagaaacatgtgttgatgcaaatcagcttggaggatcttccatacgagttaaggaacggtttctt

SEQ ID NO: 99167 - DNA, 1656 bp, Zea Mays
ggaagcgtgagggatcaccctcgcagctctcctctgactgacaaggagaagctctgcaaccatggagtcacacgagacatcaagcaaacaaatccaacgccatggcaaggccaggaaggagaggttcctggacttccttagggcggcgccttccaaggacctatggctgcagcgcttcggcgtcaccgtgaccgccccacacgccttcctccgccgcgtcgccaccgtcggctacgtgccggcagcctacgcccgcttcttccccctccgcgcgccggcggcgttcgtgcgcggcgtggactggcgcgccctgcgcgcccggtgcaaggcctgggcgaggcggcccacgaacgcggcgctgctcgtctggctggccttcgtcgccgcgggcgtcgcgttcgtcttcctgcttatgacgggggcgctcgactccgccgtgcccgacgcggcccggcggcggcgctggacggaggtcgccaaccaggtgctcaacgcgctcttcaccgtcatgtgcgtgtaccagcacccgcggctctgccaccacctcgcgctcctgctccgctggtggcgcgacgacgccgccgccgccgagctccgcgccgtctactgcaagaacgccgccggcacgaggcgggagcgcctccacgtcgccgtcgtgctgctgctgctccacgccacgtgcttcgcgcagtacgcctactgcgcgctcttctgggcgttcagcagcgacacgcgccccgactgggccgtcaacttctgcatggcgttcgggctcgccgcccccgtcgccgccgcgctctacatggtctacggaccgctcggcagaaggatcgtgcagctcccggcggcggcggcggcggacaccggagacgacgaggccgtcgcggtgatggccgccgatgaggcgcggtacaccggtggcagagtggcggtcgccaggccggagtgggccggcgggctgttcgacctcgccgacgacccgacggtagcggcgctgtccctgacgtgcacgttctgcatgttcgggtggaacatggagcgcatgggcatgggcaatatgtacgtgcacgtcttcacgttcgcactcctctgcgccgcgcccgtgctggtgttcgcggtcgccgcgcttaacatccacgacgccacgctggggttcctcgtcggcgccacgggcgcgctgctctccgtgctgggcctcacgtacgggggcttctggcgcgcgcagatgcgcaggcgcttcagcctgccggccgaccggtccatgtgcggcggccggccagccgcggcggactacgccaagtggctgctctgcgcgccgtgcgcgctggcgcaggaggtcaggacgggcaacctatacgacgtggaggatggcagcttgtaccacgtgaggggcagcgacgaggacgcgttggaggaggagaagcctggaatggcgcctctagagagggaggggtgcgtcgcgccagcgccattgacggccgacaagacacgcgctggtcgtgttgagtgtgtagttaccgttaaacctccggcgccgctgaggataatgagaggtgaataagtgaacatgcacaaatgtacaaaaggtgatttaatgcgctttggcttttctttagttcttttatttccagtgttttgcacaccaatgttattgca

SEQ ID NO: 99168 - DNA, 1912 bp, Zea Mays
ggccctctacaaaaggccaagaaaaaggaacctgccgtgcccgtcgcgctcgcgatatggctgtggccggcagcgacgatgctccaagtccagccaccagaggccatggcggcaccgtgcgcctcctcggctacggaccccggacgcccacgccgcaactcaccgagcgcctcctcgacgacaagccgcagcagcgaccgcactgctgcgtcgaggaggagctcccctccttctggcgctggaagccgagcgaccgcggccacgtggactgggcctccgtccgccggacgtgcaaggagtggatcaagaaccccatgaacgtggcgctgctcctgtggctgctctgcgtcggcgtctccggcggcatgctcgtgctcctcctcctcggcctgctcgacagcgcgttccaggggacggccgacaggaaccgctggatcgagatcaacaaccaggtcctcaacgcgctcttcacgctcatgagcctgtaccagcaccctgccctctgccaccacctcttcctgctctgccgctggcgcccggccgacgccgccgagctccgcgccgcctactgcaaggagggcgccgccgccgcgccgcgccacggggaccgcgcgcacgtggccgtcgtcgtcgcgctgctgcacctcaccgtgctgtgccagtacgtgctgtgcggcctctactggggctacaccaggaccacgcgcccggagctcgccgaggacggcttcttcgcgctgggcatcctagcgccggtcgccgccgcggtgtacaccgtgtgcagcccgttgggtaaaggcgaccggtgccacgacctcgcctcctgctccgttccagcctcgacaaaggcgcagcccacgcccactgggcacgtcgtgctggagccggactgggccggcggcatgctcgactgcggcggcggcgacgcggcggccgggtgcctctccctgtcgtgcacgttctgcgtcttcgggtggaacatggagaggctgggcctgggcaacgcgtacgtgcacgccgtcacgttcgcgctcctgtgcttcgcgccgctctgggtgctgggcgtctcggcgctgcacatccacagccacgtcgtcggcgacgccgtgggcggcgccggcgtgctactctgcgcgtgcggcctgctgtacggcggctactggcggatacagatgcggaggaggttcgggctcccagggaccacggcgtgctgcggctccaagtcgctgacggactacgcgcggtggctcttctgctggccctgcgcgctggcgcaggaggtccgcacggcgagcatgtaccacgtcgacggcgaggtcttctactcgaagaccgttgaccacgacgatctccacgccgacagcgggaagcggtggctcgcggtgtccaagcatcgtgacgtttttagtgcagcggacacggttgcagtgtcacagcagtcggcggcaagtggtcatcgtctggttgtcattcatgacgaaacgaccatcatggctccacctgttcaggtcgtggttgtgcaggtggaagacaagtgcagtgttgttcgtcacggggagacgagcggttcttcttcttctatttcgacatcggcgagcgaggaagaggacgtgtcctttttggagtcgaaccgagaaatgctggaagatgatgctgatcgtagtacgtcgtctgatgggagctggagagtggagaaagtgaagagactgatcaatatggtcaccctggtgtctctgctcattcttttgtacacaaggggaattattctgtagagaagcagtggaattaaggatgtgttgttctagatgctatttctccacttctgttgctgaaaacaggatcacagtgtaggttttgtatagggaactagtgaagcaccatgcaatttttgaaagtaaactcattcttatac

SEQ ID NO: 99169 - DNA, 213 bp, Zea Mays
atgaaggctggccttccaaccccggagtacaaggcccgtatcaggtacgactatggagaagctaggagaatagaacatgggttatctagagacgctgcagcggttcaatttaacaaggaacttataatgatgcaacctgctgagggagataggatagccacccagagatcaacaagtgttgaacaggaccctctccccagcgctgatgcctaa

SEQ ID NO: 99170 - DNA, 1143 bp, Zea Mays
tgcataggatccatatgtgccttatgaaatgtcctgcttctctttcttttctggcaccttaattgtttctctgaatattctttttctatactgtagggttgtctatacggccaggccacacgcaccaagaacagaaaaggttgtaggcatagggtttcaacctgggtttgatccttacaagattgtaagcgcatctcaagctggagacattcagtttcttgatgttagaaggtcagcagaaccctacctgactattgaggcacacaggggttcacttacagcattggcggttcaccggcatgccccagttgttgctagtggctcagccaagcagatgattaaagtgtttagtcttgaaggagagcagttgacaataattcgctaccagccatcttttatgggccaaagaataggcactgtgaactgcctttcttttcacccatacaaatcactcctatctgctggtgctggtgataatgctcttgtctctatctacgccgaggaaaattacaagtaaggtgaggcctacatctcatgacaatgcagccacaaggcaaccggcaggcctggtgttttttggccaagtgatgctcccccgcagcatggtccagctacaagatccaagatggtgtgaagaggctcccggtgcgtattgcctgttgttggacgacgtgtgcaatttgtaagatagagccaagattcgttagccgcctccttgcagaaggtttgtggaacccctaccctgatcatgtcattgaacttggaggctccccccaaataattaatcatacctaggttaaccaaaatgtaaatagacaccgcgtttcgggttgtcggtggtcagcattcctccttttgaagatgcttgtgatgatatgagaaatcaggtttggtaggggctgctgcctgggcaagtggggtttgtgcatatgggcccaggtagtatggttgcacatgtctgctcacagatgctgttgaatggaaggaatgttgtctagtcgcttgcattgtaaccattggagattgtccatttgtatgtatggatcttgtctgtacatctgtaatccgtgcgatgatgtgttttatggaacagtccaaggcttcaggtcttgtggatgcctgctgtgcaattgtttcgggaaa

SEQ ID NO: 99171 - DNA, 3796 bp, Zea Mays
ctttttcttagcatgatgtgcttacatggggacatacctataaaccatgcaggttttgtaagcgatcattactccgtggttctctggatctttctcttattgaccaaattcctggaaggcaaaatgaccgtaaaactcttcttggggagctcaattggatttttactgctataacagatacaattgcatggaatgttcttcctcatgatctgttccaaaggcttttcaggcaagatcttcttgttgctagcctctttcgtaacttcttgcttgctgagagaatcatgcgatcagcaaattgttctccagtttcttatccgttgttacctccaacacatcaacaccatatgtgggatgcatgggacatggctgctgagatttgcctttccaagcttcctcagttaattgctgatccaaatgcagagtttcagccaagtccgttttttacggaacaactgacggctttcgaagtgtggcttgatcatggctccgaggacaagaaacctcctgaacagttacccatagttcttcaggtcctgcttagtcaatcacacagatttagagcacttgttctgctcggaagatttcttgacatggggccgtgggcagttgatttggccctgtctgtcggaatatttccttatgtactcaaactgcttcaaacaagtgcaatggagttgcgtcaaattcttgtgtttatatggacaaaaattctctctcttgataagtcgtgccaggttgatttggttaaagatggaggacacacatattttgttaggtttcttgacagtttggatgcttacccagaacagcgtgcaatggctgcttttgttttagcagtcattgtggatgggcataggacaggccaagaggcttgtatgaatgcagggcttatagatgtttgcttgagacacctgcaacctgagaatcctcatgattcacagacagaacctttacttctacagtggctttgtttatgccttgggaaactctgggaagatttccctgatgttcagctgcttactttacaaacaaatacgccagaaattgtactatgcttattgtcggagcctcaacctgaggtcagagctgctgctgtttttgcacttgggactctcctggatactacatcatcaaatggcgctgatgatgattctgactatgatgaaaaggtgaaagctgaaataaatgtagttcgaagccttctgcagatatcttcagatgccagtccccttgttcgatctgaggttgctatagcgcttactcgctttgcattgggtcataacaaacatctcaaatctgttgcggctgagtattggaaacctcaatccaattcattgctgaagtcactgccatcattggcaaatataaataacccaaacaatgtttacagtcccaacaatattctacaaggcagcattggtcctgtgctgagggttggcagtgatagcagtgctgctggtcgtgatggaagaatgtctacaagtagcccaattgcaacaagtagcatcatgcatggctctccccagtcagacgattcttcccaactctctgattctggcttattactgagagagaatgctagtaatggtggtcccggctacactaggtccaggcctgttgataatgtcatttattctcaatttatatcaactatgtgttcttttgctaaagatccttacccaagaattgcaactattggtcggagagcactgtcccttataggtgttgaacaagtagtcatgaaaaatactagatttaatagtggaggtgcacatcggggagagacatctgcttcaaactttggaatggcacgctcttcatcctggcttgatatgaattctggaaacaacttgataaaatttaggacccctcctgttagccctcctcagcatgattttcttccaggattacgccgagtgtgttctatggagtttggacaacatcctataagttcacctgatggcttagctgttccccttttaagctccgctgcagctaccagtaatgctgaactaagtatactccctcaatcaacaatttataactggagttgtggtcacttctctaggcctcttttaattggctctgatgataacgaagaggcaaatgctagaagggaagagagagaacgacttgcactagattatatcgctaagtgccagcgctcctcagcttgcaagatgacaaaccaaattgctagttgggatacgaggtttgagttgggaacaaaaacagctttattgttgccattttctccgatcgttgttgcagctgatgaaaatgagcaaataagagtgtggaactacgacgatgcgctgccagtgaactcttatcaaaaccataatttgtcagacagagggctatccaaacttttgctgattaatgagcttgatgagagcttgcttttagctgcctcaagtgatggaaatgtacgtgtatggaaaaattttactcaaaagggaggacaaaaacttgtaacggctttctcatccgttcagggacatcgaactgctggtcgcagtattgtgattgactggcagcagcaatctggttatctttatgcatctggtgacatgtcttccatcttgctatgggatcttgacaaggaacaacaactcagcactattcagtcatctggtgatagtgccatttcttcactgtctgcatctcaggtctgctctggacattttgctgctggttttgctgctggttctgtcaggatatatgacatacgctctcctgatagggttgtctatacggccaggccacacgcaccaagaacagaaaaggttgtaggcatagggtttcaacctgggtttgatccttacaagattgtaagcgcatctcaagctggagacattcagtttcttgatgttagaaggtcagcagaaccctacctgactattgaggcacacaggggttcacttacagcattggcggttcaccggcatgccccagttgttgctagtggctcagccaagcagatgattaaagtgtttagtcttgaaggagagcagttgacaataattcgctaccagccatcttttatgggccaaagaataggcactgtgaactgcctttcttttcacccatacaaatcactcctatctgctggtgctggtgataatgctcttgtctctatctacgccgaggaaaattacaagtaaggtgaggcctacatctcatgacaatgcagccacaaggcaaccggcaggcctggtgttttttggccaagtgatgctcccccgcagcatggtccagctacaagatccaagatggtgtgaagaggctcccggtgcgtattgcctgttgttggacgacgtgtgcaatttgtaagatagagccaagattcgttagccgcctccttgcagaaggtttgtggaacccctaccctgatcatgtcattgaacttggaggctccccccaaataattaatcatacctaggttaaccaaaatgtaaatagacaccgcgtttcgggttgtcggtggtcagcattcctccttttgaagatgcttgtgatgatatgagaaatcaggtttggtaggggctgctgcctgggcaagtggggtttgtgcatatgggcccaggtagtatggttgcacatgtctgctcacagatgctgttgaatggaaggaatgttgtctagtcgcttgcattgtaaccattggagattgtccatttgtatgtatggatcttgtctgtacatctgtaatccgtgcgatgatgtgttttatggaacagtccaaggcttcaggtcttgtggatgcctgctgtgcaattgtttcgggaaa

SEQ ID NO: 99172 - DNA, 4802 bp, Zea Mays
atggcattgggagatctcatggcgtccaggctcgtccactcctcgtcctccaggggactgtcgtcctcgccgacgccgccgttgcccaatcaacaccaccaccagaaccacaaccataccggggatggcctcctggctgccagcgggccggagcccaggaacgggctggaggccgacgaggtggataagtcggcgcccgtgccgtacctgccccagctggtcgtgctgtgcgagcagcgccacgagcctgaggggatcgatgaggctgcggccgcagccgcagggccctccaccagtggcctcgtctccaagtggcgccccaaggatcggatgaagacaggatgtgttgcacttgtattatgtttaaacataagtgtggatccacctgatgtaattaaaatttccccttgtgcaagaatggagtgctggatagatcctttttctatggcacctcctaaagcccttgagagtattggaaaaacgttgcattcacagtatgagcgctggcaacctaaggctcgatacaagcttcagctggacccaacagtggaggaagttaagaagctttgcaatacttgccgcaaatatgccagatcagagagagttcttttccattataatggccatggcgtaccaaagcctacatctaatggtgagatttgggtgtttaacaagagttacacacagtatattccacttccaattactgatcttgattcatggctgaagacaccttcaatttacgtttttgattgctcagcgtctggaattattgtgaaagcttttctagagcgcctagattggagttctagctcctctgcatcttcacggaaggactgcattcttcttgctgcctgtgaggcacatcaaactcttcctcagagtgcagaatttcctgccgatgtgtttacagcttgcctcacaacacccatcaaaatggctttgcactggttttgtaagcgatcattactccgtggttctctggatctttctcttattgaccaaattcctggaaggcaaaatgaccgtaaaactcttcttggggagctcaattggatttttactgctataacagatacaattgcatggaatgttcttcctcatgatctgttccaaaggcttttcaggcaagatcttcttgttgctagcctctttcgtaacttcttgcttgctgagagaatcatgcgatcagcaaattgttctccagtttcttatccgttgttacctccaacacatcaacaccatatgtgggatgcatgggacatggctgctgagatttgcctttccaagcttcctcagttaattgctgatccaaatgcagagtttcagccaagtccgttttttacggaacaactgacggctttcgaagtgtggcttgatcatggctccgaggacaagaaacctcctgaacagttacccatagttcttcaggtcctgcttagtcaatcacacagatttagagcacttgttctgctcggaagatttcttgacatggggccgtgggcagttgatttggccctgtctgtcggaatatttccttatgtactcaaactgcttcaaacaagtgcaatggagttgcgtcaaattcttgtgtttatatggacaaaaattctctctcttgataagtcgtgccaggttgatttggttaaagatggaggacacacatattttgttaggtttcttgacagtttggatgcttacccagaacagcgtgcaatggctgcttttgttttagcagtcattgtggatgggcataggacaggccaagaggcttgtatgaatgcagggcttatagatgtttgcttgagacacctgcaacctgagaatcctcatgattcacagacagaacctttacttctacagtggctttgtttatgccttgggaaactctgggaagatttccctgatgttcagctgcttactttacaaacaaatacgccagaaattgtactatgcttattgtcggagcctcaacctgaggtcagagctgctgctgtttttgcacttgggactctcctggatactacatcatcaaatggcgctgatgatgattctgactatgatgaaaaggtgaaagctgaaataaatgtagttcgaagccttctgcagatatcttcagatgccagtccccttgttcgatctgaggttgctatagcgcttactcgctttgcattgggtcataacaaacatctcaaatctgttgcggctgagtattggaaacctcaatccaattcattgctgaagtcactgccatcattggcaaatataaataacccaaacaatgtttacagtcccaacaatattctacaaggcagcattggtcctgtgctgagggttggcagtgatagcagtgctgctggtcgtgatggaagaatgtctacaagtagcccaattgcaacaagtagcatcatgcatggctctccccagtcagacgattcttcccaactctctgattctggcttattactgagagagaatgctagtaatggtggtcccggctacactaggtccaggcctgttgataatgtcatttattctcaatttatatcaactatgtgttcttttgctaaagatccttacccaagaattgcaactattggtcggagagcactgtcccttataggtgttgaacaagtagtcatgaaaaatactagatttaatagtggaggtgcacatcggggagagacatctgcttcaaactttggaatggcacgctcttcatcctggcttgatatgaattctggtaagttataatcactttccttactatgtgcttggaaattgaaacatcttgctttactgggtgttcagagaaaatcaagaattgctgaatcgagtttcctgtattttgcaggaaacaacttgataaaatttaggacccctcctgttagccctcctcagcatgattttcttccaggattacgccgagtgtgttctatggagtttggacaacatcctataagttcacctgatggcttagctgttccccttttaagctccgctgcagctaccagtaatgctgaactaagtatactccctcaatcaacaatttataactggagttgtggtcacttctctaggcctcttttaattggctctgatgataacgaagaggcaaatgctagaagggaagagagagaacgacttgcactagattatatcgctaagtgccagcgctcctcttgcaagatgacaaaccaaattgctagttgggatacgaggtttgagttgggaacaaaaacagctttattgttgccattttctccgatcgttgttgcagctgatgaaaatgagcaaataagagtgtggaactacgacgatgcgctgccagtgaactcttatcaaaaccataatttgtcagacagagggctatccaaacttttgctgattaatgagcttgatgagagcttgcttttagctgcctcaagtgatggaaatgtacgtgtatggaaaaattttactcaaaagggaggacaaaaacttgtaacggctttctcatccgttcagggacatcgaactgctggtcgcagtattgtgattgactggcagcagcaatctggttatctttatgcatctggtgacatgtcttccatcttgctatgggatcttgacaaggaacaacaactcagcactattcagtcatctggtgatagtgccatttcttcactgtctgcatctcaggtctgctctggacattttgctgctggttttgctgctggttctgtcaggatatatgacatacgctctcctgatagggttgtctatacggccaggccacacgcaccaagaacagaaaaggttgtaggcatagggtttcaacctgggtttgatccttacaagattgtaagcgcatctcaagctggagacattcagtttcttgatgttagaaggtcagcagaaccctacctgactattgaggcacacaggggttcacttacagcattggcggttcaccggcatgccccagttgttgctagtggctcagccaagcagatgattaaagtgtttagtcttgaaggagagcagttgacaataattcgctaccagccatcttttatgggccaaagaataggcactgtgaactgcctttcttttcacccatacaaatcactcctatctgctggtgctggtgataatgctcttgtctctatctacgccgaggaaaattacaagtaaggtgaggcctacatctcatgacaatgcagccacaaggcaaccggcaggcctggtgttttttggccaagtgatgctcccccgcagcatggtccagctacaagatccaagatggtgtgaagaggctcccggtgcgtattgcctgttgttggacgacgtgtgcaatttgtaagatagagccaagattcgttagccgcctccttgcagaaggtttgtggaacccctaccctgatcatgtcattgaacttggaggctccccccaaataattaatcatacctaggttaaccaaaatgtaaatagacaccgcgtttcgggttgtcggtggtcagcattcctccttttgaagatgcttgtgatgatatgagaaatcaggtttggtaggggctgctgcctgggcaagtggggtttgtgcatatgggcccaggtagtatggttgcacatgtctgctcacagatgctgttgaatggaaggaatgttgtctagtcgcttgcattgtaaccattggagattgtccatttgtatgtatggatcttgtctgtacatctgtaatccgtgcgatgatgtgttttatggaacagtccaaggcttcaggtcttgtggatgcctgctgtgcaattgtttcgggaaa

SEQ ID NO: 99173 - DNA, 4894 bp, Zea Mays
ctctctctctcctcccggccaaccaaaccctaaccctaaacccctcccccaccaacctcggcccagtctccccacccccactgacccggctccccacctccgactcgccacgctggcccgattcgatcgatgtacgtgagcgagctcccgacctcatgatggttttggctgcggggtgaaaagaggcacagcaagcgtcgatggcattgggagatctcatggcgtccaggctcgtccactcctcgtcctccaggggactgtcgtcctcgccgacgccgccgttgcccaatcaacaccaccaccagaaccacaaccataccggggatggcctcctggctgccagcgggccggagcccaggaacgggctggaggccgacgaggtggataagtcggcgcccgtgccgtacctgccccagctggtcgtgctgtgcgagcagcgccacgagcctgaggggatcgatgaggctgcggccgcagccgcagggccctccaccagtggcctcgtctccaagtggcgccccaaggatcggatgaagacaggatgtgttgcacttgtattatgtttaaacataagtgtggatccacctgatgtaattaaaatttccccttgtgcaagaatggagtgctggatagatcctttttctatggcacctcctaaagcccttgagagtattggaaaaacgttgcattcacagtatgagcgctggcaacctaaggctcgatacaagcttcagctggacccaacagtggaggaagttaagaagctttgcaatacttgccgcaaatatgccagatcagagagagttcttttccattataatggccatggcgtaccaaagcctacatctaatggtgagatttgggtgtttaacaagagttacacacagtatattccacttccaattactgatcttgattcatggctgaagacaccttcaatttacgtttttgattgctcagcgtctggaattattgtgaaagcttttctagagcgcctagattggagttctagctcctctgcatcttcacggaaggactgcattcttcttgctgcctgtgaggcacatcaaactcttcctcagagtgcagaatttcctgccgatgtgtttacagcttgcctcacaacacccatcaaaatggctttgcactggttttgtaagcgatcattactccgtggttctctggatctttctcttattgaccaaattcctggaaggcaaaatgaccgtaaaactcttcttggggagctcaattggatttttactgctataacagatacaattgcatggaatgttcttcctcatgatctgttccaaaggcttttcaggcaagatcttcttgttgctagcctctttcgtaacttcttgcttgctgagagaatcatgcgatcagcaaattgttctccagtttcttatccgttgttacctccaacacatcaacaccatatgtgggatgcatgggacatggctgctgagatttgcctttccaagcttcctcagttaattgctgatccaaatgcagagtttcagccaagtccgttttttacggaacaactgacggctttcgaagtgtggcttgatcatggctccgaggacaagaaacctcctgaacagttacccatagttcttcaggtcctgcttagtcaatcacacagatttagagcacttgttctgctcggaagatttcttgacatggggccgtgggcagttgatttggccctgtctgtcggaatatttccttatgtactcaaactgcttcaaacaagtgcaatggagttgcgtcaaattcttgtgtttatatggacaaaaattctctctcttgataagtcgtgccaggttgatttggttaaagatggaggacacacatattttgttaggtttcttgacagtttggatgcttacccagaacagcgtgcaatggctgcttttgttttagcagtcattgtggatgggcataggacaggccaagaggcttgtatgaatgcagggcttatagatgtttgcttgagacacctgcaacctgagaatcctcatgattcacagacagaacctttacttctacagtggctttgtttatgccttgggaaactctgggaagatttccctgatgttcagctgcttactttacaaacaaatacgccagaaattgtactatgcttattgtcggagcctcaacctgaggtcagagctgctgctgtttttgcacttgggactctcctggatactacatcatcaaatggcgctgatgatgattctgactatgatgaaaaggtgaaagctgaaataaatgtagttcgaagccttctgcagatatcttcagatgccagtccccttgttcgatctgaggttgctatagcgcttactcgctttgcattgggtcataacaaacatctcaaatctgttgcggctgagtattggaaacctcaatccaattcattgctgaagtcactgccatcattggcaaatataaataacccaaacaatgtttacagtcccaacaatattctacaaggcagcattggtcctgtgctgagggttggcagtgatagcagtgctgctggtcgtgatggaagaatgtctacaagtagcccaattgcaacaagtagcatcatgcatggctctccccagtcagacgattcttcccaactctctgattctggcttattactgagagagaatgctagtaatggtggtcccggctacactaggtccaggcctgttgataatgtcatttattctcaatttatatcaactatgtgttcttttgctaaagatccttacccaagaattgcaactattggtcggagagcactgtcccttataggtgttgaacaagtagtcatgaaaaatactagatttaatagtggaggtgcacatcggggagagacatctgcttcaaactttggaatggcacgctcttcatcctggcttgatatgaattctggaaacaacttgataaaatttaggacccctcctgttagccctcctcagcatgattttcttccaggattacgccgagtgtgttctatggagtttggacaacatcctataagttcacctgatggcttagctgttccccttttaagctccgctgcagctaccagtaatgctgaactaagtatactccctcaatcaacaatttataactggagttgtggtcacttctctaggcctcttttaattggctctgatgataacgaagaggcaaatgctagaagggaagagagagaacgacttgcactagattatatcgctaagtgccagcgctcctcagcttgcaagatgacaaaccaaattgctagttgggatacgaggtttgagttgggaacaaaaacagctttattgttgccattttctccgatcgttgttgcagctgatgaaaatgagcaaataagagtgtggaactacgacgatgcgctgccagtgaactcttatcaaaaccataatttgtcagacagagggctatccaaacttttgctgattaatgagcttgatgagagcttgcttttagctgcctcaagtgatggaaatgtacgtgtatggaaaaattttactcaaaagggaggacaaaaacttgtaacggctttctcatccgttcagggacatcgaactgctggtcgcagtattgtgattgactggcagcagcaatctggttatctttatgcatctggtgacatgtcttccatcttgctatgggatcttgacaaggaacaacaactcagcactattcagtcatctggtgatagtgccatttcttcactgtctgcatctcaggtctgctctggacattttgctgctggttttgctgctggttctgtcaggatatatgacatacgctctcctgatagggttgtctatacggccaggccacacgcaccaagaacagaaaaggttgtaggcatagggtttcaacctgggtttgatccttacaagattgtaagcgcatctcaagctggagacattcagtttcttgatgttagaaggtcagcagaaccctacctgactattgaggcacacaggggttcacttacagcattggcggttcaccggcatgccccagttgttgctagtggctcagccaagcagatgattaaagtgtttagtcttgaaggagagcagttgacaataattcgctaccagccatcttttatgggccaaagaataggcactgtgaactgcctttcttttcacccatacaaatcactcctatctgctggtgctggtgataatgctcttgtctctatctacgccgaggaaaattacaagtaaggtgaggcctacatctcatgacaatgcagccacaaggcaaccggcaggcctggtgttttttggccaagtgatgctcccccgcagcatggtccagctacaagatccaagatggtgtgaagaggctcccggtgcgtattgcctgttgttggacgacgtgtgcaatttgtaagatagagccaagattcgttagccgcctccttgcagaaggtttgtggaacccctaccctgatcatgtcattgaacttggaggctccccccaaataattaatcatacctaggttaaccaaaatgtaaatagacaccgcgtttcgggttgtcggtggtcagcattcctccttttgaagatgcttgtgatgatatgagaaatcaggtttggtaggggctgctgcctgggcaagtggggtttgtgcatatgggcccaggtagtatggttgcacatgtctgctcacagatgctgttgaatggaaggaatgttgtctagtcgcttgcattgtaaccattggagattgtccatttgtatgtatggatcttgtctgtacatctgtaatccgtgcgatgatgtgttttatggaacagtccaaggcttcaggtcttgtggatgcctgctgtgcaattgtttcgggaaa

SEQ ID NO: 99174 - DNA, 1365 bp, Zea Mays
aaaaaaacagaagtactaacgccccgcccctgcctggggttttaaccctacccaaccgccgcccatggcgtccatctcggagcccgctgctagggagaagcccatcgtcgtccgggtcaagcgcaaaccttcgcaaaaccgcccggacgctttctggctagagattaatgagaggccggcaaagaaggcggcgattgatttctcccgcctttccatctccgaaccctcctcgtcctctgccagtgtcaaagcttcagaggaaccacgggttaagaaaattcttgtccagcacatcgagacagtacaccactctgaagctgtcgaagatgttttacaatctcttttgcttgttgactcaaattccaaggagacaaagagcaagacaaaggagtggaatgacagaatcaagcaagacaaaaaaccagagcaactacgatcagctgccagacagaggcatgaggatatgggaagaaatgctcggtttgcacaaatatggaagagtcgaaaaggagaaaaggctgatgctggtgactcattgagagaaatatgccatctttatgatgctgtccaagtagatcccgatgatgagaagcatccagcagaaccacggattacatcttttgaagagggtgctgttctatgcaactttcttccacttatacgggaatacttgccatcaactgccgaggaaattgaggcggatataatttcattggcgcaatcagaagattctgaagtttatgatatctatactgtcaaggaggtggatgacacaatggaggccacgtcagcagcttcatatccaaggttacaagtggatgatggagaagatgaatgctacgaagattgtccatatgacacagatgattccaatgccgaagacaatcctctttttgattatcctgatgaatcttccgaggacgaggatgatggtaggaacgacgaggatccttttggagacaaagaaggttctgactcagattacgagaaggaagaagtagaggtggaagaggatgagtaacggtgaagggaagttgtgatgaaacgtgcggttgtagaatgtagatgcagggcagcaggggagctgactgatgaatgtttgtgttgctttatgctgtctaagaaacgggacttgtctcgacgctttgtgccagttagcatagcacatcgtgtgcagtatccggaggaagaattgggaaaaaacaatatttggaagcgtcagctagacacaggcgaatcgtaataattggtattttgccacttgaaaagttgcatccttctgtaattaccgtttgtgtagccttgtgtgttcttgctctcgtattatataggagtaatacatgtggaaataaactattttcgtat

SEQ ID NO: 99175 - DNA, 444 bp, Zea Mays
gttctgtttcgggcgacccattggcttaggttttggggatatttgcagagggttgaagaccaggagataatcaaggagacgtgtcgacggatcgaagtcgcatctatgcaatttttttcttattttggttggagttttacgaacaggattacatattgaggttatagtatgtctgttgggtgtcgtgtttattttaatgtttgtggtgtaagattgcactctatgttgggagtgttgatcttttgatgttactttgtttgtaaggttgtaccctcctttcatagaggacaaagccgggacctggtttccattatctaaaaaaataaaattttagttgctcatctagaaagattaattactgtatatattttgactagattatttttagatgtcttagtcctagaagtatattttaaattctccaattcacctctacggttttag

SEQ ID NO: 99176 - DNA, 1809 bp, Zea Mays
caatatactgatcgataaatgctacgtgcagctggcctctttgctccagccgccacggccgcgccgtcagctatggcggcggccaacaatgctgctagcggtggcggcgacgaagcgaggtacccgctgaacgcagagtcctaccgcctgctgtgcaagatcgggagcggcgtgagcgcggtggtgtacaaggccgtgtgcctgcctctgggctcgtcggcggtggtggccatcaaggcgatcgacctggagcggtcgcgcgccgatctggacggcgtgcagcgggaggccaaggccatggcgctgctgtcccacggcaacgtgctccgagcgcactgctccttcaccgtggggagccacctgtgggtggtgatgcccttcatgggcgccggctcgctgcactccatcctgcgccacgggttccccggcggcctgccggagccgtgcgtggccgtcgtgctcggggagacgctccgcgcgctgtgctacctccacggacaggggcgcatccaccgcgacatcaaggccggaaacatcctggtggactcggacggcgccgtcaagctggccgacttcggcgtctcggcgtccatctacgagaccatccggcaacacgcgtctgcgtcggcctcgacggcggcggcagtggggaccggctcgtcggcgtcgtgctgcttcaacgacgtggcggggacgccgtactggatggcgcccgaggtgatccactcccacgtcggctacggcatcaaggccgacatctggtcgttcggcatcacggcgctggagctcgcgcacggccgcccgccgctctcgcacctgccgccgtccaagtcgatgctgatgagaatcaccagccgcgtccgcttcgaggagagcgtcggcacgggcaaccgcagggacaagaacaacaagttctccagggcgttcaaggacatggtgtccgcctgcctctgccaggagccggcaaagcggccgtcggcggagaagctcctccgccaccccttcttcaaggcttgctcccgtcgctccagggactttctcgtccgcaacgtcctcgccgccgtcccaagcatcgaggagcggtgtcgcaaggacgacgaagcgggtaatgatctctgcgggtgtgtcggcggcggcgcacgctgcgtgtcgccgtgcccccgtcacgccgacaacgtcgtcgtcgccaagaaccgacggatcagcggctggaacttcaatgaggacaacctagagtttgatccgacgaccgaggagcggccggtggaggcggagaagaggtgccttccattcgattttgatgaaggggatgaccaggtggagctacacgacagcaactccgctggagacggagatggagatagaggacggccgccggcgcagccgcagcatggagatggcgacgatcacgttcacgggaaggcggcggaggcggtagggcttaagcagcagcagcaagtggtgactcagcagctgatgaccgtcctgcagagcctggagatgcaaagggacatggtgacgcacgtgttgcaacgcaccgccggccgcttggatgacggcggcggcaatggtgatgtgagcgtgaccgctccaagggaggagagggaagagatgctgctggggtacgtccggcagctggagcatagggtggaagacctgaggaaggaggtcgaggaggagatggcttggaacgcccggttggagaagatgctgcaagagagagttatcattagcgacgatgacaagaagatgaactcatctaagacgtcgtcatcagctgagctgagagcagttgatgaaaacatatga

SEQ ID NO: 99177 - DNA, 1513 bp, Zea Mays
catatctcctcgaatcgtttcatgtgcttactgcttatatatatatatgtgtgtgtgtctgtcgactcaagcacacacacacacatcctccaccaccattcatcagaaagcgaagcaccagcctctgatgccaagccaaagcacacacacctcctccagcctttcttcctctacaaccccaattcttccctgcagctctgctgctgccttgtttcgatcggtcatggcggcggtggccacagagactccgttccatgtcctggcggtggacgacagcctcccggacaggaagctcatcgagaggctcctcaagacctcttccttccaagtgaccactgtcgactccgggagcaaggcgctgcagttcctgggcctccatgaccaggacagcacggttcctcctgtccacacgcaccagctggatgtggctgccaatcaggatgtggctgtgaacctgatcatcacagactactgcatgcctggcatgacaggatatgacctgctcaagaagatcaaggagtcgtcgtctctcagagatatcccggtggtgatcatgtcctctgagaacattccttcaaggatcaataggtgcctggaggaaggagctgacgagttcttcctaaaacctgtgcggctatcagacatgaacaagctcaagccccacatactgaaaagcagatgcaaccaggaacagcaccagcaaagtgacagtcacagtggcgaacgcaggaaccccacaatcagcagcagcgatagcataaacaaccgcaagagaaagggtgcaggcaccgaagaaatcttgccccagctggcaaacagatcaaggcacagttaactgagaactgactagtacagctaaaaccttttctttttcactttactttggcttactgatttgtaacgtagatgttagccctggatttgcaaaacggaacggaatctgtaaactgatactgcttgagtcgaatcgatcgaagtgattctgcaccagatctccctatttcatttatcagaatcgaaagccagctgacagagtcacagtaacagcccgttggacatagcagcaggtgccgaagccaagaacatctgaaactgaccgtcggataacctacgatgggagtagccttttactgcttctaagctttagcctggatacaagttgtcactacagtagtcagtagggcagtaacttggtgcatctccaagagttttcaaaacacactgtcaatctagaaatttttggtgatgtagcttctcccacaagtggcctcttgcaaattcttcagtgatgtggtttctaccacttgtgctcttggattctcagttccttgactctacagtatttttgtctctacgtgctacttaatggtgttccaggtagttggattaactactgcaagggccttccgcaggataaccccctttctccctacatattcatcatcgtcttcggccccgttttaccctctagatcatataatccagcttaaataaattaaaagacaaacaaaca

SEQ ID NO: 99178 - DNA, 1458 bp, Zea Mays
catatctcctcgaatcgtttcatgtgcttactgcttatatatatatatgtgtgtgtgtctgtcgactcaagcacacacacacacatcctccaccaccattcatcagaaagcgaagcaccagcctctgatgccaagccaaagcacacacacctcctccagcctttcttcctctacaaccccaattcttccctgcagctctgctgctgccttgtttcgatcggtcatggcggcggtggccacagagactccgttccatgtcctggcggtggacgacagcctcccggacaggaagctcatcgagaggctcctcaagacctcttccttccaagtgaccactgtcgactccgggagcaaggcgctgcagttcctgggcctccatgaccaggacagcacggttcctcctgtccacacgcaccagctggtaagaagaagatggcttcctcttcctagctcctacgagttggttggtcaaccgtgttgtgcactgcttgtattgtcttctcctagcgtcactagctagtcctcaagaagaggtttctggtgtaatcaggatgtggctgccaatcaggatgtggctgtgaacctgatcatcacagactactgcatgcctggcatgacaggatatgacctgctcaagaagatcaaggtgactactgaactactccggcatgatcactgaacattctgtatagtgcttgctttctggcatgatcactgaagataacaaggcctaaagatgcatgtttggtttggtttgctctaccaggagtcgtcgtctctcagagatatcccggtggtgatcatgtcctctgagaacattccttcaaggatcaataggtgagcagtcagctagcactctactatttgtcttgtggatctaaacaacagtttttaagggaaacaaatcttaagttaaaaattggggaaaaattacactagtgaggtgaggacttgagtagagttcaggcaagaaaacaactttatcatttataaggatttttttagcagccggcctgttcttgctcagaaaatcacatcatgttcacaaaaccattagacagccactataaagttccttttttctctctctcttccatgcatgcggacataaataaatgaataagttttgtaccaaaagattggatatggaaatctctccgaatccttaatgatctgctgtcacatgtgttgtataatagtagatgacagcaacccttgtattatatctcggcctggtcggtgtaaaataaatcaaaaacaaataaaagaagatatgaaatgatacgcagttcgatcttgcggatcttttcatatcgccgtacgtatccatggaacaggtctgttgatgcagacaggtcactagcaccactgacaaattgttgcgttgcgcgatacaccagtggcagggcgctaaagtcaaagaaagaatcaaacgatattattgctgttctttcgaac

SEQ ID NO: 99179 - DNA, 2477 bp, Zea Mays
gtctgctctgctcagctcaggcgacacggcgcgctccgtgccgcccacgaaacctcatcggcgtcatcctcatcaatccctgcctctgccgtccgagataaccatgctccacggtctctgactcacccctgcatcttgccgtgtagccttcttgtacagcttggactggactagactggaggtggagtggagcttttccttctccaaaatccaaatcaccacatccccccattaatttaaggggtttttatgtccaccgccgccgccagcgccaactaaacccgcgacgacggtcgaccatggcgtcctcgctgctctcctcccccgctaaacccaccatcaccaccaccaccaaaacgaccccggccccaagacccgcccgctccgcccatgtccatgtcctctccgccgcccgctgcctccgcctccgcctccgcgcgtcgtcgcagcatcctccgcctccgcccaccccgcggtcgcggcggccggattacgtcccgaaccgcatcgacgaccccaactacgtgcgcatcttcgacaccacgctgcgcgacggggagcagtcgccgggcgccaccatgacgagcgcccagaagctcgtcgtcgcgcgccagctggcccgcctcggcgtcgacatcatcgaggccgggttcccggcctcctcccccgacgacctcgacgccgtgcgctccatcgccatcgaggtcggcaacccggcgccaggacccgccggggaggaggacgccgtccacgtgccggtcatctgcggcctctcgcggtgcaaccggaaggacatcgacgccgcgtgggaggccgtgcgccacgcgcgccgcccccggatccacaccttcatcgccaccagcgacattcacatgcagcataagctcaggaagacgcccgaccaggtggtcgccattgccagggagatggtggcctacgcccgcagcctcggatgcactgacgtcgagttcagccccgaggacgccggcaggtcaaatagagagttcttgtatcatattctaggggaagtcataaaagctggagctacgactctcaatatcccggacactgtcggatacaatcttccttatgaatttggaaagttgattgctgatataaaggcaaacactcctggaattgaaaaggctatcatttccactcattgtcagaatgaccttggtcttgcgactgccaacacactagcgggcgctcgtgcaggagcacggcagttagaggttactattaatggtattggtgaaagggctggaaatgcttctttggaggaggttgtcatggcaattaaatgccgcagagaactgttagatggtctctatactggaatcgattcccgacatatcactttgacgagcaaaatggtgcaagagcatagtggacttcacgtgcagccacataaagctattgttggtgccaatgcgttcgctcatgaaagtggaattcatcaggatgggatgcttaaatataaaggaacatacgaaattatatcgcctgatgatattggtctaacacgtgcaaatgaatttggtattgttcttgggaaactcagcggaaggcatgctgtgagatctaagctagtagagcttggatatgaaatcggtgacaaggaatttgaggacttctttaaacgctacaaagaggttgcagagaagaaaaagcgcgtaactgatgaagacttagaagcgttattgtcagatgagatattccagcctaaggttatttggtcccttgctgatgtacaggcaacatgtggtacacttgctttatctacggcaacagtgaaattggtagcaccagatggagaggagaaaatagcatgttcagtcggaacaggtccagtcgatgcagcttacaaggctgttgacaaaataatccagattccaacggttctccgagaatacagtatgacatcagtcacagaaggcattgacgcaatcgcgacaactcgggttgttgtcactggagatgtgagcaacaacgccaaacatgccctgactggccagtccttcaaccgctccttcagcgggagcggggcatccatggacattgtggtgtccagtgtcagagcttacctgagcgccctgaacaagatctgcagtttcgctggcgccgtgaaagccagcagcgatgtagctgagaccgcaagcgtcccgagcacagaatgagcttccgtttagttcacagtgacatgttcaaaatttctggaaggatcttccattgagcttaggacaggcaggaagtcttggggcctatgtagtgtacaatttatgtgtgtcatatcccgtgctcgttgccagtttgtattgtaccatatataaaccatagaatatgttgccatttagaagtctggccaaggtcagctgtaatgattcacatgcttatagcctggaaacattagacattgaaaacccgagcggtgaataaaggatgcccaaggtagaaactgtgatgaatcatccata

SEQ ID NO: 99180 - DNA, 1426 bp, Zea Mays
aatttgcattcgttccttgctagggtttcttggattctgaattagcagagcagccagccaccaagccgctgcattttatgctgcttgctcgctcgtactctaattaacacctgcctgccttttgtcctctatcccgcgctgcgcagaagcagctggagagcatggtgaaggaggcgtcggtggacgacgtgatgaaggtgctgatggcgtcgcgcaagttcgagatgcaggagctgtgggccacctgctcccacctggtggcgcgctcgggcctctccgccgacctgctcgccaagcacctccccatcgacgtggtggccaagatcgaggagatccgcgccaagtcccccgtccccgccggcgcgccgcgctcgccgttcctcacccaccactacctccccatcaacgcggcgtcgtcggccgccgaccgcgaccacaagatccggcgcatgcggcgcgcgctcgacgccgccgacatcgagctcgtcaagctcatggtcatgggcgaggggctggacctcgacgacgcgctcgccgtgcactacgctgtccagcactgcggccgcgacgtcgtcaaggcgctgctggagctcggcgccgccgacgtcaactcccgcgccggccccacggggaagaccgcgctgcacctggccgccgagatggtctcccccgatatggtgtccgtgctgcttgaccaccacgccgaccccagcgccaggacgctcgacggcgtcaccccgctcgacgtgctccgaggcctcacatcagagttcctgttcaagggcgccgtgccggggctcacgcacatcgagcccaacaagctcaggctctgccttgagctcgtgcagtccgcggtgatggtgaccacgcgcgacgtcgacgccgccggcgacgacgccgggggaagcgacggcggcggcggcggcaacttccccaggagcgacgccgacgacagcttggtgagcctgacgatgaactccacgctcatgtaccagggccaggagatggcggctgccgcggtggccgccggtgaggcgaggaaagggaacggcggcggcggcggcggcggccgagggagcccgtccaacttgtacttccccaatggcggcttcccataagtattatattgtgcccttcccttctataatccatcgtcaagatgatctttcttcttcttcttctgttggattggatctttgtgagaccatggtgtagctagctactagtactatttattttgagtaggagacatgcatgcgcgagagcaagaatttcatggtatttgatgtggattgttcgatcgacgactgtgggagacaaagcaactgttgctttgttcaaatgcttcactgtgatgaatctttgtaatggggcttcaacaatagtagtccaacattaccaatttagagctagcttgcatgaacaa

SEQ ID NO: 99181 - DNA, 2122 bp, Zea Mays
tggcgctggccgctggcgatggcgacgccggccccacccacgaactgtgtgaaccaggcgtcgtcgtcgtgcaggacagaaagccacgcacagcgagcgagcgatctctccctcctccatccatcgctccgatctctttctcacacaaccacagtggagttaccacggcaccaccggcggcccgtagaggtagctagcctttgccctccttttccatcgtcttcatcccctccctctccctctctcccttttcctccctccaacagctgctttgcttgctttccggcccctagctccaaaacccgccttcttatctccgtcctctggccgtccgtccggccggccgggccgcccgctagctccaaaaaggcatgcaggagccaggtctttagtctttactacctctctggcatcgcatcgcatcgcatcgacggggcgacgacgtacggcacggcacatgagatcatgagctcggaggactcgctcaagtccctctcgctggactacctcaacctgctcatcaacgggcaggccttcagcgacgtggcgttcagcgtggagggccgcctggtgcacgcgcaccgctgcgtgctcgcggcgcgcagcctcttcttccgcaagctcttctgcggcctcgaccccaaccacccgccgccgccgcccggcgcccgcgcggccgcggccgcggcgccggagctcgtcatccccgtcagctccatccgctacgaggtgctcgtccttgtgctccagttcctctacagcgggcaggcctccgtggccgcgcccaagagcgggcccctccccgggtgcggcgcccgcgggtgctggcacacccgatgcggcgccgccgtcgacctcgccctcgacacccttgccgccgcccgctccttcggcgtcgagcagctcgcgctcctggtccagaagcagctggagagcatggtgaaggaggcgtcggtggacgacgtgatgaaggtgctgatggcgtcgcgcaagttcgagatgcaggagctgtgggccacctgctcccacctggtggcgcgctcgggcctctccgccgacctgctcgccaagcacctccccatcgacgtggtggccaagatcgaggagatccgcgccaagtcccccgtccccgccggcgcgccgcgctcgccgttcctcacccaccactacctccccatcaacgcggcgtcgtcggccgccgaccgcgaccacaagatccggcgcatgcggcgcgcgctcgacgccgccgacatcgagctcgtcaagctcatggtcatgggcgaggggctggacctcgacgacgcgctcgccgtgcactacgctgtccagcactgcggccgcgacgtcgtcaaggcgctgctggagctcggcgccgccgacgtcaactcccgcgccggccccacggggaagaccgcgctgcacctggccgccgagatggtctcccccgatatggtgtccgtgctgcttgaccaccacgccgaccccagcgccaggacgctcgacggcgtcaccccgctcgacgtgctccgaggcctcacatcagagttcctgttcaagggcgccgtgccggggctcacgcacatcgagcccaacaagctcaggctctgccttgagctcgtgcagtccgcggtgatggtgaccacgcgcgacgtcgacgccgccggcgacgacgccgggggaagcgacggcggcggcggcggcaacttccccaggagcgacgccgacgacagcttggtgagcctgacgatgaactccacgctcatgtaccagggccaggagatggcggctgccgcggtggccgccggtgaggcgaggaaagggaacggcggcggcggcggcggcggccgagggagcccgtccaacttgtacttccccaatggcggcttcccataagtattatattgtgcccttcccttctataatccatcgtcaagatgatctttcttcttcttcttctgttggattggatctttgtgagaccatggtgtagctagctactagtactatttattttgagtaggagacatgcatgcgcgagagcaagaatttcatggtatttgatgtggattgttcgatcgacgactgtgggagacaaagcaactgttgctttgttcaaatgctt

SEQ ID NO: 99182 - DNA, 2258 bp, Zea Mays
caaagggagcaaacatggcatgagacagacgatcgtcgtcgagtgatatatatgccgatgatgtacatacatactacatgcgatgcgatgcgatctcagctagtattatttggctacgccgccggcctccaggcggagacggagtagagcggcttgcggtgccagcagaagaagaaggccttcccgctggcgtcgtgcgccacctggtacgcggagtcgtccccgccgccgccccacccgcagctctgcagcagcttccgcgcctccatcatgccgtcgtagctaagcccgacgcgctccatcccggcggcctccatccggcgcgcccaccgcgccagccgctcgtgccgctccttgcgctccgcgccctcccgcgccaccacgccgcggatctcctccccgagcaccagccgctcggcgcgcgcccgctcccccgcgcaccggtgcgcctgcgccgccgacgcgcgctccaggcagtcgaacagcgacgcgtagtagttgagcgcctcctcgaaccgctccatgaacgtgggcgcgttgtggttcgcctccggctccgccaccaccatgatcttgggcgacagcgcccgcaccgcgcgcaggaagctccccagcttcggcgccttttccctctgctgctgctgcccaggcaccggcgacgactgcggcgagatagagagcaccggcgagtagtccgggctcagctgcagccgcgtgttgagctcccgctccagcagctcgccgaagctgctggggctggagcgcgcgatgatctgcaccggggtgaggcagctgctgcccgggacgtgcacgtgcctgctgctcctgccgccgccggcgtcgtcggccgccaggaggcggtgcagctgccccaccacgctgacggccagcgcctcgccggagcgcacgcggaggaggtgccgcagcgcgtccgcgtccaggtcctccagcctggcctccacggcgctgaactggaacgggatgtcgaacgcctcggcctccctggcgagcacgcaggccatgctggccaggaactccttggcgtcgtgcacggccgtgacgcggaggtgcgggggccccccgcggcggctgcggaaggcgtggaacagcgcgatccactgcaccgggttggcggcggggccggagaggtcgacgacgtgcacgaacctctccccctccatggcctccaggacggcgtggttggtggtgaggtaggccagcttcatgaagggcagcacgtcgaagaggtggcgccgcgcggcgggcaccaggtgcgcctccgcggggctgcccggccccgtgggcagcagcgcccgcgacaggcctggcaccaggttgagcagcttccgcgccagcgcgtcggcgaagacggcggcgaggcgctgcagcgtgtgcggcgcgtccagcgacgccagctgcgtgatctgctcaaggtagaagttggcgcggtcgaaggcgcccgccgccacctccgccgcgcactggtacagcaggctgatgaggcgcaggccctgctggtcgtggctcagctcctgcacccacgacgacccgtgcgggtgcggcgacggcgtgcacagcgacgacgccggagacgacgtggccgacgacagcgtgtcctcctggaacatgtccatgtcggttgcttcggacgggcgggggcttgtggtcaattaatggaccgtcgctgctgctgcgctggatatgaaggcaccgcacgccattgctgggcttggacactggaccttggcgtggcgacaaacgtgttggcaagcctgcaggggtctcgagttcatacgttccgaggtgggtgaccttgtcatggagcgcagaagcgacgaggcaggagtggacgcatgtgcggcaagggctaagccgatgtcgtctgcatctcggtggaatcactaggcagcccgggagatattcgcttggaacttatctgcagcgttttggatcagacaattttgcgatcaattcaatcccaggcatggctccaaaatctgcattcatgttaatttcgtcagaggacaagaagcaaacacttgagccttgtcagctttaccacagcaaaaacaaatgcttggtgattgcaaggtggccgcttcttggagaagtcgttcagatttgacgcgcatgcttgtttaatactccctccgtttctttttatttgtcgttggatagtgtaattttgtactatccagcgacaaataaaaagaaacggagggagtaataataacttgttcttgtttgcaaggagaaca

SEQ ID NO: 99183 - DNA, 1464 bp, Zea Mays
gtgcacctgaggcggcgcacgttgccgactcggctgtctcgtcttccttgtgcttcgcgcactcgccgcgcctgcgccctgcgggcagtctcttcttgccctttctcctgtgcgcagccgcggcggacccaatctcgcattctcgcgttccgagatactgttgttctttcagggagatagatagattcctactgctcgccattggggttgccttggccgcgtgccgtccgtcgcttcgtcgagctgcgtgcggggcgctcctcgtcctcctcacgatggggggctggaaccggtcgctgtacgtgacgggccaccgtgaccgctccgccggcgcttcgcgtactcctctgcctccgccttcgcctgattacggagacaagcaccagcaagtcccattatgggagagggaattctgccgccacgttggcgacatcacttgggagcagttctgtgaaaacaagcagtatgttggacaattccataaactcgagccttgggatgattcagcggcatttgattgtttccagaacgcaaaggcaaggttctgggcgagctaccatggccagccttctgacattcctttgctggacgacccggatctgtacatcgacaaggtcgaccaccaatgcgaagtcgacccggagttggtagctgatctggatagcgtagggctaccgttcgagtcggatgataatcctgcctcagccaaagggtggaccaatgctggggccgacaacaagtgcacccagaacgggtctggaaactgggacgccttcgtagaaaagccagctgaagtcagtaagtgggactccgaggccaatctcgcatccaacacgacttggggcggccaggccaatgtagcaacacctgaggcggtttggagaggccaatctttcagtaaatggggcaatgatagcaacaccagccggggtgttcctctggagaagccaagctggcgtggctgtaacaagaaccgctacacacccaacagctggagcagcaactttcatagcagaccatccgacaataggtaccagcagctggaggatccgagctacacttctgggactggaaggaaatggaacggcggcgacggtggcgggtacgtcaagcagaggagctttaagcacaggaaccaggaccaggggcagcaccagcagccgaggagtggcagctggcagcaggaccaaagaggaaggagcaggcagtggcgtccggtgcacagcagggctccctaaaatggtccggcgtcttgatctcgtggcgagaatcgcaggtgtcttctcttgtgcagtcagttttcagctgctgctggcaaagtggtgcctgtaaatagatgttttttttttgtttgagttgtatgctgcagctgctccttcgcagctgcgtccttactttgcttatggtgcaatgttaatatgttataatgttagttaatatggggagcatcacagtttttggttc

SEQ ID NO: 99184 - DNA, 299 bp, Zea Mays
ggatttacaatgtgtttggcaaatagattccttcgcagtcatgtaatatgatctattaaattttcaggtatttaagacttgctgcaagtggcactgacctgtttcccactgagcataactggaagaatttaaatagacgagtgagagatcagtggatagtgatgcacaaagatcattattgtttcccatcgaaccagcgattgggcctgcagcaacgggacgagagcggacatgagcgagtgggccggcacccggcagttgggcttcaattcaatgagccagatagtcgggggaggtag

SEQ ID NO: 99185 - DNA, 892 bp, Zea Mays
gccgacaatatccacatcacgcttcgcgattgccttctccatctttgctccctggggcgggtcggggcccacccgcccgcctcggctgctcagctctgctctgctctgctcctcgcctcccttcccttcccttcgcctcccccagccagccaggaatcgccaccggcggaagccaagcatcgtcccagcaccggatcgattccgcccgcccgcccgcccgtccatggatccggcggccgagccggcggcgtggccgccgtggacgtcgctcctgctgcgggcgctgagccggcggcggacctgggtggcgctcttcctcgccgtctacgccgggctgctctcgtcctcctggtccctgctcgcctccgtccgcgcctggtactactccgcctcctcggcgtccgcggcgcccgcctggcccgccgcgctctacgcgtccgtcatgtacggcgccgtgttcggcctgctctccatggccgccgcgctcgccgtcgccgcgcccgccatgctcgtcacctggaccaccgtcctcgtgctgctcgccttcgcgggccgcccgcgcaggtcgctcgtcgccgagggccgccgcgccaccagggacatcgcgggcctcgcgctccgcgtactcctgcgcgagggcaacgccgtcgccgcgctctgcgccgccgcaagctttgccgcgctcctcctcggccaccgcgatcaccagtagtagctctaagtctgttgccgtcctcttcttctcgcgctagatctgctacaaccttactggtgtagttgtaaattatcacaccaagttgtttcagttactccacaaattggacactgatggcatctgtaatgaatgtagcttgtcacatcacgctcaggttcaaaagattatttggatgag

SEQ ID NO: 99186 - DNA, 1348 bp, Zea Mays
catcgccgtcatgtcgccttgtgcccatgcagagcagcaagagcctgacgctccgcctctccacaacgaccaccatcgccaccaaacttacgtggagctgtaccaccacggccttcaccacgtgaagtcgtcggcgctgctgtgcgcggttggactaggcatccccggcgccatccaccgccgcggcggcgcagcaacggtctccgacctcgtcagcggcacgggtgtccacccggccaagcgcgcgcagctccgtcggctcatgcgcatgcttgcctgcttcggcatctttggtgccgccggcggcgacgagggtgagagcgagaccgtctacacgctgacccccgtgtccagcgtcctcgtcggtgacaaggacaaggaggcatcagcgacctcgtcagcgtcctcgcctgacatgtcggcactgctccggctcctggcgcgcccgagcacgtcggtctccaccttcttcgacatggaggagtggttcagagacggcgggaccacgacgctcttcgagacggcactcggcgtggcctcatggagcttgacgaagagcgacgccgcgtacaacagagccatgaacgaagcctgcgtcgcggacaccagcctgtccatggacatcatgctgaaagataccggcggctgctgcggaggaggaggcgccagcagtgtcttcggcggcggccggctcacctcgctggtcgatgttggagggggccatggcgccgccgctattgccatcgctaacgcctttccgcacatcaaatgcactgtgctggacctcaaacaagtgatcgacaaggtgccgccagctgcggccaccggtactgatcgtatcatcaatagcacggcggcgacggcggtgcagttcgtcgccggtgacatgtttgagtctattccacctgcagacgctgttcttttgaggcatgttttggactgctgggatgacgaacactgtgtgaagatactgggacagtgcaagcgagcaattcccggcagagaagctggaggcaaagtgatcattataaacgtggtggtcggctatggatcaccggacaagcttgtgaaggagacgcaggtgctgtttgatatgtacatgatgcggtacgatgggtccgagcgggaggagcacgaatggagagaaatattttcgagagctgggttcagtgactacaagatcacgcccacgttaggtttccattctatcatcgaggttttcccatgatgaaggttgtcaccatgcattattctatcgttatataaggttttcccatgcatgaagaccatgcatgcatgtgtattattacaaaccaaaaaaaaccccaagtggttactgttgttcttc

SEQ ID NO: 99187 - DNA, 4385 bp, Zea Mays
tcatcgccgtcatgtcgccttgtgcccatgcagagcagcaagagcctgacgctccgcctctccacaacgaccaccatcgccaccaaacttacgtggagctgtaccaccacggccttcaccacgtgaagtcgtcggcgctgctgtgcgcggttggactaggcatccccggcgccatccaccgccgcggcggcgcagcaacggtctccgacctcgtcagcggcacgggtgtccacccggccaagcgcgcgcagctccgtcggctcatgcgcatgcttgcctgcttcggcatctttggtgccgccggcggcgacgagggtgagagcgagaccgtctacacgctgacccccgtgtccagcgtcctcgtcggtgacaaggacaaggaggcatcagcgacctcgtcagcgtcctcgcctgacatgtcggcactgctccggctcctggcgcgcccgagcacgtccgtgtccaccttcttcgacatggaggagtggttcagagacggcgggaccacgacgctcttcgagacggcactcggcgtgcccccatggagcttgacgaagagcgacgccgcgtacaacagagccatgaacgaagcctgcgtcgcggacaccagcctgtccatggacatcatgctgaaagacaccagcggaggcgccagcagtgtcttcggcggcggccggctcacctcgctggtcgatgttggagggggccatggcgccgccgctattgccatcgctaacgcctttccgcacatcaaatgcactgtgctagacctcaaacaagtgatcgacaacaaggtgccaccagcggccgccgccggtactgatcgtatcatcaatagcacggtgcagttcgtcgccggtgacatgtttgagtctattccacctgcagacgctgttctcctaaggcatgttttggactgctgggatgacgaacactgtgtgaagatactgggacagtgcaagcgagcaattcccggcagagaagctggaggcaaggtgatcatcataaacgtggtggtcggctatggatcaccggacaagcttgtgaaggagacgcaggtgctgtttgatatgtacatgatgcggtacgatgggtccgagcgggaggagcacgaatggagagaaatattttcgagagctgggttcagtgactacaagatcacgcccacgataggtttccattctatcattgaggaaaagatccgggtcgccctctacgtgcagcaggccgcgctccacttcatcgatggtggcaagcacaaagactaccggctaaccgacgacattatgaaggccgggttctgcatcagcccggacgagctggcgtcgatcacgagcaagcacgacgcgaaggctctgagcatgcacggcggggtggacgggatatgcgcgaaagtacgctcgtcgccagaccgcggcgtgtccgccgccagcgacgacgatctggacgcgaggcgagccgtctacggcgccaaccggtacgcggagaagcctgggcgaagcttctggatgttcgtctgggacgccctgcaggacgtgacgctcgtcatcctgatggcctgcgctctgctgtccgccgccgtcggcctggcgtccgagggctggcccaggggcgtgtacgacggcctggggataatgctcagcatcctgctggttgtcgtggtcaccgctgtcagtgactaccggcagtcgctccagttcaaggagctggacaacgagaagaagaaggtgtctgtgcatgtgaccagggacgggtgccggcagcaggtgtcaatatacgacctggtggtcggtgacgtcgtgcacctgtcgatcggagaccaggtgcccgctgacgggctctacgtccacggatactccctcctgatcgacgagtccagcctgtcgggcgagagcgagccggtgtacatctctcgagccaagccgttcatcctggcaggaaccaaggtccaggacgggtcaggcaagatgctcgtgaccgctgtcggcatgcacaccgagtggggcaggctgatgagcacgctgagcgagggaggcgaggacgagacgccgctgcaggtcaagctcaacggcgtcgcgaccgtcatcgggaagatcgggctgctgttcgccacgctcacgttcgtcgtcctcatggtgaggttcctcgtcgacaaaaccttcacggtgggtctctccagcaggtggacttctgcggacgcgttggctatagtggactacttcgcgacggcggtcacgatcatcgtcgtcgccgtccctgagggcctgcctctggctgttactctgagcctggcgttcgcgatgaagaagctgatgaacgataaggcgcttgtcaggcatctctcggcgtgcgagacgatggggtctgccggcactatatgcaccgacaagacggggactctgaccaccaaccatatggtggtcgacaggatatgggtgtccgaggtttcagaatcagtttccagcagtggcagcggtctggaagatctgagctccgccgccgtctctcggccggccacactgggcctgctcctgcagggcgtgtttgagaacaccagcgcggaggtggtcagagagaaggacggcgggcaggctgttctgggaaccccgacagagagggcgatcttggagtttggactgaagctagaagcacgacgtcgtgatgctggagacaggagctgcaccaaggtcaaggtcgagcctttcaactcggtcaagaagatgatggcggtgctggtatcgttacccgacggcaggtaccgctggtacgtcaaaggcgcgtcagagatcatcgtgcagatgtgcgacgccatggttgacggcgacgggaacggcgttccgttgtcggaagctcggaggaaggacgtcttaggcaccatcaactcgttcgcttcagacgcgttaaggacactgtgcctggcgtacaaggaaggggatggtttcggtgaggatgcagatagtccggcaggaggctttactctgatatgtatctttggcatcaaggatcctgtgcgcccaggagtcaaggacgctgtcaaggcctgtatgtctgccggtatcgtggtacggatggtgactggtgataacatcaacacggctaaagctatagccaaagagtgtgggatactgactgacggcggcgtagcgatagaagggccagagttcagaaacaaaagcccagaggagatgagggacctgatacctaagatccaggttatggctcgttctctgccgcttgacaagcatacccttgtgaaaaacctgcgaggtatgttcagggaggtggttgctgtgacaggcgatggtaccaatgacgctccagcattgcatgaagcagatattgggcttgcaatgggcatagcaggaacagaggtagccaaggagagtgccgatgtgatagtgctggacgacaacttcacaaccataataaacgtcgcgaggtggggccgcgcggtctacataaacatccagaagttcgtgcagtttcagctgaccgtcaacattgtggctctggtcatcaactttgtctcggcatgcattacagggagcgctcctctcacggcggtgcagctgctgtgggtcaacatgatcatggacacgctgggagctctggctctagccacggagcctcccaacgacgacatgatgaagaggccgcctgtcgggcgcggagagagcttcatcaccaaggtcatgtggcggaacatcgtcgggcagagcttgtaccagctggccgtgcttggagctctcatgtttggcggggaacgtctcctcaacatccatggcgcggactccaaacccgttgtcaatacgctcatattcaactccttcgtgttctgccaggtgttcaacgagataaacagcagggagatgcagaagatcaacgtcttccgcggcatgttcggcaactggatcttcgtcggaatcatagccgcgacggtagcgttccaggtggtgatcgtcgagttcctcggcacctttgcgagcaccgtcccactcggctggcagctgtggctggtgagcgtcggcctcggatccgtcagcttggtcgtcggcgccgtcctcaagtgcgttccagttgaaccggacgatggagttcgcgccagtccaaatggctacgcgccgctgcccggcggccctgacaacatataacagctgagcctgagcgccggagaaggtactgacgacgtgctgatttttttcgcgtgagggaacctcgtcggaaccaaccaaccaaccactgtctaggttcagttttaacagattatattatgtaaaaagagatggtggtgaccacaaggcacctctattttgatgggtcatacttaggggtctaaattttacattacaaactttaaaagatcagtcggactttattactattca

SEQ ID NO: 99188 - DNA, 745 bp, Zea Mays
cagctcgagccagctgtgcgcgcgtcccccctggccgcacgttcctctgctcggcccaatgttgtatgttccaggtgctcctccaggttcgacaatgatcccaatggttctaccagatggtcgtcttgtatacgtaccacagcctgcaggacagcagcctgtgcccatgacttcgcctccgccgccacagcaaggtgatcgtcattatggtggcagtggtggatcgagctccggtggaaggcgacaacagaggagagatgacagtggtggtagtaacaccaacagccgcaggggtcggcgccgtccctattgatgcttgtcgctgttagcgcttagaagttagaacctagtaggcatattcagagtatctctgctgcagtacaaccatgatgcagacgccaactgatgctggaaaccgtactttctagtggttagttttttcgctgtgcgtctcgtgtctgtaacacaggctgctgttgtgataagagtaataacagttccaagtggcagatgtggtttgggatgcagtggtaaaatgtatctgttccccagcttcatgaataactatgctgttagtgtctgaggtttacattgtgtcagtttggtcactttaggtgtgatgagttttagtagtggtgtggccggtggatatgcagtgaaattgtatcgcttgaacagtgatcagatacctctatggaagggtgaaaacccacaaatgcttcggacaaaaagctgtctttgctct

SEQ ID NO: 99189 - DNA, 2100 bp, Zea Mays
attgccgaccaggctccctcgcttctgttcgtctccctcctcgcgttcctctcttccgctcgccgccgccgccgcatccgtcaccttcacactgcgctccctccatccctccctgtctgcggcgactgggtggtctaccgctgccctcgctttcgcgggcgaagagcgcccaccagtttccttggatctttgagctttggaagatgccgaggtggacagagaattctgcttccaccaaatcagctgaattggtgaaacaacaagaccgtttggagtttgacgatcctgatgaggtagacgaagaggaagaagttgagtatgaggaagttgaggaggaggtcgagtatgaagagacagaggacgagtatggacagactgaagctgtacgccaagttgatgctaaacatgacagtaaaatggtggatgctgatacggatgagggtggaaaagggagtcatgatgaacttcttgctcttcctcctcatggatccgaagtttatgttgggggcatcgcctctgatgtctcttctgatgatctcaaaaaactctgcgagtctgttggggaagtagtcgaagtgcgaatgccaggaaagagtggtaggctgtatgcctttgtcaatttcagaactaaagagctggcttcaaaggccatccagaagttgaacaataaagatctaaagggaaagaagataagagtttcttcctcacaggctaaaaacaggctatttatcgggaacataccctataactggacagagaatgaatttaaaaaagcagcagaggaagttggccctggagttttaaaagttaatctcgtgaaggcaccacattcagatacgaacaagggttatggatttattgaatactacaaccaggcttgcgcagagtatgctaagaagatgatgtctaccccagaattcaaactagataaaaatgcccctaatgtcagttgggcagatactaagaatggtggtgaatctgcctctactgcacaggttaaatcactatatgtaaaaaacctgcccaaggctgttactcaagagcaactgaaaaaactatttgagcaccttggagaagttacaaaggttgttattcctcctgcaaaagctggtcatgaaaatcgatatggttttgttcacttcaaagaacgatccatggctatgaaggctctggaagacactgagagattcgaacttgacggtcagctgctggattgttcacttgcaaagcctcttgctgataagaaggacgatacatcagcacctaaaggaggtccattgctcccaagttataccccagttggatatggactgatgggagcctataacccactcggaaatggcctggcagtggcaggcgcttacaatccgtatggaaatggactggcaggtgcttatggtgtgcttggtgctcatgctgcacagccaatgttgtatgttccaggtgctcctccaggttcgacaatgatcccaatggttctaccagatggtcgtcttgtatacgtaccacagcctgcaggacagcagcctgtgcccatgacttcgcctccgccgccacagcaaggtgatcgtcattatggtggcagtggtggatcgagctccggtggaaggcgacaacagaggagagatgacagtggtggtagtaacaccaacagccgcaggggtcggcgccgtccctattgatgcttgtcgctgttagcgcttagaagttagaacctagtaggcatattcagagtatctctgctgcagtacaaccatgatgcagacgccaactgatgctggaaaccgtactttctagtggttagttttttcgctgtgcgtctcgtgtctgtaacacaggctgctgttgtgataagagtaataacagttccaagtggcagatgtggtttgggatgcagtggtaaaatgtatctgttccccagcttcatgaataactatgctgttagtgtctgaggtttacattgtgtcagtttggtcactttaggtgtgatgagttttagtagtggtgtggccggtggatatgcagtgaaattgtatcgcttgaacagtgatcagatacctctatggaagggtgaaaacccacaaatgcttcggacaaaaa

SEQ ID NO: 99190 - DNA, 2073 bp, Zea Mays
attgccgaccaggctccctcgcttctgttcgtctccctcctcgcgttcctctcttccgctcgccgccgccgccgcatccgtcaccttcacactgcgctccctccatccctccctgtctgcggcgactgggtggtctaccgctgccctcgctttcgcgggcgaagagcgcccaccagatgccgaggtggacagagaattctgcttccaccaaatcagctgaattggtgaaacaacaagaccgtttggagtttgacgatcctgatgaggtagacgaagaggaagaagttgagtatgaggaagttgaggaggaggtcgagtatgaagagacagaggacgagtatggacagactgaagctgtacgccaagttgatgctaaacatgacagtaaaatggtggatgctgatacggatgagggtggaaaagggagtcatgatgaacttcttgctcttcctcctcatggatccgaagtttatgttgggggcatcgcctctgatgtctcttctgatgatctcaaaaaactctgcgagtctgttggggaagtagtcgaagtgcgaatgccaggaaagagtggtaggctgtatgcctttgtcaatttcagaactaaagagctggcttcaaaggccatccagaagttgaacaataaagatctaaagggaaagaagataagagtttcttcctcacaggctaaaaacaggctatttatcgggaacataccctataactggacagagaatgaatttaaaaaagcagcagaggaagttggccctggagttttaaaagttaatctcgtgaaggcaccacattcagatacgaacaagggttatggatttattgaatactacaaccaggcttgcgcagagtatgctaagaagatgatgtctaccccagaattcaaactagataaaaatgcccctaatgtcagttgggcagatactaagaatggtggtgaatctgcctctactgcacaggttaaatcactatatgtaaaaaacctgcccaaggctgttactcaagagcaactgaaaaaactatttgagcaccttggagaagttacaaaggttgttattcctcctgcaaaagctggtcatgaaaatcgatatggttttgttcacttcaaagaacgatccatggctatgaaggctctggaagacactgagagattcgaacttgacggtcagctgctggattgttcacttgcaaagcctcttgctgataagaaggacgatacatcagcacctaaaggaggtccattgctcccaagttataccccagttggatatggactgatgggagcctataacccactcggaaatggcctggcagtggcaggcgcttacaatccgtatggaaatggactggcaggtgcttatggtgtgcttggtgctcatgctgcacagccaatgttgtatgttccaggtgctcctccaggttcgacaatgatcccaatggttctaccagatggtcgtcttgtatacgtaccacagcctgcaggacagcagcctgtgcccatgacttcgcctccgccgccacagcaaggtgatcgtcattatggtggcagtggtggatcgagctccggtggaaggcgacaacagaggagagatgacagtggtggtagtaacaccaacagccgcaggggtcggcgccgtccctattgatgcttgtcgctgttagcgcttagaagttagaacctagtaggcatattcagagtatctctgctgcagtacaaccatgatgcagacgccaactgatgctggaaaccgtactttctagtggttagttttttcgctgtgcgtctcgtgtctgtaacacaggctgctgttgtgataagagtaataacagttccaagtggcagatgtggtttgggatgcagtggtaaaatgtatctgttccccagcttcatgaataactatgctgttagtgtctgaggtttacattgtgtcagtttggtcactttaggtgtgatgagttttagtagtggtgtggccggtggatatgcagtgaaattgtatcgcttgaacagtgatcagatacctctatggaagggtgaaaacccacaaatgcttcggacaaaaa

SEQ ID NO: 99191 - DNA, 2499 bp, Zea Mays
atgctgcatataattggtcaagatgtgttgatgaacttgagagccaactctccaaacatggaagccttaaaaaactctacttttatcatcagcatcttaccacggtcttcagaaatacaatgtttggcccagaaggtcgtccacagcattgttgtgcttggcttggagccgcttgcagttttccagaatgtgcttctgcaattattcctgaagaggttaacaaaattggcagagattctatctcttatgtggagtcccttatcgagtctatcatgggtgggttggaaggtttgataaatattctagattcagaaggtggatttggctcattagagatgcagctttccccagagcaagcagctcttcgcttaaataacacaagagcaaagggtgtttcaagcttgttaactccaggatatgagagctatcctgataacagttcatcaattaagatgctggaagctgctatgcaaaggctgacaagtttgtgttctgttctaaatgacatggagcctattggtgttctcaaccatgtttttgttctacgcgagtacatgagagactgcatcataggaaatttcaggagaagatttcatagtatgattagaactgagaactgcattcagcgaccatcaatcatagaatctcttctaagaagacatctgggcatcatccatctagcagagcagcatattagtatggaccttactgaaggcatacgtgaagtgctgctagctgagagttatactggtccatttcccaatcttcaaatgtttgagactccagtggggacacaaggaggggggtctgccgttgagatgatatgcaactggtatattgagaatgtagtaaaggacgcttctcgcattggagttgcttttgatgcaatccaaaattgcttcaggagctcacagcctattggtggtggatgtttggctgaatcatttacagataaaagagaaatgaaatcacttgttcgtctttttggtggctatggaatagataaaatggataagatgctaagggagcatacgtctgcgcttttaaactgtatcgattcagcattgaggtcaaatcgtgatgccttagagggcctagctggaactgtaaattccggcgataggattgaaagggatgtgaacctgaaacaaattattgacctcgaaacactggctgacctctgtattcaagcagggcaggcaataactttccgtcggctgttggttgaggccgtcggagcagtccttgaagagaaagtgcctctgatatattctctgctcaaaggattagccttgcagttgccagacgaggtacctgataaaaatgagataattagattgagaaaggttgcgagcagtgttggtgttggcgacaaacatgatgctgagtgggtacactctattctggcagacgctggtgcagctaatgataattcttggatcctacttccatacctttgtgctgcattcatggtgtccaacatttggaacggtgctgtttatgatgtcaatataggtggactcagtaacaatttgcactgcctagcaaggtgtgtaagtgctgtgattgggggaagcgaatacactcgggtcgaaagggagcagcgaataaattctctttcaaatgtgcatacagatgagctgcaagaggccgagttaccgagccgtgtctcagcagaagcaaatatcaaatcttgtatgcagatctacgtcaaactgtctgcagggatcgtcctggattcatggaacgacacaagcaggcagcacatcgtcccgaagctgacattcctggaccagctctgcgagctgtccccgtacgtgccaaggagcaccttagaagctcacatcccatacaccatcctgcgctcgatataccaccagctgtacggaggctctctgctggcctcggaaccggcggagcagtccccaaggcagtcgcctctcatctctctggcacacgcgtccccgtccgcaaggcagatgcagaaccgaccagagacaacacccaggtcccacaccttcgacccaggctactacagctcgtcggggtcccagcacgacgatggctacgacgcggataggaggaccggacggctgctgcggagcttgaggcgctctggaccgctcgacttcggtgcgagcagaaaggcgaagaagttcgtcgagggctccagctccgggagcagccatggagctggctcgctgcagaggttcgcagtgtccagatctggccctctatcgtacagatagggccgcatgtaatgtaaactctagagagcagtagatcttcctatgcgtgctggtttacgtagctagcagtagcaacagcagcagctagttgtgctgtaagtaaaacccattaattgcttaatttgtgttgactgtcgttaggcaagtgatttgaattagctgttgctcgtttggtttgtgtatcaacaatacaattgttcgttgatttttcttgatagcaaagtaaagtaaaccaaccttctcttgaaag

SEQ ID NO: 99192 - DNA, 1737 bp, Zea Mays
atgctgcatataattggtcaagatgtgttgatgaacttgagagccaactctccaaacatggaagccttaaaaaactctacttttatcatcagcatcttaccacggtcttcagaaatacaatgtttggcccagaaggtcgtccacagcattgttgtgcttggcttggagccgcttgcagttttccagaatgtgcttctgcaattattcctgaagaggttaacaaaattggcagagattctatctcttatgtggagtcccttatcgagtctatcatgggtgggttggaaggtttgataaatattctagattcagaaggtggatttggctcattagagatgcagctttccccagagcaagcagctcttcgcttaaataacacaagagcaaagggtgtttcaagcttgttaactccaggatatgagagctatcctgataacagttcatcaattaagatgctggaagctgctatgcaaaggctgacaagtttgtgttctgttctaaatgacatggagcctattggtgttctcaaccatgtttttgttctacgcgagtacatgagagactgcatcataggaaatttcaggagaagatttcatagtatgattagaactgagaactgcattcagcgaccatcaatcatagaatctcttctaagaagacatctgggcatcatccatctagcagagcagcatattagtatggaccttactgaaggcatacgtgaagtgctgctagctgagagttatactggtccatttcccaatcttcaaatgtttgagactccagtggggacacaaggaggggggtctgccgttgagatgatatgcaactggtatattgagaatgtagtaaaggacgcttctcgcattggagttgcttttgatgcaatccaaaattgcttcaggagctcacagcctattggtggtggatgtttggctgaatcatttacagataaaagagaaatgaaatcacttgttcgtctttttggtggctatggaatagataaaatggataagatgctaagggagcatacgtctgcgcttttaaactgtatcgattcagcattgaggtcaaatcgtgatgccttagagggcctagctggaactgtaaattccggcgataggattgaaagggatgtgaacctgaaacaaattattgacctcgaaacactggctgacctctgtattcaagcagggcaggcaataactttccgtcggctgttggttgaggccgtcggagcagtccttgaagagaaagtgcctctgatatattctctgctcaaaggattagccttgcagttgccagacgaggtacctgataaaaatgagataattagattgagaaaggttgcgagcagtgttggtgttggcgacaaacatgatgctgagtgggtacactctattctggcagacgctggtgcagctaatgataattcttggatcctacttccatacctttgtgctgcattcatggtgtccaacatttggaacggtgctgtttatgatgtcaatataggtggactcagtaacaatttgcactgcctagcaaggtatggactgactctatgtttgatgtcaaaaatcgttagttgtgggtatgtaagtgctgtgattgtatttgtgcaggtgtgtaagtgctgtgattgggggaagcgaatacactcgggtcgaaagggagcagcgaataaattctctttcaaatgtgcatacagatgagctgcaagaggccgagttaccg

SEQ ID NO: 99193 - DNA, 94 bp, Zea Mays
ctcgaactacgcaggagagatgtgtgtcatttcattaagatagaaaagagcaccaagatgaggctaaaacagcctcacccaaatacaagagcac

SEQ ID NO: 99194 - DNA, 576 bp, Zea Mays
ttcttcaccatgccatgaagtgggctgatctctgtgtgggtagtgcatgcttttcctcaacttatgcgtctgtacttgcagtgcacttgaagaccaggcagctgttctctactcaaggaagagatggcccatgtttcgttcaaaagcaaagatgtggacagcggcatgtcccggtggtctgaatacctaagtgttgaagagccaattccttccgcaatggcaacctggaggaacatgagcgctgatgcgccgcaaggctcttctgctggtagccacaaacatcttcagatggagccggtggttcagctgtccaaggttgcggaaggcttgctggccaaaatgtaccggctgaacagcatcctggactatccagatccaaacacgcacacattctcggatgcattttggaaagctggtgtctttccaaatttccccaaaatttgcatcacgatgtcaaaaaaatttccggaacatcctaacaagctgcagctagaaagggtagataagtttggtcttgatgctttaaacgagaatgctgaaggttacatgcacaatcttgagcagtggatcctgtaa

SEQ ID NO: 99195 - DNA, 577 bp, Zea Mays
atggggtggtacacaagagttctccgtcgtgcagagacgatgcagccgaacgaggtcgccgacaaggccattgtcataatgcagcacgccgcgaagcaggtcctgggtacgtgcaaggagaagctccacctggggaagccactcagcgtgtttgaagtgaaggaactaaaagaagcgcttgaagccattgccgaagcactggaccaggactcgctgctttgccaagttgctttggatgcgggtgctcccagcttagtagaagatcactgggacgacgaaggcggagaagccgtggtggcgggtctcccatggcctgaatccccacgtccggaggacttcatgtcccttgaaaagcacatagaaacctactggagcgtcgagtacgactcggacaatatgctgcctagcttatctgattagattaggtggtagatatgatggattaattcttcttcgcaagcaatttttttttcttgcattccttcctcctcctcccaccttccttccctctatttgtaaagctagcacccccggccaatcaatctcttttgaaggatgaaatgttactagatgcata

SEQ ID NO: 99196 - DNA, 1050 bp, Zea Mays
ggagtaacacccaaaaaatctacttactgttgcctgattcaagttttttgtattcatggtggtttactgaaagccaaggaattggtttggaaaccatgaataaaggtatgtgtcctgacattgttttcttcagttcgataataaacaacctttgcaaactaggaagggtaatggacgcacaaaatatatttgacttaactgtaaatgttggtctgcatcctactgttgcgatgcatagtatgctgatggtgggtactgtcttgttggcaagatggagaaggcatcaagggtatttgatgctatggtgtctgctggcgttgaaccaaacaatgtagtgtatggtgtacttgttaatggctatcgtaaaattggaaggatcgatgatgagtcttttcaaagaaatgttgcataaaggaataaagccttcaactatttcgtacaacatcatacttgatgggttatttcaggcagggagaacagttcctgcgaaggtgaaattccacgaaatgactgaaagtggtatcacaatggacaaatggacatacaacataggtcttagtgaacattttaaaaacagatgctctgttgaagcaatcttgctttttgaagaattacgtgcaatgaatgtaaagatcaatatcaaaactctcaataccatgatagctggaatgtttcaaaccaggagagttgaagaagctaaggatctgtttgcttctatctcgagaagtgggctggtgccttctgttgtgacttacagtataatgatgacaaatcttataaaaggattggtggaggaggcagatgatatgttttcatccatggagaatgctggccgtgagcctgattctcgattgtgtggttagggaattactagagaaaaatgaaatggtcagggctacaacgtacctgtccaaaattgatgagaggaatttctcacttgagcattcaaccacaacattgttgatcgatctcttctcaagcaaaggggcttgtagggaacacataagatttctccctacaaagtatcgttttcttgcagggggctcgtta

SEQ ID NO: 99197 - DNA, 1939 bp, Zea Mays
gcctctcgatccaccattctccgtccgccgtcacccacgcttgctggctccgccgacgcatctcgcaagctgccagcgcccccctcgcccctctccactgtggtccgcagccgcttggagcttgcagcttgcctgttcgtcgtctcggtcccagccggcagccggtcaaccctccaaccccctctctaggcggctaggcagcaagtctcccaggctggcaggctcccagccggcagcggcaggagcccgcacaatctgctcggcccctggcccctaccatgcttggccgcctgggcaccttggtgctaaacctgctgaggcagagagtagaaaggacatgacatcgctctactaactggccaccgttgcagctccagcaagtcgccattgctctagagatccacatgtggttctcggtgcattttcgtatcttttagaattgaactgtgaaaaacacaatggcatcgatcttatctggagcaaggagccttcactcactcgctctgctatcgcggatgttgggcgagacgactcagctcggtccttttaaccgcagcgtgcagcggaggtggagaaagcctgtagattcggcaagaacacgtcttgagggaagaacgagggatcataggctggacaaactaatggttcagctgaggaacttgaggctggccttggctttgcatgaggtgatatctcagcagaggaacggatacgcgtctctccagctcctctcaaggtggaggcatgaggtcgggctgaacattgaggtcggtgctttcctcaagaaatacccccacgtgtttcagacctacgtgcaccctgtcaagaggaaccactgctgcaaggtcacgcagaagatgtccgacttgatcgcagaggaagacgctgtggtcagggagaatgaggtcggcgtagttcagcggctgaagaaacttctcatgctctctgtggatggaactctgaacatgcacgcgttatggctcataagaagggagcttgggcttcctgatgattacaggtcctctatactgccgaaccatcgacatgatttaattctcaaatccccagatactctatcacttttctctagggatgaaacattggctgtagctaaggtcgacgagtggaggaaaagggagtacacagaaaaatggctagctgaatcagagacaaaatatgctttcccgatcaacttcccaactggatttaaggttcaaaaaggtttcagggagaaactcaagaactggcagaggcttccctacaccaaaccttatgagaagaatgattcgcatccgatatgcaacgtggagcggcttgagaaacgcattgttggtgttcttcatgagcttttgagcctgacggtcgaaaggatgatgccacttgagagactgtcacacttcagaagattgtacaccatggaggtaaacctgcgagaattttttctcaagtatccaggcattttctacatctcgacgaaaggaagcacacagacagtcatcctaagggatagttacagtaaaggatatctgattgagcctaaccctgtgtacattgtgcggaggaagatgctggacctggtattatctggatctcgtaacgttggtgaatgccaacaggatagtgcaacttggtcagctgaggagcatgatctgggaagcagccatgggtgccaggataacatatgctaggtggattctgcaattccatactggaacatggagttagaagtgacgcatggaaagaaccaattaactcaaccatgatcttgctgtaatatctacatataaaaatacctactgatatcgtctgcccggggtgaagcgatgcctagctgcggcattgccctgcctagcctcgcctcgtctccggcacgcgaacacccagctcggactctgtaaagaggaagtttaccacaatctctggtggactttctttgctc

SEQ ID NO: 99198 - DNA, 3538 bp, Zea Mays
aattagcaagagaaacacaaggtcgaggtggtgaggtatggagctcgccttgggggccatgaccagcttggcccttaagctaggcgacctgctcatggaggagtatgtcgtgcagaagggcctcaagcccgacatcgagtctctctccagggagcttgtgatgatgaacgccgctctcatcgacgcgtcccgggttccacctgaccagctcaccgaggtggaaaagctttgggcacgcaaggtccgggacctgtcgtatgacatggaggacgccgtcgacgatttcatcctgcgtgtggctggtggtgacgactctgccgccgactcaaaattcttcaagaagacccttgccatggtcaaggacgtgatgtcgatgaagaagttcaaggatcggcgccagatctccgacaaggtcaaagacatcaagaaactctccaacgagttagctgaacttcgtgccaagtacacggtaaggggtgtgggcgctgatctcgccgcgagcaccggcatcgaccctcgtgtcatcaatctgtacaagaaagagacagatctcgttggcatcaagaagtcaaggaacaaagtcattaggatgctgtctatggagaccaaagatgatgatgcacttgagtcccatcaggctctaaagatagtgtctatagtcggggttggaggactaggtaagactactctagccaaaacagtgcatgacatgcttaagaagcaattcgactgttctgcttttatttctattggtagaactcctaatctgaataggacattcgagaagatgctattgaaacttgatcgtgagtataaacaagttgacatggccagatgggatctagaacaatttaaaaacgaactggatgaattcttgaaggacaagaggtacttgatcgttgttgatgacatatgggatgttgactcatgggaagcaatcagatatgccttgaaggacaataattgtggaagtagaataatcatgactactcgtaattttgggattgtcacgaaattagaagaggtttatagattaaaacctctttctaatgcaaactccaagaaattgttctacaaaagaatagagagtcaggaaggagaaagccttgatggtgaactctctagtaaaatcatacataaatgtggcggcataccattggctatcattgcaatagctagtttgttggttgaaagatcacgtgaggagtggtcagaagtgtacgacaagattggtcttgggaatgaagacaatacaacaaagataatgtcatacagctactatgatctgcctccttatctcaagccatgtctgctgcaactaagcatatatccagaagactgtatcattgatacaaactctaccatatggaagtggataggtgaaggtctagttcatcttgagaaagaagagggtagcctatttaaggttggagaaagatacttcaaggagcttgtgaatagaagcatgatccagccgacagaggacaaaaatgatcggtttgtagaagggttccgtattcacgacattgtgtttgatctcatctgtaagttgtccaaggatgaagacttcattaccattagcgggcaacattcatctcgggatagtttaagaagagagaagaaaacatgtgtgcctcgctcagactgcaagctacgtcggctggccgtccgaaatcaacgtgtgcagcgcttccctgaagaaaccatcgacatgccagaggtgttgagatcacttagcattatagattgtaatattgaggttatggccccaattgatagcttcagggtttgccgtgtgctgcatctggggaagagctacgtacccatcagcctaaagcatctggggaagctgttgcatctcaagttcctagagatagtatacacgcctattgatgagctccctaaggaaattgggcatctgaggtctcttcagacactgatattagaccgtactggactagacgagctgccaccggttgtttgctcgcttacacggttgatgtgcctgatagcccaggggttcgaaaggttgccagctgacaggatggggaacctaacgtccctggaggagctacgactacgtagggtagttggccggagtgccacccaagccctagtggcagagcttggcaagctgacgaggttgagggtggtcgacatcaccttttcagagcagctagaggagagcttgcaagaagcattggtgcaatctctgtccaatctgcggggactccaggaactaacgcttttgtttaaaatgacacggtggggaagcgatatgtggggagactgggagccaccaaggcagctccggcgcctgattattgaaggcatcatcgtcttctcacgacagcctcgatggatcaaccgctcctgtctgccacgcctctgctacttatctctgatggtgcacactcttgaagcacaggacctagataatctagcgaggttgccagagctccagtacctcacgctagatggtctcagctggcctccaaggtatactgttggcccagacgacttcaggaatctgaggttctgcaaagtgggcacaacgttcgagtttcgtaagggcgccatgccaaggctcgaagtgctgcaatttagagtttttgcagggtactattgttgggcatacaatggtgtgccgttcgagcagttcccaacgaaggatcttgacttggacctggataacgtccttttacttcagcaagtaatagtcaaagtcaactgcgtaggtgctactgtcacacaagtggaggaggtggaggccgtggtcatgcgtgccgtggaaaatcatgccaaccgtccaaccataaaaatgaatcgagcatatgaaatagctatcctatccgacgaagggcgggaggctctgcttcggcgacacattgaaaaggattgctgcgtgcgcacgatgaaggataaatctgatgctttcttcatcagccagctgcggaggtatcgacatcttcagaaagccattattttcatcgactgttcgggtgccagcatgtgtgaggtgcagaaagtggaagcagcttttagacatgcagccgaggttcatcctaaccatccaagtattgaacttatcagaacaaacaccgacggaatggcctcctcctcatctgaccatcccaacacagagcccaggaattgatggctcggtttgtcagatccttccaacccaggagcaggtaaatgtgagttgcttaagtaccaaagagagaggtcctgttcagcaagatgattagaagcattggcaattggcatggcttgttaattagattcgtggttcttagtctaaaatcacattgaagagggagacggacccaagtgatgcagttcatgtgttatctgtatcagtctctgtttttataagctgtcatatattttctcgaaactatcttgtgttgattttgtgtgaagtgtacttttaatggcacgggccattgtgtatttgcttgaaagataaggatggtattatctttgtatttgaactctaaatgcttaaatgaagtgatcattctggatggagata

SEQ ID NO: 99199 - DNA, 127 bp, Zea Mays
caaattctaatttcgaattcaaattttttttatttccatactcaacttcaaatgtatgaattaaatcccggcatgtaatgcaaagtataattattttttttgttatttatttattttcttatctaag

SEQ ID NO: 99200 - DNA, 3333 bp, Zea Mays
atggagctcgccttgggggccatggccagcttggcccctaagctaggcgacctgctcatggaggagtatgtcgtgcagaagggcctcaagcccgacatcgagtctctctccagggagcttgtgatgatgaacgccgctctcgtcgacgcgtcccgggttccacctgaccagctcaccgagaagacccttgccacggtcaaggacgtgatgtcgatgaagaagttcaaggatcggcgccagatctccgacaaggtcaaagacatcaagaaactctccaacgagttagctgaacttcgtgccaagtacacggtaaggggtgtgggtgctgatcttgccgcgagcaccggcatcgacccccgtgtcatcaatctgtacaagaaagagacagatctcgttggcatcgaggagtcaagggacaaagtcattaggatgctgtctatggggaccaaagatgatgatgcacatgagtcccatcaggatctaaagatagtgtctatagtcggggttggaggactaggtaagactactctagccaaaacagtgcatgacatgcttaagaagcaattcgactgttcggcttttatttctattggtagaactcctaatctgaataggacattcgagaagatgctattggaactcgatcgtgagcataaacaagttgacatggccagatgggatctagaacaatttaaaaacgaactggatgaattcttgaaggacaagaggtacttgatcgttgttgatgacatatgggatgttgactcatgggaagcgatcagatatgtcttgaaggacaataattgtggaagtagaataatcatgactactcgcaattccggggttgtcactaaagtagaggaggtttatagattaaaacctctttctactgaaaactccgagaaattgttctacaaaagaatagagagtcaggaaggagaaagccttgatggtgaactctctagtaaaatcatacataaatgtggcggcataccattggctatcattgcaatagctagtttgttggttgaaagatcacgtgaggagtggccagaagtgtatgacaagattggtcttgggaatgaagacaatacaacaaagataatgttatacagctactatgatctgcctccttatctcaagccatgtctgctgcaactaagcatatttccagaagattgtttcattgatacaaaagctgtgatatggatgtggataggtgaaggtctagtccatcttgagaaagaggagggtagcctatttgaggttggagaaagatacttcaaggagctggtgaatagaagcatgatccagccgatagaggaaaaatatcattggtttgtagaaaggttctgtattcacgacattatgtttgatctcatctgtaagttgtccaaggatgaagacttcattacccttagcgggcaacattcatctcagtcactgcaatctctgttcaatctgcggtcagactgcaagctacgtcggctggccgtccgaaatcaacgtgtgcagcgcttccctgaagaaaccatggacatgccagaggtgttgagatcacttagcattatagattgtaatattgaggttatggccccaattgatagcttcagggtttgccgtgtgctgcatatagaaaacaactacgtacccatcagcctaaagcatctagggaagctgttgcatctcaagttcctagagatatttgacacgactattgatgagctccctagagaaattgggcatctgaggtctcttcagacactggtattagtcagtactggactagacgagctgccagtggctgtttgctcgcttacacggctcatgtgtctgatagcctatgggttcgaaaggttgccagctgacaggatagggaacctaacgtccctggaggagctacaactacatagggtggttggccggagtgccacccaagacctagtggcagagcttggcaagctgacgaggttgagggtggtcagaatcaccttctcagagcagctagaggagagctcgcaagaagcattagtgcaatctctgtccaatctgcggttactccaggaactagtgcttttttctgaaatgccagagcggggaagcgatatgtggggagactgggagctaccaaggcagctccggcgcctgattattgaaggcatcgtcttctcacgacagcctcgatggatcaaccgctcctgtctgccacgcctctactccttatatctgatggtgcacgctgttgaagcacaggacctagataatctagcgaggttgccagagctccagtacctcatgctatttggtttcagctggcctccaaggtatactgttggcccagacgacttcaggaatctaaggttctgcgaagtgggcacaacgttcgagtttcgtaagggcgccatgccaaggcttgaagtgctgcgatttggagtttgtgtgccgttcgagcagttcccaacgaaggatgtgatcgaagatcttgacttcgacctggataacgtcattttacttcagcaagtcagggtcaaagtcaactgtgcaggtgctactgtcacacaagtggaggaggtggaggccgtggtcatgcgtgccgtggaaaatcatgccaaccgtccaaccataaaaatggatcgagtatatgaacaaaatatcctatccgacgaagagcgggaggctctgccagctgcggaggtatcgacatcttcagaaagccattattttcatcgactgttcgggtgccagcatgtgtgaggttcagaaagtggaagcagcttatagacatgcagccgaggttcatccgaaccatccaagtatcgaacttatcagaacaaacaccgacggaatggcctcctcctcatctgaccatcccaacacagagcccaggaattgatggctcggtttgtccaatccttccaacccaacagtaggtaaatgtgagttgcttaagtaccaaagagagaggtcctgttcagcaagatgattagaagcattggcatggcttgttaattagattcgcggttcttagtctaaaatcacattgaagagggagacggacccaagtgatgcagttcatgtgttatctgtatcaatccctatttttataagctgtcatatattttctcgaaactatcttctgttgattttgtgtgaagtgtacttttaatggcacgggccacgtatttccttggaaacgaccatgtggagttattttttcccccattttctttcctgagatgggctgtgtatttgcttgaaagataaggatgatattatctttgtatttgaactctagatgcttaaatgaagtgatcatcctggatggagataagt

SEQ ID NO: 99201 - DNA, 1012 bp, Zea Mays
aatacaaaccacacggcacacacacaaccaccggcccttctctcctcggctcacccagcaggccgcgccggatgctcatggccgcagccacgcactacttgggcggatcagcccactcctcctccaccacctcctcctccatctcgccatcgccgccgccctggcacccggtcctagtcgtacccagcaaccagcgccaggccgtcgtctacgacctaacggaggacctcgccacgccgccgtccccgtccccgtccccgtcaacgaccccgcagcacctccgccccgcgtcccggcggcgcgcgggcaagccgcgccggccgcggccgtcgcggaagctgcccaccacctacatcagcgccgacgccgccagcttccggcgcatggtgcaccaggtgacgggcgccggcgtcggcgccgacgtcgacgcggtgcaccagggcacggagcagctgctctgccgcccggcaccgccctcccgcgctgtgctttcgacggcgacgacgacgctggtgccgacgctggacacgtcggcgttcctgctcgacgccgggggtggcgggcggcctggcgcggcctgcttccacggctccgcggcggcggcggaggcggaggcctgtggttgtggtggcggcggcggcataggaggaggaggggagtacagttgcagcaacggcggcggcggcgggttcccgagcttggagtcgtgggatgaccacgacctattctaggactaggaaggagtagctgccgtctccaaaactccatggccgtgcacacctagcttgcttgtactgtagattatttgagcttaccacagcatccatcgattgattgatcgacaagcagcgtgattatattggttacagagtttgctgctagctatcttggtcgatcaagctttgttgctgtgggaatatgatgtgatgagatggagtaaaaaaggatcaacagtgctctgtactctgtgtattaattatgcagatgaaaagaaggatcggaattcggaacg

SEQ ID NO: 99202 - DNA, 1655 bp, Zea Mays
ctgcaagccacccccatccctgcccacctccttccagcgtaagccaaagctccactagtacatataacgtatcttcttcaggccgagaacccgtgcatctgctacgctatactcgtcaacttcagcagcaatggcgcctccctcgtggcggcaacggcaccacactctgctgcaggctctgctctcccgcggcccccttgccgagcctgacttccgcgcgctgttcactgctgtctccgacagggaccctgccactcaccaacaactgttcaatgatacacttctcaagatcaacaaggaccttgcctacttgcagttcgagttgcgggcatgcattaaccaatatgatggaatggtttactacggggtggttaataacattgctgacgaagagtctaagcttggaacaaagtactccgtgccccagatcgcattctacaagggactgctagaagcaatagttcaggaagctggaaatgatgggagcataaccagtatcgacgccctcaatgtccggcttgataaccaggtcgcagtattagacggttcacaggacagccagtctcgccttcctagctccataaagaacttctcaatgagccagaaggagaaaactctcgatgagctgatacgggaccgctggttgtcgtacaccgccacaggcaagatcggtctgggcaccaggtcatttcttgacctccggagctggttccgtggtaacgatatcccgtcttgtgttgtctgcaacgaagcttgtataaaggcatcgagttgtccgaacgagggatgcgatgttagaattcacgagtactgcttgaagaagaaattctcacagagaaaggcctcgagagcgtgtcctagttgcggtactggatggccgtgtcaagatggcgagggcgaggccgatgaagtgaacgaacctggggaggaggatctagcctcgccggctaaccatccctcgaggaagaagcgcagtagagtcaaagctgagctggtggaggaaaacgacatcgcaggcccgtcgacggaggtgcctaggactaggaggaccctgagaagcgctaaagccgaagcagtcgaggccgatcaagaggcgtcttctaccgcagcttcacagccaggcaggggttctaaaagaaggaagaagtgagtgatgactgatgatgcatgcttataaaggagggagattgcaaatgttcctcctttgccatgtgtagatactacagtagacgtgctggtatccagtgggtagtttttcaagtgccagggcaaaagagccttctagttctgctctttgctacagtagggactcgtagactggtggagctctcatgacgtctaagttatttatcttgtgaagccattcccatattattacttgtttgttatggtagtagagaacatcttggagcactgaaaaacttgagggcatgggatgctgtcgcttgcatttgttgattctggattgaggcatgacatgcatgctgtagcttgcaattggcagctccttcaagttaaagttatctagcttgttcgctgcggcttgctgcggctgcaatccggctgcggctgcggcttctacagtatttttctctctatggattgcagctgcagcagtccaaacagctgcaacagtgtcggcttgtagccagccg

SEQ ID NO: 99203 - DNA, 1759 bp, Zea Mays
atgccagggcccaacattcccttccttccccgggcggcgaggtaggatccttgccgtctcccgctcttcaccacgcgcttcccgcgaaacgccaaccaattctccgtcgatcaaaaactgcccctctcacaaggagaaatctttcccgcgggcggcggaggaattcgcggattaggttggtgggttcgaccgatccgcgtccccgggttcccaagttcccaggtaagccgagcccggagcatggcgccgctgtcgtggcggcaccacacgctgctgcagtcgctgctccaccgcggtcccctctccgaacgcgacttccacgccatcttcgctggcgtctccggcaagaaccccgccactcaccaacaactgttcaatgatacacttctcaagatcaacaaggaccttgcctacttgcagttcgagttgcgggcatgcattaaccaatatgatggaatggtttactacggggtggttaataacattgctgacgaagagtctaagcttggaacaaagtactccgtgccccagatcgcattctacaagggactgctagaagcaatagttcaggaagctggaaatgatgggagcataaccagtatcgacgccctcaatgtccggcttgataaccaggtcgcagtattagacggttcacaggacagccagtctcgccttcctagctccataaagaacttctcaatgagccagaaggagaaaactctcgatgagctgatacgggaccgctggttgtcgtacaccgccacaggcaagatcggtctgggcaccaggtcatttcttgacctccggagctggttccgtggtaacgatatcccgtcttgtgttgtctgcaacgaagcttgtataaaggcatcgagttgtccgaacgagggatgcgatgttagaattcacgagtactgcttgaagaagaaattctcacagagaaaggcctcgagagcgtgtcctagttgcggtactggatggccgtgtcaagatggcgagggcgaggccgatgaagtgaacgaacctggggaggaggatctagcctcgccggctaaccatccctcgaggaagaagcgcagtagagtcaaagctgagctggtggaggaaaacgacatcgcaggcccgtcgacggaggtgcctaggactaggaggaccctgagaagcgctaaagccgaagcagtcgaggccgatcaagaggcgtcttctaccgcagcttcacagccaggcaggggttctaaaagaaggaagaagtgagtgatgactgatgatgcatgcttataaaggagggagattgcaaatgttcctcctttgccatgtgtagatactacagtagacgtgctggtatccagtgggtagtttttcaagtgccagggcaaaagagccttctagttctgctctttgctacagtagggactcgtagactggtggagctctcatgacgtctaagttatttatcttgtgaagccattcccatattattacttgtttgttatggtagtagagaacatcttggagcactgaaaaacttgagggcatgggatgctgtcgcttgcatttgttgattctggattgaggcatgacatgcatgctgtagcttgcaattggcagctccttcaagttaaagttatctagcttgttcgctgcggcttgctgcggctgcaatccggctgcggctgcggcttctacagtatttttctctctatggattgcagctgcagcagtccaaacagctgcaacagtgtcggcttgtagccagccg

SEQ ID NO: 99204 - DNA, 2845 bp, Zea Mays
atggcggaggcgatcatcgggcctctggtcgggaggctgcaggaggtggccgtgggcgaggcccgggcgctggtgggggtgaacgccgacatccaccggctccgcgacaagctcatgtggctgcaggccttcctccgcgaggccgacaccaggcgccgggccgtcaccgacgagatcaccagggtctggacgctgcagacgcgcgacgccgtgttcgacgccgaggacgcgctcgaccattaccacctccgtgccgacatgtccaggtacccaaggtgggctcgtggtactatgatgtgtcttcagacattcacgactcaaatacggatgagacgcggcctctccagaaaaatcagagccatcaacatgaggcttgatggcatcattgaaaacaaggataaatacaagatagaggattccaatacgaagacaggtgtgacatggaagccttctacctcgacatctatacgctacactcatagaaagctggatgatgtccacgatgcagacgcggtgatctatatggaggagcacgacaaactagaggatgcccttgtcaacaacaacctagctgaacaccaagacggcaaagacgaccactacccagtcatgatcaccgtgtccggagaaagcggcatcggcaagacaactctcgtgagagacatctacaaaaagatggagaaccagaaagtgttcgaggtgcaagccatggaaagcttcgcgccttacctgaccgctcccaacatcctccagcagatcacccagcagctgacgcaggacgacaccaactgccctaaagagatggcgcaggagatgctgcagagcaggctgagaggcaagaagtacctgctcgtgatcgacggcgaggtcagcggcactgagtggaagcacttcttgaccagcatcccggtgggcgccaggggcagcagggtggtgcacatcacgcagggcaagccggaagagccgcctagcagctaccaccacgtcaccatcgagctaaagaagctcacggaagacgccgccatggcgttgttccggcagaggctgcccaaggagctgcaggacaagaacctcagcaagtaccggaagagcgttttcaagatcacccaggggctgcctctggcggtggttctcttgtcgggcctcgtgcagaccaaggtgttcccgggcgagtgggtgaaggtcttccactacctcaagtccaagccgtcgacggcgaacctcgagagcatgctgtcggtctgcttcgacgacctcccgcacgagctcaagtgctgcttcctctacttcgccgcgctgccgaccaacaccacggtcgaggcgcgcagcctggtgttcatgtgggtcgcggaggggttcctttcctccaagggcgggaagacgatggagaagatcggcttcgtctacctgtccgagctgatcagccggaacctcgtcaaccgggccaaaatgaacgacgattccagcttcgggagcatgctggtcacgatccaaaccaaagtccacgacttcctgcagatagaagcgcatgaggcgagcttcgtggaggtccacagcaacgacgacatccccacgctgaccagcgctcgccgcctctctctgcagaactacaccgacaagtacgccgtcctggcgcacccgctgccgaagctacggtccatcttctcccagtacgagcaggagcctaacaagggtgaccgggggcaccaccacaggtccaaagggagccgggcgtacatgttccggttgtcccagcaaagggcgatctcgaagatgaagagagacatcaggtctcacatcaaggacctgttccatgggtccgagttcctccgcgtcatcaacctgcagggcatcgagatcggcgagactctgacgagcgccatcggcgaccttgtgcacctgcagtacctcggcatcacgtcgtgctcgctgagacacgtcccgtggtccatcggaggactcaccagcctccagacactggacgtgagggagaccaacgtccgagagctcccgaggtcgttctggatgatcaagaccctgcggcatgtgcttggcttcgtcctcaagctgcccaagcagatcggcaacctgaagcagctgcatacgctcgactccatagacctcgagcaagtttcagaggagacggatttggtggagacactaggagagatgatccacctcgagttcctctccatctggcacgtctcgcatgccaacgtgaaggctctctccgctgccatggagaagctcgagagcctcaggaccctcatcttggaaggaaagatcatcccttcaaacgtcttcaccaccgcctccctccgccgcgtcaagttcatgttcctgagcggggacctgctgcgttcatctgatctagacgacggtggtgaatccttcatcctccctaacctcgccatgctctctctggagaagacgtacgtgacgcaggagttcatcagcaagctgtctgagctgccgtctctcaccacccttgcgctgtaccctggctcgtacagggacaagaaactcgtgttcgcttcggccaagttcccgcgcctcaagaggatcaagacggtcgacgtggaggtgctggagagcgtcgaggttgaggtgagcaaggtccctgagctcaaagagctggagatccactcctacttcacaggtggttatcatcacattgacctgggtagtgaaaggaggaagcgttctcgaaagacgaggatcgtggttgatttgaagaaagtgaatggtgctgttcatgaagaaaatgctgacacttctggatggtggatgatattctcgtgagtcatatagtaaggtaaaattggcacccaccacagctgtacaa

SEQ ID NO: 99205 - DNA, 1112 bp, Zea Mays
ggcatcagaactcagaaggcctcagtgtcacagctcacaagagcccgtcgtcagtctcgtcacactagctcgtcagaacctagctagaaggacgcggcagtagtacacgtacgtacgcatgtctccctccgtgatggccacatggcgccgtcggccaccgccgccgtcactactccattccaaaggctcgtgtccgccgccggactccccgtcgcctggtcctggtgctgctgctccaccgccggcggcttccgcgacgtcgtccccagcggcgaaaggatcatcaggcgcatgcaggtaacctcaacgtcagcttgatcacagtgtagttcgttaattagttttagaaaaagaccttgttagatatataggatcggaataggagtcgatctgtatccgtttctcatgcaacacacacaacaatgcaaggacacgtgtggccggtcgagggcaccaaccagtccgggacgacgacgacgacgctgttgtacctgcagccgctgctgctgagcatcatggacgatctgcagatgatgaagcagatcgagatcgactagtacctgctgctgcgctccaactggcggctgccctgcctcgagctcatcatgctcatcagcaaggcggccggctcggtggtgtaccgccagaacgcgaggacccccgggcacgacgacggcaggcgctacaaaagatattctattttttgacactgtatatctctcgtagcatagacaactagtgttattagctcactgtcactgtttgacgacgcttgcatttttctaccgctaatttatgacattattggcttctaagtcatgaaaaacagccgacagaagttggggcctttgctcttgaaataaagaggctttggctttttagggtagggaaaggggcgccaaacaaacttcttctcttctcggttgactcatgcttattggttgccatatgccttcatagtggagttgggagttatatttgggggcaatgttgggtcttgggctttccatttgctagttcaatgccaaatgatgtttccatacaaaatatgaaaaaatgtgacatattgcatttttctgtcgctaatttatgacattattggcttctaagtc

SEQ ID NO: 99206 - DNA, 768 bp, Zea Mays
ggcatcagaactcagaaggcctcagtgtcacagctcacaagagcccgtcgtcagtctcgtcacactagctcgtcagaacctagctagaaggacgcggcagtagtacacgtacgtacgcatgtctccctccgtgatggccacatggcgccgtcggccaccgccgccgtcactactccattccaaaggctcgtgtccgccgccggactccccgtcgcctggtcctggtgctgctgctccaccgccggcggcttccgcgacgtcgtccccagcggcgaaaggatcatcaggcgcatgcaggacacgtgtggccggtcgagggcaccaaccagtccgggacgacgacgacgacgctgttgtacctgcagccgctgctgctgagcatcatggacgatctgcagatgatgaagcagatcgagatcgactagtacctgctgctgcgctccaactggcggctgccctgcctcgagctcatcatgctcatcagcaaggcggccggctcggtggtgtaccgccagaacgcgaggacccccgggcacgacgacggcaggcgctacaaaagatattctattttttgacactgtatatctctcgtagcatagacaactagtgttattagctcactgtcactgtttgacgacgcttgcatttttctaccgctaatttatgacattattggcttctaagtcatgaaaaacagccgacagaagttggggcctttgctcttgaaataaagaggctttggctttttagggtagggaaaggggcgcc

SEQ ID NO: 99207 - DNA, 1512 bp, Zea Mays
ttcggccgagcagacccgtggcctcactcccccgcgcgttagggttccgctctcatccttcgtgcctgctcaccgccgccacttccagctaggccgtcgtcgccgcgccccaccagcttcttaactacactacctgtcatccagtagccctgttcgtcgtcgacactccagttcgaataagccaggaagcctatggagatcatcatctcccaaccattgatgttaaggctgcacatttagtaaagcagctagcaagtgatgaaagtgtagagtgatctgtggacattatcattagggttcctttaatattaccatatcgaaagggcgtcaagtgcgatctccgcattcttcatgtatcctgtgaggagcaccagtatggtgttgtaccacaattccaagctgaaagaaaaaaagactacgatgcggatggataccatccacacccacagaccacagtggcttgctttgcttaccagagcatgacaccagaagagagcgagagcctgacgatggcgccgaggtcggcgaaggcggcggacgagaatccggtccaggtgagagggcatccgccgaagaagacgaaggcgagctggccgaacacggggatccacatggcgacgaccatggagcccatgacgccggcgaggccgaggcggaggtggacggcggcgagccaggacagggcgaggtggaggccgaggttgagcatggcgaggtacgtgatgatcatgttcttgatctgcgcctgcaggtacatctgcagcgggaaggcccagacgaaggagaagagcacggggatgtaccagagcgccacggtccccgccaccgccgagatgtccgggtcctgccccagcgccaccagcagcggctccgtgaacaggtacacggggagctgcaccacggcgcacgccgacaggatgatccacgaccgctgcagctgcatgcagatgcatatcgcgcccggccggacgccgacgacgcggacttgttggaacagagccgtcgtcgaccagtcgacgcctgggtgcctggccattttcttcgccgaagaagggaaaaagaagccgccgccaagaccaagagggaagaagaggaagcagcagccaagagagcaattggaacatgactgttgggatcggcacgagatgtcgtcgaggcggcggcaagctttattgattccaatgttttttttttctatctagcttgtccggcacgagttggtggctgactttattcgggctctgaaccgagagcacggatcgatcttttgaatcgaatgctgctggcgggggcgggccgcctggagctcgacgaacgaagggcaagacgacatcgactacaaaatggtccccgatcgtgttgtgcagcgtgttgctcgtgatcactatacttgcatgcatctttgaatttgaatcatgcatgcgtgcatgtccgtatatagatccacaacatgggctgtactttttttgaaaaaaattgtttcgtctttctcttttttgcgaacgataattg

SEQ ID NO: 99208 - DNA, 1724 bp, Zea Mays
cgctctcatccttcgtgcctgctcaccgccgccacttccagctaggccgtcgtcgccgcgccccaccagcttcttaactacactacctgtcatccagtagccctgttcgtcgtcgacactccagttcgaataagtatggagaaggccagcaggggcgagaggtcggcgacggctgcggccaccgcctggctctcggtgaatatgtaggcgaggctcccgcggaagaagaggaagagcacgaacagcacgagcccgatggcgaaggaggtgacgaccacgttgtagatcgcgaacttggccctcctcgcgctcccagctcccagctcgttcgccactcgcactctgaaaaagataggtgccaggaagcctatggagatcatcatctcccaaccattgatgttaaggctgcacatttagtaaagcagctagcaagtgatgaaagtgtagagtgatctgtggacattatcattagggttcctttaatattaccatatcgaaagggcgtcaagtgcgatctccgcattcttcatgtatcctgtgaggagcaccagtatggtgttgtaccacaattccaagctgaaagaaaaaaagactacgatgcggatggataccatccacacccacagaccacagtggcttgctttgcttaccagagcatgacaccagaagagagcgagagcctgacgatggcgccgaggtcggcgaaggcggcggacgagaatccggtccaggtgagagggcatccgccgaagaagacgaaggcgagctggccgaacacggggatccacatggcgacgaccatggagcccatgacgccggcgaggccgaggcggaggtggacggcggcgagccaggacagggcgaggtggaggccgaggttgagcatggcgaggtacgtgatgatcatgttcttgatctgcgcctgcaggtacatctgcagcgggaaggcccagacgaaggagaagagcacggggatgtaccagagcgccacggtccccgccaccgccgagatgtccgggtcctgccccagcgccaccagcagcggctccgtgaacaggtacacggggagctgcaccacggcgcacgccgacaggatgatccacgaccgctgcaggtagatgcccagcatgtggtactgcttcgccccgtacgactgcccgcacagcgtctccagcgcgctcgccatgcccagctgcatgcagatgcatatcgcgcccggccggacgccgacgacgcggacttgttggaacagagccgtcgtcgaccagtcgacgcctgggtgcctggccattttcttcgccgaagaagggaaaaagaagccgccgccaagaccaagagggaagaagaggaagcagcagccaagagagcaattggaacatgactgttgggatcggcacgagatgtcgtcgaggcggcggcaagctttattgattccaatgttttttttttctatctagcttgtccggcacgagttggtggctgactttattcgggctctgaaccgagagcacggatcgatcttttgaatcgaatgctgctggcgggggcgggccgcctggagctcgacgaacgaagggcaagacgacatcgactacaaaatggtccccgatcgtgttgtgcagcgtgttgctcgtgatcactatacttgcatgcatctttgaatttgaatcatgcatgcgtgcatgtccgtatatagatccacaacatgggctgtactttttttg

SEQ ID NO: 99209 - DNA, 1586 bp, Zea Mays
ttcggccgagcagacccgtggcctcactcccccgcgcgttagggttccgctctcatccttcgtgcctgctcaccgccgccacttccagctaggccgtcgtcgccgcgccccaccaggttctcgcgttttccccctctccaagcttccatccttccctcttaccttactggcgggtgttgtttctgtacccggtggttcatctcgccgcggccgattagctgttattcacggaatcgtcttctgcttcttaactacactacctgtcatccagtagccctgttcgtcgtcgacactccagttcgaataagccaggaagcctatggagatcatcatctcccaaccattgatgttaaggctgcacatttagtaaagcagctagcaagtgatgaaagtgtagagtgatctgtggacattatcattagggttcctttaatattaccatatcgaaagggcgtcaagtgcgatctccgcattcttcatgtatcctgtgaggagcaccagtatggtgttgtaccacaattccaagctgaaagaaaaaaagactacgatgcggatggataccatccacacccacagaccacagtggcttgctttgcttaccagagcatgacaccagaagagagcgagagcctgacgatggcgccgaggtcggcgaaggcggcggacgagaatccggtccaggtgagagggcatccgccgaagaagacgaaggcgagctggccgaacacggggatccacatggcgacgaccatggagcccatgacgccggcgaggccgaggcggaggtggacggcggcgagccaggacagggcgaggtggaggccgaggttgagcatggcgaggtacgtgatgatcatgttcttgatctgcgcctgcaggtacatctgcagcgggaaggcccagacgaaggagaagagcacggggatgtaccagagcgccacggtccccgccaccgccgagatgtccgggtcctgccccagcgccaccagcagcggctccgtgaacaggtacacggggagctgcaccacggcgcacgccgacaggatgatccacgaccgctgcagctgcatgcagatgcatatcgcgcccggccggacgccgacgacgcggacttgttggaacagagccgtcgtcgaccagtcgacgcctgggtgcctggccattttcttcgccgaagaagggaaaaagaagccgccgccaagaccaagagggaagaagaggaagcagcagccaagagagcaattggaacatgactgttgggatcggcacgagatgtcgtcgaggcggcggcaagctttattgattccaatgttttttttttctatctagcttgtccggcacgagttggtggctgactttattcgggctctgaaccgagagcacggatcgatcttttgaatcgaatgctgctggcgggggcgggccgcctggagctcgacgaacgaagggcaagacgacatcgactacaaaatggtccccgatcgtgttgtgcagcgtgttgctcgtgatcactatacttgcatgcatctttgaatttgaatcatgcatgcgtgcatgtccgtatatagatccacaacatgggctgt

SEQ ID NO: 99210 - DNA, 792 bp, Zea Mays
ttcggccgagcagacccgtggcctcactcccccgcgcgttagggttccgctctcatccttcgtgcctgctcaccgccgccacttccagctaggccgtcgtcgccgcgccccaccaggttctcgcgttttccccctctccaagcttccatccttccctcttaccttactggcgggtgttgtttctgtacccggtggttcatctcgccgcggccgattagctgttattcacggaatcgtcttctggtactattcgttcccccttctgacttgcttcttaactacactacctgtcatccagtagccctgttcgtcgtcgacactccagttcgaataaggtacatctgcagcgggaaggcccagacgaaggagaagagcacggggatgtaccagagcgccacggtccccgccaccgccgagatgtccgggtcctgccccagcgccaccagcagcggctccgtgaacaggtacacggggagctgcaccacggcgcacgccgacaggatgatccacgaccgctgcaggtagatgcccagcatgtggtactgcttcgccccgtacgactgcccgcacagcgtctccagcgcgctcgccatgcccagctgcatgcagatgcatatgtatgtaatcctcctatatatatggattgattccagatgctaattactccctccgttcttttttatttgtcgcctatattagttgaaatctagcaatatagtagtaattaacagagggacaagcacgtgtttgtgccgcggccaagagttgaaatgtactagcaattaacctcga

SEQ ID NO: 99211 - DNA, 1588 bp, Zea Mays
agcagacccgtggcctcactcccccgcgcgttagggttccgctctcatccttcgtgcctgctcaccgccgccacttccagctaggccgtcgtcgccgcgccccaccagcttcttaactacactacctgtcatccagtagccctgttcgtcgtcgacactccagttcgaataaggctctgagagcacctcaccttcacatgaagccccaccacgtagcctaggactgcgccaagaggaatgccgatcaggtagtacgacgtgacgttgacgtacgcgactacgccttgccaaccggcaccaacagcgacacctgacagcacgggctggacgctgttgagcagtatggagaaggccagcaggggcgagaggtcggcgacggctgcggccaccgcctggctctcggtgaatatgtaggcgaggctcccgcggaagaagaggaagagcacgaacagcacgagcccgatggcgaaggaggtgacgaccacgttgtagatcgcgaacttggccctcctcgcgctcccagctcccagctcgttcgccactcgcactctgaaaaagatagccaggaagcctatggagatcatcatctcccaaccattgatgttaaggctgcacatttagtaaagcagctagcaagtgatgaaagtgtagagtgatctgtggacattatcattagggttcctttaatattaccatatcgaaagggcgtcaagtgcgatctccgcattcttcatgtatcctgtgaggagcaccagtatggtgttgtaccacaattccaagctgaaagaaaaaaagactacgatgcggatggataccatccacacccacagaccacagtggcttgctttgcttaccagagcatgacaccagaagagagcgagagcctgacgatggcgccgaggtcggcgaaggcggcggacgagaatccggtccaggtgagagggcatccgccgaagaagacgaaggcgagctggccgaacacggggatccacatggcgacgaccatggagcccatgacgccggcgaggccgaggcggaggtggacggcggcgagccaggacagggcgaggtggaggccgaggttgagcatggcgaggtacgtgatgatcatgttcttgatctgcgcctgcaggtacatctgcagcgggaaggcccagacgaaggagaagagcacggggatgtaccagagcgccacggtccccgccaccgccgagatgtccgggtcctgccccagcgccaccagcagcggctccgtgaacaggtacacggggagctgcaccacggcgcacgccgacaggatgatccacgaccgctgcaggtagatgcccagcatgtggtactgcttcgccccgtacgactgcccgcacagcgtctccagcgcgctcgccatgcccagctgcatgcagatgcatatgtatgtaatcctcctatatatatggattgattccagatgctaattactccctccgttcttttttatttgtcgcctatattagttgaaatctagcaatatagtagtaattaacagagggacaagcacgtgtttgtgccgcggccaagagttgaaatgtactagcaattaacctcg

SEQ ID NO: 99212 - DNA, 1042 bp, Zea Mays
ttcggccgagcagacccgtggcctcactcccccgcgcgttagggttccgctctcatccttcgtgcctgctcaccgccgccacttccagctaggccgtcgtcgccgcgccccaccaggttctcgcgttttccccctctccaagcttccatccttccctcttaccttactggcgggtgttgtttctgtacccggtggttcatctcgccgcggccgattagctgttattcacggaatcgtcttctggtactattcgttcccccttctgacttgcttcttaactacactacctgtcatccagtagccctgttcgtcgtcgacactccagttcgaataagccaggaagcctatggagatcatcatctcccaaccattgatgttaaggctgcacatttagtaaagcagctagcaagtgatgaaagtgtagagtgatctgtggacattatcattagggttcctttaatattaccatatcgaaagggcgtcaagtgcgatctccgcattcttcatgtatcctgtgaggagcaccagtatggtgttgtaccacaattccaagctgaaagaaaaaaagactacgatgcggatggataccatccacacccacagaccacagtggcttgctttgcttaccagagcatgacaccagaagagagcgagagcctgacgatggcgccgaggtcggcgaaggcggcggacgagaatccggtccaggtgagagggcatccgccgaagaagacgaaggcgagctggccgaacacggggatccacatggcgacgaccatggagcccatgacgccggcgaggccgaggcggaggtggacggcggcgagccaggacagggcgaggtggaggccgaggttgagcatggcgaggtacgtgatgatcatgttcttgatctgcgcctgcaggtagatgcccagcatgtggtactgcttcgccccgtacgactgcccgcacagcgtctccagcgcgctcgccatgcccagctgcatgcagatgcatatgtatgtaatcctcctatatatatggattgattccagatgct

SEQ ID NO: 99213 - DNA, 874 bp, Zea Mays
tcccatcatccaagcaagaccgacatggcttcagctgttgctgctgtgaaggaggcctgcctgctcgccgccgtgtgcgtcgtgctgctccactcctcgtcctcgatgggacagcagccgttggcgcctgaatcgtcgtccgcttccccttactactacacgggccagcagccaccgccgccgcccgcatcaccggtcgactgcccttacactgggcagcagcccactccaccgccagtggtggtgccgccggcgcccacgccgaccccgaccccgaccccggcgccggcgccatcacccaccatcaactgcagctacagcgactgcggcgcgcagtgcactacgtcctgccaagccagctacaacgccaccgccaggaactgcacggcgttgggcgacggcgccttccaagggtgctatggcagctgcaccaacaacagctgccctggcaagtcctgtgtgcacagtgtgtgcgacagcagctgttcctgcgacaacccccacgcaagcagctgctgtcagtcttgccgtaccgctgttaacgcagccatgggtgtgggtggcgagtaccagcgatgcctgagctacaacgacaggtatatggggtactgcatgatgagctgcgtcgacagctgctacaagaactgtacccagggcgcgtaaagctagctagagagatggccggccgtcgtggacgagtgccgcgcgcttgaacagtctcgtcgcggacgggcggcaagctgcaagacacctagtagcgcgcggcccagaataatgttatctcatgtaatgttcaataatacgcatgtatactagctagcgctagctatatatgccaaactaagtgaataatgttactttacgttcatatttc

SEQ ID NO: 99214 - DNA, 1827 bp, Zea Mays
atggtgcgcgagctccgcgtcgactccttctacgcccggctccgcgccgctgcgggctcctcgtcctcgtccccgctcctgatcctcccgtccgccgccgacgccgactcgctgtgcgcggtcagggtgctcgcgcacgtcctctccgccgactccatccgcttctccatctaccccgtctcctccgccgtctccgccagggcgctcctcgcctccttcgccgccccggccccgccctgcctcgtcctcgtcaactggggcgcgcaccgggacctgcgcgcgctgctgcccgccgcctccaccgccttcgtcgtcgactcccaccgccccgtccacctccacaacctctgcgcgcgcaacgaccgcgtcgtcgtcctattcaccgccgacgacgagcgcaccgcggatctctcctacgacttcgacctctccgcgctcgccgacgcctccgacctcgccgccgacgccggcgacgacgaccacctccgcggcggccccggctccgacgcctccgactcggaggattccgatgacgacgaggatgacgccggcggtggcaggaggaagaggcgccgcctctccgacgacgacggcgacgaccccgcccccaacaccgaccccgtgaggctcttctgcaggctgcgccgcgagtactaccgcctcggcacattccacggcaagccgtcggggtgcctcatgtacgacctcgcgcacgcgatgcgcaagaacaccaacgagctcctctggctcgcctgcgtcgccctcaccgaccagttcgtccacgaccgcatcaccaacgagcgctaccaggccgccgtcatggagctcgagcagcacatcaacggctccggcaacctcgacccgtccggcgccggctccgtcgtcacgctcaaggacggcaccaagatccgggcgccggaggcctcgcgcatcgcctacgaggacgagcccaggctcatgctgctgcgggagtggagcctgttcgactccatgctctgctcctcctacgtcgccaccaagctcaagacctggagcgacaacgggctcaagaagctcaagctgctgctggccaggatgggcttcccgctcgcagactgccagaagaacttccagtacatgagcatggaggtcaagcgcaagatgcgggatgagttcgaccgcttcctgcccgagtacggcctcaccgagttctactaccggagcttcttgagagtgcacggctacaggtccaaagtttctgcggcagatgttgtgtacggtgtcacggcgttgcttgaatcactggattcccagtctaaggacacaaaggagtcttcagcggctgagcagttttgggttgcttactctgcactatcactgagcaacgctgaccagttgcgaaaagggatgctgtctgcaattgagatacagagggcaatattgagacaaggaagctcagcgattactaagacagggtttatacggagtgccaagaagttccggtgggtgaagcttgatgaccctgtcgacactaacaagctttgccacccgcaagcacttaccaagttctgcttctttctgctggatgctctcaaggaaaggggtgcaaggatgaagccactgatctgtgcttgcttagcaaaggagccagagaaggtgctagttgtcggggtatgtgggaagccaaggcttggggctgtccaggggaatgcgtttggtaatgctttcaggtatgcggcagaggagattggtgcggactatttccatgacatgtttgagtcatcgtggattgttctggatgttgttgctgtcagttctttcatgattcgattaacggagaagctatga

SEQ ID NO: 99215 - DNA, 1068 bp, Zea Mays
tcttcctgcctgcatccctataaagaagtcccacacaccatccaactccaaggccggccgtgactgcaactgcaatacatcatctagactagatctctctttttcttgggcgtatatattcctacataagtacgctctgatcttcttccagctcgctcgctcgctcgctcgatcgatcgatcgcgcgcgcctgtagataaatttatatatctatacacgtcatggggcctcagcaaggccggcggtcgaacggcggcgcggcggcgcggagcaagcaggaggaggaggggggcgcgaaggtggtgcggtaccgcgagtgccagcgcaaccacgcggcgtccctgggcgggcacgcggtggacgggtgccgcgagttcatggcggcgggcgcggacggcacggcggcggcgctcgcgtgcgccgcctgcgggtgccaccgcagcttccacaggcgcgaggtggagcagcccgccgccgactgcgactgcgactgctcctccaccacctccggcgcctgaagtgaactcatctacggtgtgaatcgcctcgccggcggctgctggccggccacgccgcttgagtgagctgctcctgctagcaggtgggtggggtgggtgggtgcatgcatggggtgggaccgacgatcatgggggcagggcagggcattcatcaaacggtgtgattagaccggtatagtcgatcgtaggtgcattatattcatcaaccattaccatatatggaccggtgggttttttttttacttcctcctctgcagctctctgctctatttttcttctttctctcctctccatttgttcttggatatggttttcagtgaagaattctgttgtgcgaagcatgtgacataatcgtccgtatatatgtatacatatatatatggtgcttgtacgtgcctgtgctgctaggctgctagctgtgtgtgtgcgtgtgtataaagtccagcggtgtttccatgttactttcctgtatatatatatatataaaatgaacatgaatctctcgcatatgcatactcttaaatttatttaccatacatgtgctctgtgt

SEQ ID NO: 99216 - DNA, 886 bp, Zea Mays
catccaactccaaggccggccgtgactgcaactgcaatacatcatctagactagatctctctttttcttgggcgtatatattcctacataagtacgctctgatcttcttccagctcgctcgctcgctcgatcgatcgatcgctcggcgcgcgccagtagataaatttatatatctctacacgtcatggggcctcagcaaggccggcggtcgaacggcggcgcggcggcgcggagcaagcaggaggaggaggggggcgcgaaggtggtgcggtaccgcgagtgccagcgcaaccacgcggcgtccctgggcgggcacgccgtggacgggtgccgcgagttcatggcggcgggcgcggacggcacggcggcggcgctcgcgtgcgccgcctgcgggtgccaccgcagcttccacaggcgcgaggtggagcagcagcccgccgccgactgctgcgactgctcctccaccacctccggcgcctgaagtgaactcatatatatatctacgatgaatcgccggcggctggccacgccgcttgagtgagctgctagctagcaggtgggtggatgggtgcatgcatggggtgggaccgacgatcatgggggcagggcagggcattcatcaaacggtgtgatttggccggtgtagtcgatcgtaggtgcattatattcatcaaccattaccatatatggaccggtggttttattttatttttttttacttcctcctctgcagctctctgctctctctctttttcttctttctctcctctccatttgttcttggatatggttttcagtgaagaattctgtacgttgtgcgcgcgatgcatgtgacataatcgtccgtatatatgtatacatactcctatatatatatggtgcttgt

SEQ ID NO: 99217 - DNA, 1024 bp, Zea Mays
tccatctcgatctccactccactccacctccgacctctctccattattccatcccggcggcggcggcggcgcgcggcgtgcgtgtcacactcactgatcagtatccccgcgggccgtactccttcccttgtccgttccgctgcgcagcagacggcgcacggcatggccagcaggaacaaggcggcggcgctgctcctctgcttcctgttcctggccgcggtcgccgcctccgccgccgagatgatcgccggcagtgggatcggcgacggcgaaggtgaagagctggacaagggcggcggcggcggcggcggccaccacaagcacgagggctacaagaacaaggatggcaagggaaacctgaagccctctcagtgcggcggggagtgccggcggcggtgctccaagacgcaccacaagaagccgtgcctcttcttctgcaacaagtgctgcgccaagtgcctgtgcgtgccgcctggcacctacggcaacaaggagacctgcccctgctacaacaactggaagaccaagaaaggagggcccaagtgcccgtgagtcgtgagaagatggcggcccaatacgcggttttcccggcggctacgcgggcgggccgccggcccatcgtaacctaccaccgtagttggaagcgtcgtaggataggttaggaataaataatagcctctctttttttttttgccttgtttcggtgtttgtttgggccgggccggctgccgcttctctggtctctggtctaaaaagttcccgaaaaatattatatatttaataagaagaagaaggaggggaaaaaatcagtgtgaccttttcgctggaacgagggatgagatggggaaaaaatcagtgtcactgacctgtagcagcagcagtagcagcgcccaccagcaccagcggcgccccggccgattggacgcgaaccagaaacagacacgacggcgtgtccatcgaccgatctcctcgcgccaatggcagacacgctggccctgcccaccaggccaccaccaccaccacc

SEQ ID NO: 99218 - DNA, 246 bp, Zea Mays
atgacatccttctccaagctagctaccctcggagggtacctcccgaagtctgacagcacgaacacggcggggtgcagcaccgcccgggcgtgcagcaagctgttggggtggtgcgcgacgatgacgtggtcggcaccaccgtacctcctccactccggccgcgccgcgaggtaccgcaccagcttctcctggaggaccctgtccctgctgaccttctcgggcggcacgggccggtagtggcgattg

SEQ ID NO: 99219 - DNA, 5180 bp, Zea Mays
gattaggtatgtctcttgtcttatccgccacacacgacacgacacgcgccggccacagaaacagcgcttcactcccctccgcgccgcggcgaccatggagctcgccaccgtcgccgctgcagtcgcctccgccgctgcgcgcccgcacgggcctttctcctctccccgcgcagtctctgcctccgtctcgtggaccagtctctcgctcgcctacacctcccgctgtctctcctccacgtcctcgcgacggcggctgcgctggctccccgtcacctcggccgccgtggagctccgcgaggccactgccgggggcggagactcgctccgtgtcaccaagacgccgcagcctggatccagtgttaagttcagcgtggaggtgcctacttccatcattcacgagtgctaccaatccacgctacaggagtacgccaaacgtgttaaggttcctggatttcggcctgggaagaccattccagaaaacgttcttataaactatgtaggaccgcaacatgtacaggatgccacgattgaagctatcttaaaacatacgcttcctcaagcactgtcctcggtagaggagagggcattagaagattctgttcgcattctgactcaatttgatgatatgagaaattctttctcactcgacaatgtgtttagatatgatgttgctgtggatgttgcccctgaagtccgatggttatctgaagacaaatataggaacctcaaagttgtcgttgaaatagatgaagctgttgatgcggaaaaggcggcagagaaagagcttcagcgtcgtcataaagctctaggcttacttagaattgtggctgacagaggcctccagattggtgatctggtggtgctggatatatttgcggaaagcattaacaatgatggctctagaggtgaaaaaatttcatcggctgagagtacaggtttccacttggacactgaggaaaatagtaaccttgttcctggatttcttggttcgttgattgggattcgtgctggtgagactagatcatttcctatccagttccccgagtcatttgagcgagaaagtctacgaggtgtccgtgcacagtttactgttgtgtgtaaagagctgttctacagagagttgccagtaatggatgactcacttgctgtaaagcttcttccaggatgcactacaatagacgaggttcgagagcgtattttgaaaagatgtaaagaagtggagaagacggccatagaacaagcaacagacaacgcgatccttgaccagctcgggaagttggtcgaggtcgacgtccctcgtgccttgtttcaagagcaagggcagcagctttatggagccaagcttctgcagcttcaggcggaaaggaagctggataaagaccagctagcttcgttatcaaccaagaggtcagtgcaggcgtacctagaagatgagaaggagaacattacaagaatcattaaacagatgctggccgttggcgatattttcaaatccgagaacttacagtactcgactgatcagctcgtcaaggaagttgagaactccatagcggagttcaaacagtacaaccaagactatgatgaggacaacatcaggcagcaggtccaggatgtcctagaggcggcgaaggtgcttgaatggctcaaggagaactgctcggtcgagtatatcaggcgatgagtcccacgatgctgggtcaaggaaagctcctctgaacgtgagaaagatggtggctggtgtggcggtcggcagttttgcgagtggccttggtccttgccaatgccaaccagcctagagcagtgcagtgattaagaggtgtggctaacaaacatttgtctattgactcggttcatgatataaattcggatttggagctttagtaactagcatgttttcggtagagacaatcacatcgcattagagggcgtgtttgtttgtgtttataatctccccagattatataatccaacatatttatattttgaactttataaattcatactgtggccgattggtcgatcttgcgcaaggataatcatggaattaagaacgctatacgaagtgcataaatataaaataccaatcggtgtatactataagctaaatttgaggcaccagtattgcacttaaataggataaacataaactaaaataaaataaaataaaataaagcctgagaagcctacgaatcgccaaccatgttattatcagagttctgtaaagtcgtagctaaacggagccacgacagcggtccggcaggcgctggcgctcagcggtaggacttctggaacctggcgcgggcgccgcggccgccgaacttcttgggctcgcagcggcgggggtcggcgacgaggagggtgcgctcgtagcgcatgaagatgtccttgatctcctttttcgccgcctcgtcgacgtacttctggtagtatgccacgagacccttggcgacggcctggcggatggcgtagatctgcgacgtcttcccgccgccgcgcacgcggatccgcatgtcgatgtccttgaacctggaccgccccgccagcagcacgggctccatggccttgagccgcagcatctcgggacggagcagctcgatcgggacgccgttcaccttgatcatccctcggcctggcttcgtgtaggccacggccacggccgtcttcttgcgcccgaaacactgcactgtgcccggggtcgggcgcttcagcacgggacccatggttgcgggtatagcagcaatggaggcggcggcggcggctagggctgcgaaggtgaaggtggcggcgcgctagggctgcggtggcttggaaacgttgctgcggtggaggcttttatagtacggatggatggaagcggtttccgggatcgccggcgccgacgaatgacttgttgggccgggccttagaaggaaggaaacccggtggctggtgaggcccaggtattcgttgtgataaaatggccactggtcaagggcggagaagctagggtttcggccctcacgaacactacttgatcttatccgagcgcgccgtccggcagcaccgcgggcggcggccggagtcgcctccccgtgcccgcgttgcccccgccggcctgcaagggttggtgggttggtggcgcggttcgtcgggaagaggcggcgcttgcgcccgcggtcgctgccggcgacgagcgatgacgactgcccgcggtcggagcgcgcgcgatgatggccgcgcgggttccccaaacacactacacgagatacttcgcgatgttcttttcctttgacatgttcttttcctttgacatgttcttttttcgaaaaatttgaagtattctttattaaaaaaaaaggctttttatgtgtgtttaatcccgcttgtcttctgtttgtgcttagtcgttctattagtgtggtttgattttgtatcacgctcgtcattgacaaagtgattccgttccggaatgatactaacaaagaatgtgccttctactctgttaccacgggtggtcttgggtccttacccttcagatgttcttgttaacggttcttctctcttcgtccagcacattgaactttatagtacacttagtatcattacattggtccttttaggatggagggtgaactattagagttattattaagatggtggatgttagctacgctttcatggtggatgtttactatgttttgtcatgtaaacaactgcatgtctttaaatttgtctatcagtataaatagtcactgcacatgcttaataaggttagattacaacatctggtgcagtcctctccatatctgatatttttctgttgcatcgatagccctcatggttattaaaaaatgtacttgtttgccatgtatgttgctcaatatatgatttgtgactcaccttgcttgacaagttggtatgattaagcgttttttggatcatgagggtgagatgataaacaacctttggtccacataattggattagtgaggtggaagcttcggatatagcggtgggctttacggttgccctaatagtgaacaggtccagcacatttactaccatatttttcccttcgtaatctaatcactaaggaggatcgaaattttttcatgcatagctttggttccctctcaactgattattcacttcaactgttttttaaattcgttaagatggaatgaaattgcttatttaaccacctatgctgccaatttgtccattagggtttcagtttatcctgacatttcatatatttgggacttttaagttgcccctatggctttttgctgtgcctgtgggatgaacatgtcccaacatttactccatttattcactttgtcagctaatagccatacatgttttatgtttagctgatcattaagaatgggaaatttacactttccatactgtgttatacatgttatgtttgcctgcttgaacaccccttgttttgaggtatcgtttgggagcaaaataggtgttctggtggcaacagcagtgccggtgagatgagcttttgtcccagtttaccaccaagtgtgtcacttggttgttagtgtcctatgggttctttgtagccttctgttttcctactttgtatcttgaatgtgatttcatggtcgctggttttttatcaagaggagctgggttcaatcgccacttagatcagtgttttttgtgattctctaatgcaacaacagcaaccttgtgcttggctaaagctacaataaggataatattctgaacttatttgccctggtgatgttgtaggtttacagaagagagaaattctggcagatccaattgctgttgccgtcattctgatacaacctgacttgatgactctcaatgaagctgaatgctgaaaggtgttgctgccttgcagaatgaagctttgagttcaatacatggaattcatatttggtggtggtgttttggaacttgtttatctgctaggtgttgctgccttgcagaatgaagccgtccacattgtccttgtttatctgcaagatgcatgcctgctctatttcttgctcttcagtcttgactgatgcctactgcctgagtgcagattcagtgtgatagttagattctgctgatgtgttaacatgttcattgtaaacaaatttcttgttaaacatgtgtgatctcttcaagaccatgtgtctttgacctaatatattgcgaaacattcttca

SEQ ID NO: 99220 - DNA, 2100 bp, Zea Mays
gattaggtatgtctcttgtcttatccgccacacacgacacgacacgcgccggccacagaaacagcgcttcactcccctccgcgccgcggcgaccatggagctcgccaccgtcgccgctgcagtcgcctccgccgctgcgcgcccgcacgggcctttctcctctccccgcgcagtctctgcctccgtctcgtggaccagtctctcgctcgcctacacctcccgctgtctctcctccacgtcctcgcgacggcggctgcgctggctccccgtcacctcggccgccgtggagctccgcgaggccactgccgggggcggagactcgctccgtgtcaccaagacgccgcagcctggatccagtgttaagttcagcgtggaggtgcctacttccatcattcacgagtgctaccaatccacgctacaggagtacgccaaacgtgttaaggttcctggatttcggcctgggaagaccattccagaaaacgttcttataaactatgtaggaccgcaacatgtacaggatgccacgattgaagctatcttaaaacatacgcttcctcaagcactgtcctcgaggagagggcattagaagattctgttcgcattctgactcaatttgatgatatgagaaattctttctcactcgacaatgtgtttagatatgatgttgctgtggatgttgcccctgaagtccgatggttatctgaagacaaatataggaacctcaaagttgtcgttgaaatagatgaagctgttgatgcggaaaaggcggcagagaaagagcttcagcgtcgtcataaagctctaggcttacttagaattgtggctgacagaggcctccagattggtgatctggtggtgctggatatatttgcggaaagcattaacaatgatggctctagaggtgaaaaaatttcatcggctgagagtacaggtttccacttggacactgaggaaaatagtaaccttgttcctggatttcttggttcgttgattgggattcgtgctggtgagactagatcatttcctatccagttccccgagtcatttgagcgagaaagtctacgaggtgtccgtgcacagtttactgttgtgtgtaaagagctgttctacagagagttgccagtaatggatgactcacttgctgtaaagcttcttccaggatgcactacaatagacgaggtttgtgttctgttcctgtagtaacttactctcagccttcttggccatgtgccagtaaacctgtctctcttttttttggaagttagtgccgtctgatcctagtgcatctattcaattattatctgtaaactgtgaacagcagagaatcgttggctaattatctttcctgtcttagtgatcagcccttctgactatcgcaggttcgagagcgtattttgaaaagatgtaaagaagtggagaagacggccatagaacaagcaacagacaacgcgatccttgaccagctcgggaagttggtcgaggtcgacgtccctcgtgccttgtttcaagagcaagggcagcagctttatggagccaagcttctgcagcttcaggcggaaaggaagctggataaagaccagctagcttcgttatcaaccaagaggtcagtgcaggcgtacctagaagatgagaaggagaacattacaagaatcattaaacagatgctggccgttggcgatattttcaaatccgagaacttacagtactcgactgatcagctcgtcaaggaagttgagaactccatagcggagttcaaacagtacaaccaagactatgatgaggacaacatcaggcagcaggtccaggatgtcctagaggcggcgaaggtgcttgaatggctcaaggagaactgctcggtcgagtatatcaggcgatgagtcccacgatgctgggtcaaggaaagctcctctgaacgtgagaaagatggtggctggtgtggcggtcggcagttttgcgagtggccttggtccttgccaatgccaaccagcctagagcagtgcagtgattaagaggtgtggctaacaaacatttgtctattgactcggttcatgatataaattcggatttggagctttagtaactagcatgttttcggtagag

SEQ ID NO: 99221 - DNA, 1824 bp, Zea Mays
aaaaatttcaatgcctctctagatctttcaagctatccttgcttcctagctccctttggcgtgctgtaccggacgacaggggtaggtaggtaggtaggtgtagctagctcggcgagcgagggagcaatccggccaacagcacacgcgtcgatcgccatgccgagaagcggcggcggcggcaatggcggtggcattagtagtagtagtagggtgatgcccaacctcccggccgggttccgcttccaccccacggacgaggagctcatggtgcactacctcatgaggcaggccgcctccatgccgtgccccgtccccatcatcgccgaggtcaacatctaccagtgcaacccctgggatctccctgccaaggcattgttcggcgacaaggagtggtttttcttcagcccccgggaccgcaagtaccccaacggcgcccgccccaaccgcgccgccgggtccgggtactggaaggccaccggcaccgacaaggccatcctgtcgtcgtccacgcccacgagccacggcggcgccaacatcgtcgtcggcgtcaagaaggcgctcgtcttctacggcggcaggccgcccaagggcaccaagacggactggatcatgcacgagtaccgcctctcgggcgcggcggacgacgactgcaagggcagcaccaggcgcagagtgtcttcctcctcgtcgtcctccatgaggctggacgactgggtgctgtgcaggatccacaagaagagcaacgatttccagttgtcgtcgtcgtcggagcatgagcacgagcaggaggagccggcggcgggcggctcagcgacgactgtggaggaactagacgctctcgtcgtcgtcgacaacagcagcagcagcgacaccaccaccaccaccatcaccaccaacgacaacaactctactgaaacagctgcgactcatcacgatcctcagacgatgatgatgctgagcaagtcgtgctcgctcaccgacctcctcgacagcatcgactacgcggcgctctcctcgcagatgctcctcctcgacgcgccccacccccacgctgatgacccgccgccacacatggtctactacccaccggcggcgtcggcgacgcaccagcaagcaataatagctaataacaccaacagtaatgacgactactatgacgacgacaacttgttgccgactgctgctgctactgcggtagacgcggcggcggcggcggtgctactcagctcgtcgcctgcagacaccaacggtgtgaacaagaggaagcgagtgacggccgtggactactacggcgccgctgaaccgccgaccttcttccaccaccacctcgatgatggcggcaacagcttcttcagtacgaccaagaagctcaagccgccgccgccaagtgattcgaggcatggcggccatttcggcaccgccacagcgagcagctaccgcgacagccagcagctcgtggacagcgcgagcagcagcggcgtcttcttccatcagtatgggtacggctacagcagcagcaacccgttcttgaacttgaaccagcagcagcagctgctactcaacagccacatcgggatgcagtagagctcgagagatcgagagagagagagagagagagatgatatatcattggaaggatcagcacgcgtacgtgcagattaattgcagcgagttctatcttgtttgctttcattattatatactccgtatgtgtcgttcatgtaaaattagtttaaattgtaaattagtgtgctgaaattcatgtgcctgctctctgctcatcaatgaatggatgatgacgacccatgcacgttgcttgtgtgg

SEQ ID NO: 99222 - DNA, 1170 bp, Zea Mays
ttttttaattgcacttgcttgcacggctccagacctgactgaagcgtttcgcatggtttcagctggacgactgggtgctgtgcaggatccacaagaagagcaacgatttccagttgtcgtcgtcgtcggagcatgagcacgagcaggaggagccggcggcgggcggctcagcgacgactgtggaggaactagacgctctcgtcgtcgtcgacaacagcagcagcagcgacaccaccaccaccaccatcaccaccaacgacaacaactctactgaaacagctgcgactcatcacgatcctcagacgatgatgatgctgagcaagtcgtgctcgctcaccgacctcctcgacagcatcgactacgcggcgctctcctcgcagatgctcctcctcgacgcgccccacccccacgctgatgacccgccgccacacatggtctactacccaccggcggcgtcggcgacgcaccagcaagcaataatagctaataacaccaacagtaatgacgactactatgacgacgacaacttgttgccgactgctgctgctactgcggtagacgcggcggcggcggcggtgctactcagctcgtcgcctgcagacaccaacggtgtgaacaagaggaagcgagtgacggccgtggactactacggcgccgctgaaccgccgaccttcttccaccaccacctcgatgatggcggcaacagcttcttcagtacgaccaagaagctcaagccgccgccgccaagtgattcgaggcatggcggccatttcggcaccgccacagcgagcagctaccgcgacagccagcagctcgtggacagcgcgagcagcagcggcgtcttcttccatcagtatgggtacggctacagcagcagcaacccgttcttgaacttgaaccagcagcagcagctgctactcaacagccacatcgggatgcagtagagctcgagagatcgagagagagagagagagagagatgatatatcattggaaggatcagcacgcgtacgtgcagattaattgcagcgagttctatcttgtttgctttcattattatatactccgtatgtgtcgttcatgtaaaattagtttaaattgtaaattagtgtgctgaaattcatgtgcctgctctctgctcatcaatgaatggatgatgacgacccatgca

SEQ ID NO: 99223 - DNA, 590 bp, Zea Mays
tttgtggcacttgcgaactctcatttcttgcaagcactcttttttgtgaaatgcttattgatttgaaggtgctttcagatcatgttttcttcaacactacaatgaactacgtcgaggagaattgtgctccagcagtttatacaccagaattaagatacgtgtgcattgctggaaggtacattcaaggtgctcctcttctggggaactccgcagctgcttctgatgagatcctcacagttgacactccttcagaaggaggcgatgctgttattgtcagtagcagtgacaattctacatctactccatcagctgtctcgtggcgagcccggttcattgggcaaggttacaagcaggtttgtgggcgagcagatgtgtggggtgacgacgttgttcctgagatggcagctcatctggactacttatctattaatttcttgagaattaaagcaggaggtcttgaatatttgtccttaacagtttatattgtcagttttacaagagtagatatctcattacagatatctcattacactggttgttgttcttggatttgaaatttctgttagagttgttgtctggaaatgataaga

SEQ ID NO: 99224 - DNA, 1666 bp, Zea Mays
cacatggctgtagcctgtagcctgctgtgaggtcgttcattcccatgtagtagtagtaagaacctcccacatgaggccatgagcgacaagtttaaaaggccagcaccagcaggggggtagctagcagaagaagctacgcagacaaggcggctagcgtacgtacgtagcaatggcagcgcggcctgtggcagcaacagtgctcctgctgtccctgcaactggcgtggtggtcctcgtcgtaccccggcgtgcaggtccttgccgacgccgccgtgctcggtcggaaggcggggggcctcctcctcgccatgcgcgacggcaacgacgacgacaacgacaacgacaacgacaaacccgtgatcaatgcggagagcagtgtcaatgcggcggcggctgggccggggaggtacgccgtgatcttcgacgccggcagcacggggacccggatgcacgtcttcaggttcgacaaccacatggacctggtcgggatcggccacggcatcgagttcttcgccaaggtgaagcctgggctgagctcatacgctggtgaaccccaggaagccgccaactccatactacctctcctcaagaaggccaagagggtcgtcccttccgagctaatcgagaaaacccctcttaagctaggagcaactgctgggctgagactcatcggagacgaacaggcggacaagattcttgaagcggtcagggatctcgtgcacaccaaatccaagacgcagttccagtacaaccctgactggatcaacgtgatcgaagggtaccaggaagggtcatacctatgggttgccctgaactacctgctggacaagctgggagtgggggactactcgcagacggtgggggtggtggacatgggaggcgggtccctgcagatggcctacgccatctccgcaaaagacgccgccaaggctcctaaagcgccggacgccgacgaccgctacgttacgagggagtatctcaaaggaaaagactacaacatctatgctcacagctacttgcactacggcgcttttgcagctcgagtgaagattctggacgcgaagaagtatgggcagttcagttcctgcatgctgcgtggattcaaaggtaactacacatacaatgggcagcagcacgacgcgacggcttcgcctgaaggagcagtgtatggaaaatgcagggaggaggtagctaaggcactaaacctgagtgccccatgcgtcattagctgctgcggctgctgcaccttcaatggcgtgtggagcgggggcggtgggcctggcctcgacaccctctaccttgcatcaagcttccactttctagccgcacaggttgggatgatagacgggaaactccccagtgcaaagtcgaccccttctgcgttccgagtcgcagcgaagaaggcctgccagatgagcgtcgaggaagccaaggctgcgtaccccggtgtccaggacatccacgtgccgtacctgtgcatggatctcacttaccagtacacgctgctcgtcgacggtttcggactcaagtcgatcaagaaggtcacgctggtctccaaggtgaagcatggagagtactacgtccaggctgcgtggcctttgggcaccgctatcgaggcattgtcacccaaaatgggacaccggcaccgcgcgcatggcttcgaatga

SEQ ID NO: 99225 - DNA, 333 bp, Zea Mays
atggtcggcgcgcgctgcggcggcgaaggcgtggaggatgtggtcggggccgaagacgaggcggatgagctccttgtcgctgttgtcctagatgagcagcaggcccatgatcttggacgcgttgtccgggtccagcgcccgcacccggtcgaacaccgccttggtggcctcccaggcgtccatggcgtcgcggcgggagcgggagaaaaacgaccccttcttttatcagggggtggtgtggtgggtttccttctccccttgatttttctgcttgagagcagcacggaacgggagggagtgggggacgggacgagacggcctacccctgcctga

SEQ ID NO: 99226 - DNA, 1327 bp, Zea Mays
gaaggccaacaacgcgtcggttgccacaacagtcgcaaagcagcgcggaccgccaccacctccggctgggcccatggtcccggtcgagcagcggcagcaccacgcgtcgcaccgccgcacctcccgtcggtcaaccctggcagcagtcgctgcaacgcaccagatccgttggcacacacaccaccgcaaacgccgttggggccactgcagcccacatgtcgacgccacacaccgccactgaggagccagatcctccgctcctcaccgtcgcacggctgacgccccgcccacagcagtagacaaggccgtgaggggaggggtggcaaagaagagagcgccgcgccacagcgcctgcacaagccccaaaccgccatcgacgcaaccgtcactagccgccagcgccagttgctgagggcagatccggcccacacgccacaaacccaacaccacgaggagcatgcccgtcggccggctccagacccaccacgccgtgcgtccgccgctgaaacggcgcagccccgccaccaccagcagatgctgccaatccatcacctggctgcacctgcaggaccagatgttgaaccgccaagcacagccccccgacgacgccggggacaaggaagacgacggcgcgggggacggtgcccgccccggcaaccccgcgactggaacttgaaccgcccgatctgagcaccgggagagcaaacgaaggagaaatgcgggagaaacgccctgccgccgccatccttggagatcgcgccggccttcggcagtctcctccggcgacaacgaggggggaatagaggagagagtggcggcgctagggctggggggcctcccgtgtcgcccgagcggaggacgacgcgggggccgtcagaaatgataagggagccttatggactaattagaaatcacggaatgaggctgtctacaacagattttttttttcaatcacccatgactattgtttacatgtgctgttgaagaccgggacctgctcctcaaggccaagctggtggatgatgcggagtcaaagatgaccaagactgcaagggtccctatcgatcactagcctggggcctgcataggactagaatttctacggtgttgattgggaccctatgtgatcattgaaccagttggctattctcttttgtcgcggtgttgcttagctgtactgtcgagtggttggtcgaggtatagtttgtttgcctcgtcgttgtaaaataattagttctgaatatgcttctttgtaagctggtatcccagcctcggatcattggcattcagtaatgtttctaataaatctgggtgaaagcctttgatc

SEQ ID NO: 99227 - DNA, 638 bp, Zea Mays
atggcggcagctctgaaagatgcattcgtaaggaagtctgtgctggcaacgatccgcctcgtcctaccagccggcgcagcccgcacgggaccggcctccagtgagcccagcgctgggcccctaccgggtgaacctgatggcgctctgcaaggagatcaacgccaggacgcagaggtacaagcccgacaccccgatacgggtcaccgtgaccgtctacagggacagcaccttccagctcgtggtgaagccgccctcggtgtcgtggctcctcaagaaggccgccgggatccagaccgccagccggttccccggccacgtcaccgccgcgtccctcaccgtccgccacgtgtacgagatcgcgaggctgaagctgggtgacgacccctcctgcaagtacgcgtcgcttgaggccatgtgcaagtccgtcgtcgccacggcccgctccatggggatcgccatcgtcagagatctgtgatcgatcgagcagcgcgtttgtctagttggtgctgtaacggctaatagtgttagtgtctcttctttaaaaaaatcagccatggcaggggcaggcgcggtggccttcatagccacagtctggcggcgatgggaaacaattgtttaagatatggtatatactgcaa

SEQ ID NO: 99228 - DNA, 432 bp, Zea Mays
atggcggcagctctgaaagatgcattcccggcgcagcccgcacgggaccggcctccagtgagcccagcgctgggcccctaccgggtgaacctgatggcgctctgcaaggagatcaacgccaggacgcagaggtacaagcccgacaccccgatacgggtcaccgtgaccgtctacagggacagcaccttccagctcgtggtgaagccgccctcggtgtcgtggctcctcaagaaggccgccgggatccagaccgccagccggttccccggccacgtcaccgccgcgtccctcaccgtccgccacgtgtacgagatcgcgaggctgaagctgggtgacgacccctcctgcaagtacgcgtcgcttgaggccatgtgcaagtccgtcgtcgccacggcccgctccatggggatcgccatcgtcagagatctgtga

SEQ ID NO: 99229 - DNA, 2065 bp, Zea Mays
tctcttttttttaatcctgctcactcccctaactgtatccagtgcctgccattcagaatttatttttcaaaagacacttttacttcgatacaaacgaagttcgcggcctccatgcccaccctaccacctttgatctgatccactctggcaccttttgactgcattgcgctcgccgcgatccgatcctagttcctaacccatggaaatgccgtttctcgtgaaccagatgatggatctcgccgacccccagcagcagcagcggctcatcgccggcgcggcgctgctgctggcaaccgcggccttcctcaggctcctcctgggctcccgctccgggggcggcaagcgcctgccgcccaccatcccgggggcgccggtggtcggcggcctcgtcaagttcatgcgcgggcccatccccatgatccgggagcagtacgcccgcctcggcagcgtcttcaccgtccccatcatcacccgaaggatcacgttcctcgtcggtcccgaggtgtccgcgcacttcttcaagggcaacgaggccgagatgagccagcaggaggtgtacaggttcaacgtgcccaccttcggccccggggtcgtcttcgacgtcgactactccgtcaggcaggagcagttcaggttctttaccgaggcgctccgggcgaacaagctgcgcagctatgtcgaccagatggttgctgaggctgaggagtacttctcaaaatggggagaaagtggcactgttgatttgaagtatgagttggagcacctcatcatactgacagctagccggtgcttgctgggaagggaggtgcgagaaaagctgttcgacgatgtttctgctctcttccacgaccttgacaacgggatgcagccaatcagtgtcctcttcccatacctcccaatccctgcacataagcgccgcgacagggcacgtgcacgtctggcagaaatctttgccaccatcatcaagtcccgcaaggcctctggacagtctgaagaagacatgctgcagtgcttcattgattccaagtacaagaatgggcgttccaccagtgagggcgaggtaaccgggctacttatcgcagcactctttgctgggcagcacaccagctctatcacctcaacctggactggagcatacatgcttcggttcaagcagtacttcgcagaggctgtagaggagcagaaggatgtcatgaaacggcacggcgacaagattgatcatgacatcctcgcggagatggacgtcctctaccggtgcatcaaggaggccctccgtctccacccgccgctaatcatgttgcttcgtcaatcgcacagcgacttcaccgtgacaacaaaggaaggcaaagtgtatgacatccccaagggccacatcgtcgcgacatcaccatccttcgccaacaggctgccccacatctacaagaaccctgactcatatgaccctgaccggttcggtcccggaagggaggaggacaaggctgcaggtgccttctcgtacatctccttcggtggtggcaggcatgggtgcctcggtgagcccttcgcctaccttcagatcaaggcgatctggacgcacctactgaggaactttgagttcgagctggtatcgccgttcccagagaacgactggaacgccatggtggttggcatcaagggcgaggtgatggttaactacaagaggcggaagcttgtcgtggacaactaagattgtggtcgccagtctctatctcttagatgcttgcttgcttctttttgattcgattgctttcacctgtttgtcagcatttgttaagttctgctgcacacacgccagctttgtaggggtgtttctgttgtttaggattctgtaatttgcttcgccatgggggtctgccatgatatgcaacatccgcttgttagctagcttcctagctcagcattccccttagtcaaatctgtaacctgtagcatctacaagcgtgtggctttattgttgaaatcctgatgtttatcgttctctataaacacaaaactgaacaaataacctcgctgcaatgaataaactcaggtgttcagtgtgaatctg

SEQ ID NO: 99230 - DNA, 2060 bp, Zea Mays
ccctcctctctctcttcgccgcccctgtttccgccgccccctgtaaacctcccatccgccattgctaatccagccactcctccccaaaccacgggatctatcctactccctcctccattcggcagtgccgcgtggcacacctatatataaacacccggactccacactcccccggcatcgccgccccccgtcccgacgaattggaatacggaaagcgaaagatgatggatctcgccgacccccagcagcagcagcggctcatcgccggcgcggcgctgctgctggcaaccgcggccttcctcaggctcctcctgggctcccgctccgggggcggcaagcgcctgccgcccaccatcccgggggcgccggtggtcggcggcctcgtcaagttcatgcgcgggcccatccccatgatccgggagcagtacgcccgcctcggcagcgtcttcaccgtccccatcatcacccgaaggatcacgttcctcgtcggtcccgaggtgtccgcgcacttcttcaagggcaacgaggccgagatgagccagcaggaggtgtacaggttcaacgtgcccaccttcggccccggggtcgtcttcgacgtcgactactccgtcaggcaggagcagttcaggttctttaccgaggcgctccgggcgaacaagctgcgcagctatgtcgaccagatggttgctgaggctgaggagtacttctcaaaatggggagaaagtggcactgttgatttgaagtatgagttggagcacctcatcatactgacagctagccggtgcttgctgggaagggaggtgcgagaaaagctgttcgacgatgtttctgctctcttccacgaccttgacaacgggatgcagccaatcagtgtcctcttcccatacctcccaatccctgcacataagcgccgcgacagggcacgtgcacgtctggcagaaatctttgccaccatcatcaagtcccgcaaggcctctggacagtctgaagaagacatgctgcagtgcttcattgattccaagtacaagaatgggcgttccaccagtgagggcgaggtaaccgggctacttatcgcagcactctttgctgggcagcacaccagctctatcacctcaacctggactggagcatacatgcttcggttcaagcagtacttcgcagaggctgtagaggagcagaaggatgtcatgaaacggcacggcgacaagattgatcatgacatcctcgcggagatggacgtcctctaccggtgcatcaaggaggccctccgtctccacccgccgctaatcatgttgcttcgtcaatcgcacagcgacttcaccgtgacaacaaaggaaggcaaagtgtatgacatccccaagggccacatcgtcgcgacatcaccatccttcgccaacaggctgccccacatctacaagaaccctgactcatatgaccctgaccggttcggtcccggaagggaggaggacaaggctgcaggtgccttctcgtacatctccttcggtggtggcaggcatgggtgcctcggtgagcccttcgcctaccttcagatcaaggcgatctggacgcacctactgaggaactttgagttcgagctggtatcgccgttcccagagaacgactggaacgccatggtggttggcatcaagggcgaggtgatggttaactacaagaggcggaagcttgtcgtggacaactaagattgtggtcgccagtctctatctcttagatgcttgcttgcttctttttgattcgattgctttcacctgtttgtcagcatttgttaagttctgctgcacacacgccagctttgtaggggtgtttctgttgtttaggattctgtaatttgcttcgccatgggggtctgccatgatatgcaacatccgcttgttagctagcttcctagctcagcattccccttagtcaaatctgtaacctgtagcatctacaagcgtgtggctttattgttgaaatcctgatgtttatcgttctctataaacacaaaactgaacaaataacctcgctgcaatgaataaactcaggtgttcagtgtgaatctg

SEQ ID NO: 99231 - DNA, 1411 bp, Zea Mays
aacatccagccagcagcacacgcacactgttctttcgacttccatctcggccggagcagaagatggaggtggctctgggaacggccaagtctctccttggccatgttctcaataatctccccgacgactggatgaaatcctacgtgtccagcgccgagctcggcaccaaccttaacatgatcaaagagaagatgcggtacgctagagcgctgctggacgtggccaaggggagggacgacgtcgtcgccgggaaccccaacctgctggagcagctcgagactctcggcaagaaggccgacgaggctgaggatgctgtggacgagcttcactacttcatgatccaggacaaacacgacgggactcgagacgccgcaccggagttgggcggtggcctcgcagcccaagctcaccatgcccgccatgctgctcgccacactgctggtaactggctctcatgcttctctggctgctgtccccgaccccgagacgatgctgctgctaccgatgccatgtctggtgacggtggccatgttggaaagttgtcatttaatcgagtggctatgtccaacaaaatcaagctcctcatagaggagctgcaatccaactctactcctgtctctgacttgctcaagatagtgtcagacactagtaaccctcaagacagtagctcctccactaaaaggtccccgacaagctctcaaatcacacaagacaagttgtttgggagggacgccatctttcagaaaactatagaggatattatcatagccaaagatagtggcaaaaccttgtccgttcttcctatatttggcctagggggcattgggaagactaccttcacccagcacctatacaatcacacagagtttgaaaaacatttcactgttagggtctggatatgtgtatcgactaattttgatgtgcttaggctcaccaaagagatcctgagctgcctacccgcaactgaaaatgcaggagataaaatagcaaatgacacaaccaactttgacctgcttcagaaatccatcgcagagaggttgaaatccaaaaggtttctgattgtcttggatgacatatgggaatgcagcaataatgaggagtgggagaaactagtagctccattcaaaaagaatgataccactggcaacatgattcttgtcacaacccgattccagaaaattgcagatttggtgaaaaaagaaactaacccagttgaccttcacggtttggatcctgatgagttctggaaattcttccagatatgtgcatttggtagtattcaagatgttgagcatggtgatcaagagttaattggtattgcaagacaaatagcagataagctaaaatgctccccacttgcagccaaaacagttggtcggctattgattaagaaaccccttcaggaacattg

SEQ ID NO: 99232 - DNA, 887 bp, Zea Mays
atcaatccctaatctcggcggatggctccttccttccccgcgctcgctcccacggcgaccgagctccaaaacaacgccgccgccagatccgcccgccaccggccgtcctcagctcatgccggctgcaccaagccagatccaaccccgcaccctcctccagcaccaccagctcgccctcctgtgtcccagctcccatcgccaccgcccccaccaccaccgccggcccgcccttccgacccagctgtaagccgtgcgccggcggccccccgccctaccaagagggtgaggtttgcattcactacaagcaccatgccgccccgcattcaccacccctcccccgtatcccgcagccataatgccacccccgccccgatagctggtttgaagcccccctggaagctacgaccgcattgaagatgaggatcttgaaggatggacgacgattcggtgcaggcgtggacgcgtcacccgcgtaggcctaggccgcgccccagcggcgcctcgcctgctctcagctcaagcccctagccgtcttatggtaagtctacgtgcatatgagatcactaattgagcatatgtatcatgctttagggcatctagtattataaagtggaatccaacaatgagcagccagccattcatgacttgccacaacaagaacgaactaagggggtgtttgaatgcactaaaacttagttagctaaaaattgctagtggaattagctagctaacaaatagctacctaactattaattaatttaccaaaaacacttaatagctaaactattagctaggttgtttgaatgtctcaactaattttagtcactaactattagctttagtgcattcaaacacccctaagtaatataaggacatggtgtttaatg

SEQ ID NO: 99233 - DNA, 153 bp, Zea Mays
atggcgtttggtttgcgtcgcaaaaccgagtcgtctatcgtgaagtcattcctcgtagtaccccaggtgaccaatgaaaagattaagggccctttgagttgctcgatatcctctttcgccctagaggccacttgcgctggtgtgcggacttag

SEQ ID NO: 99234 - DNA, 897 bp, Zea Mays
atggatggctatagctcgatgtcacctgggtacttcactaacctactgaaccgagagcatgacgatgtttttatccttgaggaaaacatgagaactgaaaatgaagttatcgagtacccaccagtgaacgaattgatctcacagtcaaaaccaaagggtcgttccaagaatttcaatgaagctgaagatatattgttgatttcagcatatcttaatataagtaaagatgctgttgttggaaaggatcaaaaggatggtagattttgggaaagagttgaaaaatactttcatgacaataagacgtttgattcggatcgcaattggtcgtccttgaagcatcgatggagtagtactattcataaagaaatgagtatgtttcaaggttttgtagatgccatagaaaggaagaatggaagtggcaagacaatgagtgataagctggcagaagctagtacaatgttccaggaacttaaaggaaagacattttcactcttccatgcatggaatattcttaagaatgagccaaagtgggcagaagagaagatagcaaaggaagacaatggcaacggggaaaatcatccgaattcagaaagacctctaggaaggaaagctgaaaaggaaaaggctaaaggaaaaaaccgtagtgaggaagaacctgatcctttcattgaggaagtcaaaaaaatgagagaaacaagagagaaaattgagacagaacgaaaggaacgtgatgacaagtttatcgagcttgacacaaaaaaactcaacttggagcaagaccagcatgataaggtgataatgacaatggacataagttcaatggatgaccaagcaaagcagtactttaggctgctgaaagatgagattttagctcgccgttttgggagtcagcactag

SEQ ID NO: 99235 - DNA, 3897 bp, Zea Mays
atggccgacttggcgctcgccggcttaaggtgggcagcatcgccgattgtcaacgagcttcttactaaagcttcagcttacctcagtgtggacatggtgcgtgagatccaacgactagaagccactgtcctgccacagttcgagctggtgattcaagcggcccagaagagcccccacaggggcatactggaggcatggctccggcgtctcaaagaagcctactatgatgccgaggacttgttggacgagcatgagtacaatgtccttgagggcaaggccaagagcgaaaaaagtctcctgctgggagagcatggaagctcctccactgcaactactgtcatgaagccttttcatgctgctatgagcagggcacggaacttgctccctcaaaacagaaggctaattagcaagatgaacgagctcaaagcaatcctgacagaagcccaacaacttcgagatcttcttggtttgccacatggcaataccgtcgagtggccagctgcagcacctaccagtgttcccacaaccacatcacttcccacttccaaggtttttggtcgcgacagggatcgtgatcgtatagtagattttcttctcggcaagacaacaactgctgaggcaagctcagctaagtactcgggtttggccattgttggattgggaggaatggggaagtccaccttagcacagtatgtctataatgacaaaaggatagaagaatgctttgatatcaggatgtgggtgtgcatctcacgcaaacttgatgtgcatcgtcacacaagggagattatagagtctgcaaaaaagggagagtgcccacgtgttgataatctcgatactctccagtgcaaattacgtgatatactacaagagtcacagaaattcctgcttgtcttggatgatgtttggtttgaaaaatctcataatgagacagagtgggagttattccttgctccattagtctctaaacagtcagggagcaaagttttggtgacttctcgaagtaaaacacttcctgccgctatttgttgtgaacaagaacatgtcattcatttgaaaaacatggatgatactgagtttttggctctttttaaacaccatgctttctctggagcagaaatcaaagaccaagtattacgcacgaagctggaagacactgcagtggagattgctaaaaggcttggacaatgtcctttggcagcaaaagttctgggttctcgattgtgcaggaaaaaggatattgctgaatggaaagctgctctaaagattggagatttaagtgatcccttcacatctctgttgtggagttacgagaagttagatccacgtctgcagaggtgcttcttgtattgcagcttgtttccaaaaggtcatagatatgaatctaatgagttggttcacctttgggtggcagaaggatttgttggttcatgcaatttgagtaggagaacgttagaagaggttgggatggattacttcaatgatatggtctctgtatctttcttccaattggtttttcatatctattgtgattcgtactatgtcatgcatgatatccttcatgattttgcagagtcactctctagagaagactgctttagattagaagatgataatgtgacagaaataccatgcactgttcgacatctatctattcatgttcatagtatgcaaaagcataagcaaattatctgcaagctacatcatttacgcactattatctgcatcgatccgctaatggatggcccaagtgatatttttgatggcatgctacggaaccaaagaaaactgcgtgtattgtctctgtcattttacaacagcaaaaatttgccagaatctattggtgagctgaagcacctccggtatttgaacctcatcaggacgttagtttctgaattgcctagatcattatgtactctctaccacttacaattactttggttaaaccacatggtggagaatttgcctgacaaactatgcaatttaagaaagctacgacatctaggagcgtactcatcgtacactcatgatttcgtgaatgaaaagcctatttgccaaattctgaatataggtaagttaacgtcgctacaacacatttatgtcttttctgtacagaagaagcaaggttatgagttgcgacagttgaaggacttgaatgagcttggtggcagtttaagagtgaaaaatcttgagaatgtcattggaaaggatgaagccgtagagtcgaagctatatctgaaaagtcgccttaaagagttggcacttgagtggagttccaataatagaatggatgcaatggatattctagaaggtctgagaccgccaccccaactgagtaagctcacaatcgaaggttacagatctgatacatatcctgggtggttactagagcgatcctattttgagaatttggaaagttttgaacttagtaattgcagtttgctagaaggcctaccaccagatacagagctccttcggaattgctctatgttgtgtataaactttgttccaaatttgaaggaactatctaatcttccagcaagccttgcatatttatcaattgataggtgcccactgcttatgtttatcaccaacaatgagctaggacagcatgactttagggaaaatataataatgaaggcagccgacctggcatctaaacttgcattgatgtgggaggtggattcaggaaaagaatttattaggagtgtactgtcgaaagactattcatctctgaagcagttgatgacattgatgatggatgatgatatatcaaagcatcttcaaattattgaaagtggtctggaggaaagagaagataaagtatggatgaaagaaaacatcatcaaggcatggctcttttgccatgagcagaggataagattcatttacggaaggaccatggagatgccattggttctaccgtcaggactccgtagactttccctttcttcatgcagtattacagatgaagctttagctatttgccttggtggcctcacttcaccgataactgtagaattggaatataatatggcattaactacacttccatctgaagaggtgtttgagcatttgacaaagcttgacagtttgattgtaagaggttgttggtgtctcaaatcactggggggcttacgtgctgctccatctctttcctatcttaactgtttggattgtccttctttagagctagcacgtggagcagaactaatgccattgaaccttgctcgcaatctcagcatccgtggctgcattcttgcagttgattcattcattaatggcttgccacacctgaaacatctttccattgatgtctgcagaagctccccatccttatcgattggccacctgacctcccttcaatcattacatctaaatggtctccctgatctttactttgttgaaggcttgtcttccctgcaccttaagcgcctaagtttagtagatgttgcaaacctcactgccaagtgcatctcacagtttcgtgtccaggaatcgctcacggttagtagctctgtattgctcaaccacatgctaatggctgaagggtttacagccccaccaaatcttactcttttagattgcaaggagccgtcagtttcatttgaagaacctgcaaatctctcatccgtcaagcacctgaagttttcatgttgcgaaacagagtccctgcctagaaatctaaaatccgtctcaagtctggagagtctttctatagaacattgccccaacatagcatctttaccagatctgccgtcctccctccagcgcataactatattgaattgccccgtcttgatgaagaattgccaagaacctgatggagaaagctggccaaagatttcgcacgttcgttggaagagctttctaccaataccgaactggcttccttag

SEQ ID NO: 99236 - DNA, 3885 bp, Zea Mays
atggccgacttggcgctcgccggcttaaggtgggcagcatcgccgattgtcaacgagcttcttactaaagcttcagcttacctcagtgtggacatggtgcgtgagatccaacgactagaagccactgtcctgccacagttcgagctggtgattcaagcggcccagaagagcccccacaggggcatactggaggcatggctccggcgtctcaaagaagcctactatgatgccgaggacttgttggacgagcatgagtacaatgtccttgagggcaacgccaagagcgaaaaaagtctcctgctgggagagcatggaagctcctccactgcaactactgtcatgaagccttttcatgctgctatgagcagggcacggaacttgctccctcaaaacagaaggctaattagcaagatggacgagctcaaagcaatcctgacagaagcccaacaacttcgagatcttcttggtttgccacatggcaataccgtcgagtggccagctgcagcacctaccagtgttcccacaaccacatcacttcccacttccaaggtttttggtcgcgacagggatcgtgatcgtatagtagattttcttctcggcaagacaacaactgctgaggcaagctcagctaagtactcgggtttggccattgttggattgggaggaatggggaagtccaccttagcacagtatgtctataatgacaaaaggatagaagaatgctttgatatcaggatgtgggtgtgcatctcacgcaaacttgatgtgcatcgtcacacaagggagattatagagtctgcaaaaaagggagagtgcccacgtgttgataatctcgatactctccagtgcaaattacgtgatatactacaagagtcacagaaattcctgcttgtcttggatgatgtttggtttgaaaaatctcataatgagacagagtgggagttattccttgctccattagtctctaaacagtcagggaggaaagttttggtgacttctcgaagtaaaacacttcctgccgctatttgttgtgaacaagaacatgtcattcatttgaaaaacatggatgatactgagtttttggctctttttaaacaccatgctttctctggagcagaaatcaaagaccaactattacgcacgaagctggaagacactgcagtggagattgctaaaaggcttggacaatgtcctttggcagcaaaagttctgggttctcgattgtgcaggaaaaaggatattgctgaatggaaagctgctctaaagattggagatttaagtgatcccttcacatctctgttgtggagttacgagaagttagatccacgtctgcagaggtgcttcttgtattgcagcttgtttccaaaaggtcatagatatgatcctaatcagttggttcacctttgggtggcagaaggatttgttggttcatgcaatttgagtaggagaacattggaagaggctgggatggattacttcaatgatatggtctctggatctttcttccaattggtttctcaaatgtattgtgattcgtactatgtcatgcatgatatccttcatgattttgcagagtcactctctagggaagactgctttagattagaagatgataatgtgacagaaataccatgcactgttcgacatctatctgttcatgttcaaagtatgcaaaagcataagcaaattatctgcaagctatatcatttacgcactattatctgcatcgatccgctaatggatggtccaagtgatatttttgatggcatgctacggaaccaaagaaaactgcgtgtattgtctctgtcattttacagcagcagcaagttgccagaatctattggtgagctgaagcacctccggtatttgaacctcatcaggacgttagtttctgaattgcctacatcattatgtactctctaccacttacaattactttggttaaaccacatggtggagaatttgcctgacaaactatgcaatttaagaaagctacgacatctaggagcgtacgtgaatgatttcgcgattgaaaagcctatttgccaaattctgaatataggtaagttaacgtcgctacaacacatttatgtcttttctgtacagaagaagcaaggctatgagttgcgacagttgaaggacttgaatgagcttggtggcagtttaaaagtgaaaaatcttgagaatgtcattggaaaggatgaagccgtagagtcgaagctatatctgaaaagtcgccttaaagagttagcatttgagtggagttccgagaatggcatggatgcaatggatattctagaaggtctgagaccaccaccccaactgagtaagctcacaatcgaaggttacagatctgatacatatcctgggtggttactagagcgatcctattttgagaatttggaaagttttgagcttagtaattgcagtttgctagaaggcctaccaccagacacagagctccttcggaattgctctaggttgcatataaactttgttccaaatttgaaggaactatctaatcttccagcaggccttacagatttatcaattgattggtgcccactgcttatgtttatcaccaacaatgagctaggacattatgacttgagggaaaatataataatgaaggcagacgacctggcatctaaacttgcattgatgtgggaggtggattcaggagaagaagttaggaatgtactgtggaaagactattcatttctgaagcagttgatgacattgatgatggatgatgaaatatcaaagcatcttcaaattattgaaagtggtctggaggaaagtgaagataaagtatggatgaaagaaaacatcatcaaggcatggctcttttgccatgaacagaggataagattcatttatggaaggaccatggagatgccattggttctaccgtcaggactctgtgaactttctctttcttcatgcagtattacagatgaagctttagctatttgccttggtggcctcacttcactgagaactttacgattggaatataatatggcattaactacacttccatcagaaaaggtgtttgagcatttgacaaagcttgacatattggttgtaatgggttgtttgtgtctcaaatcactggggggcttacgtgctgctccatctctttcctctttttactgtttggattgtccttttttagagctagcacgtggagcagaactaatgccgttgaaccttgctgcagacctcaacatcagtggctgcattcttgcagttgattcattcagtaatggcttgccacacctgaaacatctttccatttatgtttgcagaagctccccatccttatcgattggccacctgacctcccttgaatcattacgtctaaatggcctccctgatctttactttgttgaaggcttgtcttccctgcaccttaagcacctaagtttagtagatgttgcaaacctcactgccaagtgcatcttaccgttttgtgtccaggaatcgctcacggttagtagctctgtattgctcaaccacatgctaatggctgaagggtttacagccccaccaaatcttactcttttagcttgcaaggagccgtcagtttcatttgaagaatctgcaaatctctcatccgtcaagcacctgaagttttcatgttgcgaaacggagtccctgcctagaaatctaaaatctgtctcaagtctggagagtctttgtatacaacattgccccaacataacatctttaccagatctgccgtcctccctccagcgcataactataagggattgtcccgtcttgaagaagaactgccaagaacctgatggagaaagctggccaaagatttcgcacgttcgttggaagagctttctaccaagaccgcactggattccttag

SEQ ID NO: 99237 - DNA, 3222 bp, Zea Mays
atggggaagtctaccttagcacaatatgtctataatgacaagaggattgaagaatgctttgatgtcaggatgtggatctgtatctcgcgcaaacttgatgtgcatcgtcacacaagggagatcattgagtccgcaaaaaagggggagtgcccacgtgtcgataatctcgatactctccagtgcaaactacgagacatactacaacagtcaaaaaaattcctgcttgtcttggatgatgtttggtttgaaaaatctgatagtgagacagagtgggacctactccttgctccattagtctctaaacagccgggaagcagagttttggtgacttctcgacgtgaaatgcttccagccgctgtttgctgtgaacgagttgttcgtttggaaaacatggatgatactgagttcttggctctctttaaacaacatgctttctctggagcaaaaatcaaagaccagctgttacgcacgaatctggaaaatactgcagcggagcttgctaaaaggcttggacaatgtcctttggcagcgaaagttcttggttctcagctgtgtaggaaaaaggatattgatgaatgggaagctgctctagagcttggagatttaagtgatcccttgacatctctgttgtggagctacgagaagttagatccatgtctgcaaaggtgcttcttgtattgcagcttgtttccaaaaggtcatagatatagacgtggtgagttggttcaactttgggtggcagaaggatttgtttgttcatgcaatttgagtaggagaacattggaagaggttgggatggattacttcactgagatggtctctggatctttcttccaattggttcctgaaagactttattcatactataccatgcacgatatccttcatgatttggcagagtcactctctagggaagactgcttcagattggaagatgataatgttacaaaaataccaggcactgttcgatatctatctgttcatgttgagagtatgcaaaagcataagaaaattatctgcaagctacttcatttacgcaccattatctgcatcaatccactaatggatggtgcaagtgatctttttgatcaaatgctacacaaccaaagaaaattgcgtgtattgtatttgtcattttacaccagcagcaagttgccggaatctattggtgagctaaagcacctccggtatttgaaccttgtcaggacattaatttctcaaatgcctagatcattatgtactctctaccacttacaattactttggttgaactgcatggtagagagattgcctgacaaactttgcaatttaagtaagctgcgacatctaggagcatacccatattactttcatggtttcgtggatgaaaggcctaattaccaagttccgaacataggtaagctaacttcactacagcacatttatgtcttttctgtgcaaaagaagcaagggtatgagttgcgacagctgagggacttgaatgagcttggtggcagtttaagagtaaaaaatcttgagaatgtcattggaaaggatgaagccttagagtcgaagctatttctgaaacgtcgccttaaagagttggcacttgagtggagttccgagaatgcaacagatatcctgcacttggatattctagaaggtctaagaccaccaccccaactgagtaagctcacaatcgaaggttacaaatctgacacataccctgggtggttacttgagcgatcctattttaagaatttggaatgttttgagcttaataattgcagtttattagaaggtctgccacctgatgccaggctgcttcggcgttgctctaggctacatataaaaaacgttccaaatttgaaggaactatcttatcttccagcaggccttacagagttgtcaattcacaagtgtccactgcttatgtttatcaccaacaatgagctaggacaacatggcttggaggaaaatgtaatgaagatagacaacctgacatcaaaacttgcattgatgtgggatgtggattcaggttcatgtattaggagagcgctatcagaggactgttcatctctgaagcagattattatgacactaatggatgatgatatatcaaagcacctccaaatcattgaaagtggtctagaggaaggaggagaaaaggtatggatgaaagaaaacatcatcaaaccatggctcttttgccatgagcagaggataagtttcatttatgggagggccatggagatgccactagttctaccgtcaggactctgtagtctttctctttgttcatgcagtattacaaatgaagctttagctatttgccttggtggccttacttcactgaggaatttagaattgaaatataatatggaattaactacacttccaacaaaaggagtgtttgagcatttagcaaagcttgacaggttgtttgtaagtggttgtttgtgtctcagatcactgggtggcctacgtgctgctccatctctttcctttattaactgttgggattgtccttctttagagctagcacgtggagcagaactagttccgtcgaaccttgatagatacctcaacatccgtggctgcattctttcagctgattcattcattaacggcctgctggaccttaaatacctttccattgatagctgcagaagctccccatccttgtcgattggccacatgacctcgcttcaatcattacatctagttggtctctccgatctttaccttgttgaaggcctgtcttgcctgcgccttaagttcctacaactagtagacgttccaaacctcactgcaaagtgcatctcacagtttcgtgtccgggtatcgctcaccgttagtagctccgtattgctcaaccacatgctcatggctgaagggtttagggtcccactgaatctttatcttttagattgcaaggagccgtcgatttcgtttgaagatcctgcaaatctgtcatctgtcaagtgcctgcagtttttgcgttgtgaaacggagtccctgccaggaaatctaaaatctctctcaagtctggagagtcttcatatagggcgttgccccaacatagcatctttaccagatctgccatcctccctccagcgcataactatatgggattgtcccgtcttgaagaagaactgccaagaacctgatggagaaagctggccaaagatttcgcacgttcgttggaagagctttctacaaataccgcactggcttccttag

SEQ ID NO: 99238 - DNA, 4493 bp, Zea Mays
ccacaacaaaaaacagatattctatcgtcagcaatcctgcgttccctgcccgacggaggtgcttccctcgttgctgcgttgcactgcggcggcctcgagcttgttgtcgattccagctccatgcgcccatgatttactttacttgttttctcgagtctgtagcggtttttatcagctgcttgccttctgcagaagaaaaagaaaaaaaaagaacagctttgttactacttcccatcgttcacccattcatattttttttcttggttcacaaagtaagaggaagcacaaactactccaacttcatggcggacttggcgctagttggcttaaggtgggcagcatcgccgattgtcaaggagcttcttactaaagcttcagcttacctcagtgtggacatggtgcgtgagatcgaacgactacaagacactgtcctgccacagttcgagttggtgattcaagcggcccagaagagcccccataggggcaagctggaatcctggcttcggcgtctcaaagaagccttctatgatgccgaggacctgctggacgagcatgagtacaacgtccttaaggccaaggccaagagcggaaaaggtcccctgctccgagaggatgaaagctcctccactgcaaccactgtcatgaagccttttcattctgctatgaacagggcacgcaacttgctccctgggaacagaaggctaattagcaagatgaacgagctcaaagctatcctgacagaagcccaacaacttcgagatcttcttggcttgccacatggcaataccgtcgagtgcccagctgcagcacctaccagtgttcccacaaccacatcacttcccacttccaaggttttcggtcgcgacagggatcgtgatcgcatagtaaaatttcttctcggcaagacaacaactgctgaggcaagctcaactaagtactccggtttggccattgttggattgggaggaatggggaagtctaccttagcacaatatgtctataatgacaagaggattgaagaatgctttgatgtcaggatgtggatctgtatctcgcgcaaacttgatgtgcatcgtcacacaagggagattatagagtctgcaaaaaagggagagtgcccacgtgttgataatctcgatactctccagtgcaaattacgtgatatactacaagagtcacagaaattcctgcttgtcttggatgatgtttggtttgaaaaatctcatagtgagacagagtgggagttattccttgctccattagtctctaaacagtcagggagcaaagttttggttacttctcaaagtggaacacttccggccgctatttgttgtgaacaagaacatgtcattcatttggaaaacatggatgatactgagtttttggctctttttaaacaccatgctttctctggagcagaaatcaaagaccaactgttacgcacgaagctggaagacactgcagaggagattgctaaaaggcttggacaatgtcctttggcagcaaaagttctgggttctcgattgtgcaggaaaaaggatattgctgaatggaaagctgctctaaagcttggagatttaagtgatcccttcacatctctgttgtggagttacgagaagttagatccacgtctgcagaggtgcttcttgtattgcagcttgttgccaaaaggtcacagatatagacctgaagagttggttcacctttgggtggcagaaggatttgttggttcatgcaatttgagtaggagaacgttagaagaggttgggatggattacttcaatgatatggtctctgtatctttcttccaattggtttctcaaatgtattgtgattcgtactatgtcatgcatgatatccttcatgattttgcagagtcactctctagggaagactgctttagattagaagatgataatgtgacagaaataccatgcactgttcgacatctatctgttcatgttcaaagtatgcaaaagcataagcaaattatctgcaagctatatcatttacgcactattatctgcatcgatccgctaatggatggtccaagtgatatttttgatggcatgctacggaaccaaagaaaactgcgtgtattgtctctgtcattttacagcagcagcaagttgccagaatctattggtgagctgaagcacctccggtatttgaacctcgtcaggacgttagtttctgaattgcctacatcattatgtactctctaccacttacaattactttggttaaaccacatggtggagaatttgcctgacaaactatgcaatttaagaaagctacggcatctaggagcgtacgtgaatgatttcgcgattgaaaagcctatttgccaaattctgaatataggtaagttaacgtctctacaacacatttatgtcttttctgtacagaagaagcaaggctatgagttgcgacagttgaaggacttgaatgagcttggtggcagtttaaaagtgaaaaatcttgagaatgtcattggaaaggatgaagccgtagagtcgaagctatatctgaaaagtcgccttaaagagttggcatttgagtggagttccgagaatggcatggatgcaatggatattctagaaggtctaagaccgccaccccaactgagtaagctcagaatcaaaggttacagatctgatacatatcctgggtggttactagagcgatcctattttgagaatttggaaagttttgagcttagtaattgcagtttgctagaaggcctaccaccagatacagagctccttcggaattgctctaggttgcgtataaactttgttccaaatttgaaggaactatctaatcttccagcaggccttacagatttatcaattgattggtgcccactgcttatgtttatcaccaacaatgagctaggacagcatgacttgagggaaaatataataatcaaggcagacgacctggcatctaaacttacattgatgtgggaggtggattcaggaaaaaaagttaggagtatactgtcgaaagactattcatctctgaagcagttgatgacattgatgatggatgatgatatatcaaagcatcttcaaatcattgaaagtggtctggaggaaagagaagataaagtatggatgaaagaaaacatcatcaaggcatggctcttttgccatgagcagaggataagattcatttatggaaggaccatggagatgccattggttctaccgtcaggactctgtgaactttctctttcttcatgcagtattacagatgaagctttagctatttgccttggtggcctcacttcactgaggaatttaaaattgaaatataatatggcattaactacacttccatcagaaaaggtgtttgagcatttgacgaagcttgacaggttggttgtaataggttgtttgtgtctcaaatcactggggggcttacgtgctgctccatctctttcctgttttaactgttgggattgtccttctttagagctagcacggggagcagaactaatgccgttgaaccttgctagcaatctcagcatccttggctgcattcttgcagctgattcgttcattaatggcttgccacatctgaaacatctttccattgatgtctgcagatgctccccatccttatcgattggccacctgacctcccttgaatcattatgtctaaatggtctccctgatctttgctttgttgaaggcttgtcttccctgcaccttaagcgcctaagtttagtagatgttgcaaacctcactgccaagtgcatctcacagtttcgtgtccaggaatcgctcagggttagtagctctgtattgctcaaccacatgctaatggctgaagggtttacagccccaccaaatcttactcttttagattgcaaggagccgtcagtttcatttgaagaacctgcaaatctctcatccgtcaagcacctgcacttttcatgttgcgaaacagagtccctgcctagaaatctaaaatctgtctcaagtctggagagtctttctatagaacaatgccccaacatagcatctttaccagatctgccgtcctccctccagcgcataactatattgaattgccccgtcttgatgaagaattgccaagaacctgatggagaaagctggccaaagatttcgcacgttcgttggaagagctttccaccaaaatcgatctggcttccttagagttgccactttgaaataaatgagaaggcaccttgacgtcacccctcttctcttgaagctccagagttgaggctcaagtcagaagccaatccgtcgttaatgctgccgtccccgcggttccctgtttttgccgcttgtattgctccgctatttcagttgctatatcattcattccttggttgtgcacaattgccaatatgtatttctctgacagaatgaagtaataactgtggccagggcttttgttttcatgtgcacaattgctatatcattcatgtggcaattagtataaatactccaggcaat

SEQ ID NO: 99239 - DNA, 4495 bp, Zea Mays
ccacaacaaaaaacagatattctatcgtcagcaatcctgcgttccctgcccgacggaggtgcttccctcgttgctgcgttgcactgcggcggcctcgagcttgttgtcgattccagctccatgcgcccatgatttactttacttgtgttttctcgagtctgtagcggtttttatcagctgcttgccttctgcagaagaaaaagaaaaaaaaagaacagctttgttactacttcccatcgttcacccattcatattttttttcttggttcacaaagtaagaggaagcacaaactactccaacttcatggcggacttggcgctagttggcttaaggtgggcagcatcgccgattgtcaaggagcttcttactaaagcttcagcttacctcagtgtggacatggtgcgtgagatcgaacgactacaagacactgtcctgccacagttcgagttggtgattcaagcggcccagaagagcccccataggggcaagctggaatcctggcttcggcgtctcaaagaagccttctatgatgccgaggacctgctggacgagcatgagtacaacgtccttaaggccaaggccaagagcggaaaaggtcccctgctccgagaggatgaaagctcctccactgcaaccactgtcatgaagccttttcattctgctatgaacagggcacgcaacttgctccctgggaacagaaggctaattagcaagatgaacgagctcaaagctatcctgacagaagcccaacaacttcgagatcttcttggcttgccacatggcaataccgtcgagtgcccagctgcagcacctaccagtgttcccacaaccacatcacttcccacttccaaggttttcggtcgcgacagggatcgtgatcgcatagtaaaatttcttctcggcaagacaacaactgctgaggcaagctcaactaagtactccggtttggccattgttggattgggaggaatggggaagtctaccttagcacaatatgtctataatgacaagaggattgaagaatgctttgatgtcaggatgtggatctgtatctcgcgcaaacttgatgtgcatcgtcacacaagggagattatagagtctgcaaaaaagggagagtgcccacgtgttgataatctcgatactctccagtgcaaattacgtgatatactacaagagtcacagaaattcctgcttgtcttggatgatgtttggtttgaaaaatctcatagtgagacagagtgggagttattccttgctccattagtctctaaacagtcagggagcaaagttttggttacttctcaaagtggaacacttccggccgctatttgttgtgaacaagaacatgtcattcatttggaaaacatggatgatactgagtttttggctctttttaaacaccatgctttctctggagcagaaatcaaagaccaactgttacgcacgaagctggaagacactgcagaggagattgctaaaaggcttggacaatgtcctttggcagcaaaagttctgggttctcgattgtgcaggaaaaaggatattgctgaatggaaagctgctctaaagcttggagatttaagtgatcccttcacatctctgttgtggagttacgagaagttagatccacgtctgcagaggtgcttcttgtattgcagcttgttgccaaaaggtcacagatatagacctgaagagttggttcacctttgggtggcagaaggatttgttggttcatgcaatttgagtaggagaacgttagaagaggttgggatggattacttcaatgatatggtctctgtatctttcttccaattggtttctcaaatgtattgtgattcgtactatgtcatgcatgatatccttcatgattttgcagagtcactctctagggaagactgctttagattagaagatgataatgtgacagaaataccatgcactgttcgacatctatctgttcatgttcaaagtatgcaaaagcataagcaaattatctgcaagctatatcatttacgcactattatctgcatcgatccgctaatggatggtccaagtgatatttttgatggcatgctacggaaccaaagaaaactgcgtgtattgtctctgtcattttacagcagcagcaagttgccagaatctattggtgagctgaagcacctccggtatttgaacctcgtcaggacgttagtttctgaattgcctacatcattatgtactctctaccacttacaattactttggttaaaccacatggtggagaatttgcctgacaaactatgcaatttaagaaagctacggcatctaggagcgtacgtgaatgatttcgcgattgaaaagcctatttgccaaattctgaatataggtaagttaacgtctctacaacacatttatgtcttttctgtacagaagaagcaaggctatgagttgcgacagttgaaggacttgaatgagcttggtggcagtttaaaagtgaaaaatcttgagaatgtcattggaaaggatgaagccgtagagtcgaagctatatctgaaaagtcgccttaaagagttggcatttgagtggagttccgagaatggcatggatgcaatggatattctagaaggtctaagaccgccaccccaactgagtaagctcagaatcaaaggttacagatctgatacatatcctgggtggttactagagcgatcctattttgagaatttggaaagttttgagcttagtaattgcagtttgctagaaggcctaccaccagatacagagctccttcggaattgctctaggttgcgtataaactttgttccaaatttgaaggaactatctaatcttccagcaggccttacagatttatcaattgattggtgcccactgcttatgtttatcaccaacaatgagctaggacagcatgacttgagggaaaatataataatcaaggcagacgacctggcatctaaacttacattgatgtgggaggtggattcaggaaaaaaagttaggagtatactgtcgaaagactattcatctctgaagcagttgatgacattgatgatggatgatgatatatcaaagcatcttcaaatcattgaaagtggtctggaggaaagagaagataaagtatggatgaaagaaaacatcatcaaggcatggctcttttgccatgagcagaggataagattcatttatggaaggaccatggagatgccattggttctaccgtcaggactctgtgaactttctctttcttcatgcagtattacagatgaagctttagctatttgccttggtggcctcacttcactgaggaatttaaaattgaaatataatatggcattaactacacttccatcagaaaaggtgtttgagcatttgacgaagcttgacaggttggttgtaataggttgtttgtgtctcaaatcactggggggcttacgtgctgctccatctctttcctgttttaactgttgggattgtccttctttagagctagcacggggagcagaactaatgccgttgaaccttgctagcaatctcagcatccttggctgcattcttgcagctgattcgttcattaatggcttgccacatctgaaacatctttccattgatgtctgcagatgctccccatccttatcgattggccacctgacctcccttgaatcattatgtctaaatggtctccctgatctttgctttgttgaaggcttgtcttccctgcaccttaagcgcctaagtttagtagatgttgcaaacctcactgccaagtgcatctcacagtttcgtgtccaggaatcgctcagggttagtagctctgtattgctcaaccacatgctaatggctgaagggtttacagccccaccaaatcttactcttttagattgcaaggagccgtcagtttcatttgaagaacctgcaaatctctcatccgtcaagcacctgcacttttcatgttgcgaaacagagtccctgcctagaaatctaaaatctgtctcaagtctggagagtctttctatagaacaatgccccaacatagcatctttaccagatctgccgtcctccctccagcgcataactatattgaattgccccgtcttgatgaagaattgccaagaacctgatggagaaagctggccaaagatttcgcacgttcgttggaagagctttccaccaaaatcgatctggcttccttagagttgccactttgaaataaatgagaaggcaccttgacgtcacccctcttctcttgaagctccagagttgaggctcaagtcagaagccaatccgtcgttaatgctgccgtccccgcggttccctgtttttgccgcttgtattgctccgctatttcagttgctatatcattcattccttggttgtgcacaattgccaatatgtatttctctgacagaatgaagtaataactgtggccagggcttttgttttcatgtgcacaattgctatatcattcatgtggcaattagtataaatactccaggcaat

SEQ ID NO: 99240 - DNA, 567 bp, Zea Mays
ctgatcacccatgtactagtgtaccttatagttggtactagtattgtataaatactctaggcaatgcaatagagaaggcagttcattttcctgcacttgtgcttgtgtagtgctgtgttcccaactcttcttctacctctagccatggattgagtgtgggtgagagcgtaaggagcttgggctttacagaaccatcacaacgatgcacctcgatgtcaccccaacgcgacgctctctcttcttgaagctccagagttcaggaccaagtcagaagcgaatgcgtcagctaatgctgttgtccccgcggttccctgtttttttccgcttgcatttgctccgctatttcacttgttatattattccttgattgtgaacaattgccaatgtgtatttctccgacagaatgaagtaaccaactgtggctatggcttttactttacatgtggcaattagtcctacgtgaggctaattagagtatggaatgtctcatacctttactgtctttctttgaagaaagtaagaatattggccgagacatgtttctaaatgaaatatgtgcttccgtcc

SEQ ID NO: 99241 - DNA, 1977 bp, Zea Mays
atggatggtccaagtgatatttttgatggcatgctaaggaaccaaagaaaactgcgtgtattgtctctgtcattttacaacagcagcaagttgccagaatctattggtgagctgaagcacctccggtatttgaacctcatcaggacgttagtttctgaattgcctacatcattatgtactctctaccacttacaattactttggttaaaccacatggtggataatttgcctgacaaactatgcaatttaagaaagctacgacatctaggagcgtactcatgttacgcttatgatttcttgaaagaaatgcctatttaccaaattctgaatataggtaagttaacgtcgctacaacacatttatgtcttttctgtacagaagaagcaaggttatgagctgcgacagttgaaggacttgaatgagcttggtggcagtttaagagtggaaaatcttgagaatgtcattggaaaggatgaagccgtagagtcgaagctatatctgaaaagtcgccttaaagagttggcacttgagtggagttccgagaatggaatggatgcaatggatattctagaaggtctgagaccgccaccccaactgagtaagctcacaatcaaaggttacagatctgatacatatcctgggtggttactagagcgatcctattttgagaatttggaaagttttgagcttagtaattgcagtttgctagaaggcctaccaccagatacagagctccttcggaattgctctaggttgcgtataaactttgttccaaatttgaaggaactatctaatcttccagcaggccttacagatttatcaattgattggtgcccactgcttatgtttatcaccaacaatgagctaggacagcatgacgtgagggaaaatataataatgaaggcagacgacctggcatctaaacttgcattgatgtgggaggtggattcaggagaagaagttaggagtgtactgtcgaaagactattcatctctgaaacagttgatgacattgatgatggatgatgatgtatcaaagcatcttcaaattattgaaagtggtctggaggaaagagaagataaagtatggatgaaagaaaacatcatcaaggcatggctctttttccatgagcagaggataagattcatttatggaaggaccatggagatgccattggttctaccgtcaggactctgtgaactttctctttcttcatgcagtattacagatgaagctttagctatttgccttggtggcctcacttcactgagaaatttacgattgaaatattatatggcattaactacacttccatcagaaaaggtgtttgagcatttgacaaagcttgtctggttggttgtaagagttgattcattcattaatggcttgccacacctgaaacgtctttccattgatgtctgcagaagctccccatccttatcgattggccacctgacctcccttcaatcattagatctaaaaggtctccctgatctttactttgttgaaggcttgtcttccctgcaccttaagcacctacgtttagtagatgttgcaaacctcactgccaagtgcatctcacagtttcgtgtccaggaatcgctcacggttagtagctctgtattgctcaaccacatgctaatggctgaagggtttacagtcccactgaatcttgttctttcatattgcaaagagccgtcgatttcatttgaagagtctgcaaatctctcatctgtgaagcgcctggaattttggtgttgcaaaacagagtccctaccaagaaatctaaaatccctctcaagtctggagagtctttctatagggtgttgccccaacatagtatctttaccagatctgccgtcctccctccagcgcataagtatatccgattgccccgtcttgaagaagaactgccaagaacctgatggggaaagctggccaaagatttcgcaccttcgctggaagcacatctactaa

SEQ ID NO: 99242 - DNA, 862 bp, Zea Mays
tgctgcttcctttcccagcgagcagtagaccctcagcagtctacggtacctttggtctcctctacataaaaaacaaatcatctatcaccacttcaccagcaatcagcaacaccatccggtattcctccgttccctgcccgacggagctgctttccctccttgctgtgctgtgctgtgcttgttccagattctactccatacgcccttgatttattttacttcgtagaaaaaagaaaaaaaaagcttcttactgaatttcatggccgacttggcgctcgccggcttaaggtgggcagcatcgccgattgtcaacgagcttcttactaaagcttcagcttacctcagtgtggacatggtgcgtgagatccaacgactagaagccactgtcctgccacagttcgagctggtgattcaagcggcccagaagagcccccacaggggcatactggaggcatggctccggcgtctcaaagaagcctactatgatgccgaggacttgttggacgagcatgagtacaatatccttgaaggcaaggccaagagcggaaaaagtctcctgctgggagagcatggaagctcctccactgcaactactgtcacgaaaccttttcatgctgccatgagcagggcgcggaacttgctccctcaaaacagaaggctaattagcaagatgaacgagctcaaagcaatcctgacagaagcccaacaacttcgagatcttcttggtttgccacatggcaataccgtcgggtggccagctgcagcacctaccagtgttcccacaaccacatcacttcccacttccaggggcgaatgcaaggggtgggcaaggtgggccatggccccacctcaatttttttaa

SEQ ID NO: 99243 - DNA, 4455 bp, Zea Mays
atggcggacttggcgctagttggcttaaggtgggcagcatcgccgattgtcaaggagcttcttactaaagcttcagcttacctcagtgtggacatggtgcgtgagatcgaacgactacaagacactgtcctgccacagttcgagttggtgattcaagcggcccagaagagcccccataggggcaagctggaatcctggcttcggcgtctcaaaaaagccttctatgatgccgaggacctgctggacgagcatgagtacaacgtccttaaggccaaggccaagagcggaaaaggtcccctgctccgagaggatgaaagctcctccactgcaaccactgtcatgaagccttttaattctgctataaacatggcacgcaacttgctccctgggaacaaaaggctaattaccaagatgaacgagctcaaaaatattctggaagatgccaagcagcttcgagaacttcttggcttgccacatggcaatatcgcagagtggccaactgcagcacctaccggtgttgccacaaccacatcacttcccaattccaaggttttcggtcgcgacggggatcgtgatcgtatagtagattttcttctcggcaagacaacaactgctgaggcaagctcagctaagtactcgggtttggccattgttggattgggaggaatggggaagtccaccttagcacagtatgtctataatgacaaaaggatagaagaatgctttgatatcaggatgtgggtgtgcatctcacgcaaacttgatgtgcatcgtcacacaagggagattatggagtctgcaaaaaagggagagtgcccacgtgttgataatctcgatactctccagtgcaaattacgtgatatactacaagagtcacagaaattcctgcttgtcttggatgatgtttggtttgaaaaatctcataatgagacagagtgggagttattccttgctccattagtctctaaacagtcagggagcaaagttttggtgacttctcgaagtgaaacacttccggccgctatttgttgtgaacaagaacatgtcattcaattgcaaaacatggatgatactgagtttttggctctttttaaacaccatgctttctctggagcagaaatcaaagaccaactgttacgcacgaagctggaagacactgcagaggagattgctaaaaggcttggacaatgtcctttggcagcaaaagttctgggttctcgattgtgcaggaaaaaggatattgctgaatggaaagctgctctaaagcttggagatttaagtgatcccttcacatctctgttgtggagttacgagaagttagatccacgtctgcagaggtgcttcttgtattgcagcttgtttccaaaaggtcatagatatgaatctaatgagttggttcacctctgggtggcagaaggatttgttgattcatgcaatttgagtaggagaacattggaagaggttgggatggattacttcaatgatatggtctctggatctttcttccaattggtttctcaaatgtatcgtggttcgtactatgtcatgcatgatatccttcatgattttgcagagtcactctctagagaagactgctttagattagaagatgataatgtgacagaaataccatgcactgttcgacatctatctgttcatgttcaaagtatgcaaaagcataagcaaattatctgcaagctatatcatttacgcactattatctgcctcgatccgctaatggatggcctaagtgatatttttgatggcatgctacggaaccaaagaaaactgcgtgtattgtctctgtcattttacaacagcagcaagttgccagaatctattggtgagctgaagcacctccggtatttgaacctcatcaggacattagtttctgaattgcctacatcattatgtactctctaccacttacaattactttggttaaaccacatggtggagaatttgcctgacaaactatgcaatttaagaaatctacgacatctaggagcgtactcatcggacgcttatgatttcgtgaatgaaaggcctatttgccaaattctgaatataggtaagttaacatcgctacaacacatttatgtcttttctgtacagaagaagcaaggttatgagttgcgacagttgaaggacttgaatgagcttggtggcagtttaagagtgaaaaatcttgagaatgtcattggaaaggatgaagccgtagagtcgaagctatatctgaaaagtcgccttaaagagttggcacttgagtggagttccgagaatggaatggatgcaatggatattctagaaggtctgagaccgccaccccaactgagtaagctcacaatcgaaggttacagatctgatacatatcctgggtggttactagagcgatcctattttgagaatttggaaagttttgagcttagtaattgcagtttgctagaaggcctaccaccagatacagagctccttcggaattgctctaggttgcgtataaactctgttccaaatttgaaggaactatctaatcttccagtaggccttacagatttatcaattgattgttgcccactgcttatgtttatcaccaacaatgagctaggacagcatgatttgagggaaaatataataatgaaggcagacgacctggcatctaaacttgcattgatgtgggaggtggattcaggagttattaggagagtactgtcgaaagactattcatctctgaagcagttggtgacattgatgatggatgatgatatatcaaagcatcttcaaattattgaaagtggtctggaggaaagtgaagataaagtatggatgaaagaaaacatcatcaaggcatggctcttttgccatgagcagaggataagattcatttatggaaggaccatggagattccattggttctaccgtcaggactctgtgaactttctctttcttcatgcagtattacagatgaagctttagctatttgccttggtggcctcacttcactgagaactttacaattggaatataatatggcattaactacacttccatcagaaaaggtgtttgagcatttgacaaagcttgacaggttggttgtaataggttgtttgtgtctcaaatcactggggggcttacgtgctgctccatctctttcctgttttaactgttggggttgtccttctttagagctagcacggggagcagaactaatgccgttgaaccttgatatggagctcagcatccttggctgcattcttgcagctgattcgttcattaatggcttgccacatctgaatcatctttccatttatgtctgcagaagctccccatccttatcgattggccacctgacctcccttgaatcattatgtctaaatggcctccctgatctttgctttgttgaaggcttgtcttccctgcaccttaagcacctaagtttagtagatgttgcaaacctcactgccaagtgcatctcacagtttcgtgtccaggaatcgctcacggttagtagctctgtatttctcaaccacatgctaatggctgaagggtttacagccccaccatatcttactctttcagattgcaaggagccgtcagtttcatttgaagaacctgcaaatctctcatccgtcaagcacctgaacttttcatggtgcaaaacagagtccctgcctagaaatctaaaatctgtctcaagtctggagagtctttctatagaacattgccccaacataacatctttaccagatctgccgtcctccctccagcgcataactatattgtattgccccgtcttgatgaagaattgccaagaacctgatggagaaagctggccaaagatttcgcacgttcgttggaagagctttctaccaagaccgcaccactttgaaataaatgagaaggcaccttgacgtcacccctcttctcttgaagctccagagttcaggctcaagtcagaagccaatccgtcgttaattctgccgtccccgcggttccctgtttttgccgcttgtattgctccgctatttcagttgctatatcattcattccttggttgtgcacaattgccaatatgtatttctctgacagaatggagtaataactgtggccagagcttttgttttcatgtgcacaattgctatatcattcatgtggcaattagtataaatactccaggcaatgcaatagagaagatagctcattttcctacacttgtgcttgtggatggtgtggcagagaagttcaccatggaaccagttccagtaatgtgtgtgctacagtcaaaataggtcttaattctctgctacgtacagtcaaaatgtgtctgctacagtccgagtgtttctggagattcgttgttggcggatgatgagctacatttgtacagtatggattgagctcgaggacttgttcatctccttgctctattaccagttaaaaggtgattgcttgttctc

SEQ ID NO: 99244 - DNA, 905 bp, Zea Mays
ctttcccagcgagcagtcagcagcaccatcggtctcctccacgacaaaaaacagatattctatcgtcaggaatcaatcagcaatcctgcgttgcctgcccgacggagctgcttccctcgttgctgcattgcactgcggcggcctcgcgcttgttgtcgattccagctccatgcgcccatgatttactttacttgtatctgccgtcctccctccagcgcataactatattgtattgccccgtcttgatgaagaattgccaagaacctgatggagaaagctggccaaagatttcgcacgttcgttggaagagctttctaccaagaccgcaccactttgaaataaatgagaaggcaccttgacgtcacccctcttctcttgaagctccagagttcaggctcaagtcagaagccaatccgtcgttaattctgccgtccccgcggttccctgtttttgccgcttgtattgctccgctatttcagttgctatatcattcattccttggttgtgcacaattgccaatatgtatttctctgacagaatggagtaataactgtggccagagcttttgttttcatgtgcacaattgctatatcattcatgtggcaattagtataaatactccaggcaatgcaatagagaagatagctcattttcctacacttgtgcttgtggatggtgtggcagagaagttcaccatggaaccagttccagtaatgtgtgtgctacagtcaaaataggtcttaattctctgctacgtacagtcaaaatgtgtctgctacagtccgagtgtttctggagattcgttgttggcggatgatgagctacatttgtacagtatggattgagctcgaggacttgttcatctccttgctctattaccagttaaaaggtgattgcttgttctc

SEQ ID NO: 99245 - DNA, 512 bp, Zea Mays
gaacaacgagcatcaggcgctgacagatgtgtattatcctgaggctttgcccaagcattgttagcatcgggcagatggacgaagctagtgtgcttggtggcgtggtacaacgaggagccgtggttgcggcatgcccactttgagcacctgagcttcgacgtgctcgggtggatggcaagggagcagatacatggttggtggggaagcagaggaagctcctttcctaaggcagcaagcaagtatctcgctggagctcgtccacggccacctttgcaggctaatcactccactgacgcacagagggcaacgatatttcttgctgctagccgatgactgtatctacttcatgcggttttaggatttccaggattgccaaatttagacgaatgggttgcaagagctgctatatttgacacccttcatggcactgttagttccatgcaactaacggtgattatcttaggtgaggattgctatggttgggaagtacactgtcttatcagattattcgt

SEQ ID NO: 99246 - DNA, 4523 bp, Zea Mays
cagcaatcctgcgttgcctgcccgacggagctgcttccctcgttgctgcgttgcactgcggcggcctcgcgcttgttgtcgattccagctccatgcgcccatgatttactttacttgtgttttctcgagtctgtagcggtttttatcagctgcttgccttctgcagaagaaaaagaaaaaaaaaagaacagctttgttactacttcccatcgttcacccattcatatttttttttcttggttcacaaagtaagaggaagcacaaactactccaacttcatggcggacttggcgctagttggcttaaggtgggcagcatcgccgattgtcaaggagcttcttactaaagcttcagcttacctcagtgtggacatggtgcgtgagatcgaacgactacaagacactgtcctgccacagttcgagttggtgattcaagcggcccagaagagcccccataggggcaagctggaatcctggcttcggcgtctcaaagaagccttctatgatgccgaggacctgctggacgagcatgagtacaacgtccttaaggccaaggccaagagcggaaaaggtcccctgctccgagaggatgaaagctcctccactgcaaccactgtcatgaagccttttcattctgctatgaacagggcacgcaacttgctccctgggaacagaaggctaattagcaagatgaacgagctcaaagctattctgacagaagccaagcagcttcgagatcttcttggcttgccacatggcaatactaccgagtggccagctgcagcacctacccatgttcccacaactacatcacttcccacttccaaggttttcggtcgcaacagcgatcgtgatcgcatagtaaaatttcttctcggcaagacaacaactgctgaggcaagctcaactaagtactccggtttggccattgttggattgggaggaatgggtaagtctaccttagcacaatatgtctataatgacaagaggattgaagaatgctttgatgtcaggatatggatctgtatctcgcgcaaacttgatgtgcatcgtcacacaagggagatcattgagtccgcaaaaaagggggagtgcccacgtgttgataatctcgatactctccagtgcaaattacgtgatatactacaagagtcacagaaattcctgcttgtcttggatgatgtttggtttgaaaaatctcataatgagacagagtgggagttattccttgctccattagtctctaaacagtcagggagcaaagttttggtgacttctcgaagtgaaacacttccggccgctatttgttgtgaacaagaacatgtcattcatttggaaaacatggatgatactgagtttttggctctttttaaacaccatgctttctctggagcagaaatcaaagaccaactgttacgcatgaagctgcaagacactgcagaggagattgctaaaaggcttggacaatgccctttggcagcaaaagttcttggttcccgaatgtgcaggagaaaggatattgctgagtggaaagctgctctaaagcttggagatttaagtgatcccttcacatctttgttatggagctacgaaaagttagatccatgtctgcaaaggtgcttcttgtattgcagcttgtttccaaaaggtcacggatatagacctgaagagttggttcacctctgggtggcagaaggatttattggttcatgcaatttgagtaggagaacgttagaagaggttgggatggattacttcaatgatatggtctctgtatctttcttccaaaggtacggttggtactatgtcatgcatgatatccttcatgattttgcagagtcactctctagagaagactgctttagattagaagatgataatgtgacagagataccatgcactgttcgacatctatctgttcgtgttgaaagtatgcaaaagcataaggaaattatctacaagctacatcatttacgcactgttatctgcatcgattcactaatggataatgcaagtattatttttgatcagatgctgtggaacttgaagaagttgcgtgtattgtctttgtcatttcacaacagcaacaagttacctaaatctgttggtgagctgaagcaccttcggtatttggacctcaacagaacatcagtgtttgaattgcctagatcattatgtgctctttggcacttacaactacttcagctaaacggcatggtggagaggttgcctaacaaagtttgcaatttaagtaagttacggtatctgcgagggtataaggaccaaattcccaacattggcaagcttacttctttacaacagatatatgacttttctgtgcaaaagaagcaaggatatgagttgcgacagctaaaggacttgaatgagcttggcggcagtttacatgtacaaaatcttgagaatgtcattggaaaggatgaagccttagcgtcgaagctatatctaaaaagtcgccttaaagagttgatacttgagtggagttctgagaatggcatggatgcaatgaatattctgcatttggatgttctagagggtctgcgaccgccaccccaactgagtaagctcacaatcgaaggttacagatctgatacatatcctgggtggttactagagcgatcctattttgagaatttggaaagttttgagcttagtaattgcagtttgctagaaggcctaccaccagatacagagctcgttcggaattgctctaggttgcgtataaacattgttccaaatttgaaggaactatctaatcttccagtaggccttacagatttatcaattgattattgcccactgcttatgtttatcaccaacaatgagctaggacagcatgacttgagggaaaatataataatgaaggcagacgacctggcatctaaacttgcattgacgtgggaggtggattcaggaaaagttaggagagtactgtcgaaagactattcatctctgaagcaattgatgacattgatgatggatgatgatatatcaaagcatcttcaaattattgaaagtggtctggaagaaagagaagataaagtatggatgaaagaaaacatcatcaaggcatggctcttttgccatgagcagaggataagattcatttatggaaggaccatggacatgccattggttctaccgtcaagactctgtgaactttctctttcttcatgcagtattacagatgaagctttagctatttgccttggtggcctcacttcactgagcaatttaaaattgaaatataatatggcattaactacacttccatcagaaaaggtgtttgagcatttgacaaagcttgacacgttggttgtaacaggttgtttgtgtctcaaatcaatggggggcttacgtgctgctccatctctttcctttttttactgttcggattgtccttttttagagctagcacgtggagcagaactaatgccgttgaaccttgatggagacctccacatccgtggctgcattcttgcagctgattcgttcattaatggcttgccacatctgaaacatctttcctttgatgtctgcagaagctccccatccttatcgattggccacctgacctcccttgaatcattacgtctaaatggtctccctgatctttactctgttgaaggcttgtctgccctgcaccttaagtacctaactctacaagatgttgcaaaccacactgtcaagtgcatctcacagtttcgtgtccaggaatcgctcacggttagtacctccgtattgctcaaccacatgctcatggctgaaggatttacagtcccaccgaatcttgatctttcatattgcaaagaaccgtcggtttcatttgaagagcctgcaaatctctcatctgtcaagtgcctgggattttggtattgcaaaacggagtccctaccaagaaatctaaaatccctctcaagtctggagagtctttctatagggtgttgccccaacatagcatctttaccagatatgccgtcctccctccagcgcataagtatagtaaattgccccgtcttgaagaagaactgccaagaacctgatggggaaagctggccaaagatttcgcaccttcgccggacgcacatcaactgctaataccaaacttgcttctttagacttgccacttgaaataaatgagaaggcacctcgatgtcaccccaacgcgacgctctctcctcttgaagctccagaattcaggatcaagtcagaagcgaatgggtcagctaatgctgttgtccccgcggttccctgttttttccgcttgcatttgctccgctatttcactttttatatcattccttgattgtgaacaattgccaatgtgtatttctccgacagaatgaagtaactaactgtggctatggcttttacttttcatgtggcaattagtcctacgtgaggctaattagaatatggaatgtctcatacctttactatctttctttgaagaaagtaagaatattggccaagacatgtttctaaattaaatttgtgcttccgtcc

SEQ ID NO: 99247 - DNA, 622 bp, Zea Mays
aaaaacacaaagctagagataatgctagttagatctttttttatcttttaattagagtgtgtgatgtaattttacttttgttatgaacattagacaataaactgaacttacgaactttgtatagagctgattatactctttttccttctaacaaaatgatttataaacgaggtagtcattgcatagctgtggtaactttaatacaaatattaagtttgattttgttcaaatttatttgtcttatcttttatttgttttattatttttctgaatttagggctctaatgtgaattttgggccaaaaactgaatttcgggcctaatgtgaatttcgggccaaaaattgaatttcgggcttttataatttcgggccgcccgaaataagcctgacacgtttaagcaattacgggccgggccgtgggccaagggctaggcccatgggccggcccggcacgacccgaaattcaaacgggtcgggccggcccgaaatttaaacaatacgggccttttcgggcttgggctgggccgggcggcccgaatgtaccctataggtacagggtacaacctctgcagagtataaaactggtatactagccaagctcacggtcatgagcagctcagga

SEQ ID NO: 99248 - DNA, 83 bp, Zea Mays
tctatcttaatcatgcttccacgctttatttattatttaactagtttgtgtgtttatttttctagtttagattgctaggctaa

SEQ ID NO: 99249 - DNA, 682 bp, Zea Mays
attttttattatcaaacaatagaaccgctaactcacaaatactcatgttttggacaagatacagccagagttttgagaccctgactaccaataaccctttcaaagatttagtttatttagaggcaaacatgcctcacaaagtcacaacctcataaaatctacgagcttttatttacaaatacgtctcgataatgaagtttggagacaacaagtatcacatgtactgaaaagacacttctgtgatctcatcatgccaacggagggattctgtaacatgttacaacagaaatacaaaatagtggccacaagcatacaacggagaacatgtcatgtcaagtatttttaatggcatggaacatttctctcttttttaccatgaaagctcgagcctcgagcgaacactgcctcctgattcacactgttttgtgtttagccagagggattaggtttggcagctcgacaaggttagcctacgcaatatggccaatgattaatctcctcctccccaccccccaaaaaaataaaaaaaaaaattgccttgggcttttgggcctagatgtgagcccgagattatggatttcttcctgggcctgcctcttggccaatactcctacaccatctccttacagcagccccaacacagtggctttggtgtatggtttgaaagaatggttgttaaggc

SEQ ID NO: 99250 - DNA, 513 bp, Zea Mays
caggatttacatcaatatcaaaatatggagtgcacgaacatgctggacagcaagaacaaactgccgcattatacttatttaagctatattggtcagactaattccacggtatcccaaggatggtgcaagaggaagcccatactgcgctgccctgtggaggtcgcgagcatgggaaatcagttgaggatgggctgagctagtaaagggttgttttctgacaaggccagtactattgttttttttgacatacctgggtggagttgcgaactcttgtacaggcgcaggctttacttattacattgtttggattggggatatagttcacatggtgcatatgaaacggttagattggtttaaattctctacctcgtccttaaatcatttatcatactaattagttattgaaagatgaaacacccgaaccactagttcttgtaatacttccactgcttttgtgaaggatgttatgagcatcaaaccgaactgaatggatgccctgctcctgttgatcaa

SEQ ID NO: 99251 - DNA, 115 bp, Zea Mays
atttttttatcattctttgtcatgtgctcagctattcttaccacgagttgaactttgaatgctggattatagtttctaataataggttattgaatcctatggaacaaaaaaacaa

SEQ ID NO: 99252 - DNA, 2703 bp, Zea Mays
acaatctgaatatctgataattttactcagatttaccatgttgatggcaaatttggcccattcacacttgtatcactgatgggtatgtggagtggggaacacacagagcgttcggaggccacagctaacgagtctgcatcattgaatggcttagtgggtgacatggttgatgatgatgttagccatcagctgcatgcagggattatgaaatcagctcgcagggttttaatcgatgaaatattcagctctatacttccagatttaattgtttccaagaagactgagaagcaacttgctgcaaaacttaagaaccaagttactaagtctggcagtgtgagcaacaagaaggattccacggctaaggaaactcctataatacatcccaggtggattgtttagcggaaattcaatctacagcagtgcatgagaaattgtatattgaatctgccctctacaagtatttccgtcatctctgatgataacataaaagcccaaggcagtcatgaattgtcaccaaaggatttagatgctactgaatgtgacatggactttccacctggatttggaccatgttggaaatctcctgagagctccctctctccatccctattagaagttaatggaagtgctaagttggatgggaagtctgaatcaagtaccacattattttctggccccttagcagtagtccagaggatgctggcaaatgaactatatatctcatcgaagcaatctttatttcactattttgaggaggttattgcagacgatataacaaattgtttatgctttggacttgaaagcaatattgatcaggaacagattggtactcctatacacgcaccagaatcacccatttcagccgaaacgtctatgcatgaaacagccaattccattgagatgactggaggcgatgtactgaatattgttgaaatagccacgtccacaagaaccagtccacttgaaatgactgtagatgaaaagctgaataccgttgaagctacaagaaccagtcgaactgaaccgacttcagttgaaacatcaactgttgctgaaatggcaacagataaaatgaccacttatcatgtggaagagcacttatccatgtcgtatgcaagggtatttgaaaagatgaacatatgtaagacagcagaattggatgagaaatttgatgaagtgcctcctggaatggagactggcttagtccctttaccacttatggacaaaaatatatatcagccttcaaagtcagtgaactctattcctttgatttctagatatataacattggctctctgtcggcaaaaactacatgagaatgtcgtgagagagtggacatatctcttctcagatacaattagcaagtgcttgggctcatggtacaccaggagaaatgctgtacctaaaagcgcagacggatcatcaaaactcaaagaaaaaacatactacaggaagaggaaattcgagaaaacatgtcaagcaaaatcatcaaaaagaccagtggaaatctcaatggacgagcagctttcaaaacctctctgtcagcttgttgaccgcaagatttatgtgaaaaatatccaagaaccaaacaaatctttgacatcaaagagagtttcatttgtggacaagccctccgaaaaaggagccaaaactgtggctaatgatgcttatgatttgaatatccagcaagatctgacactcctttccagtgaggtgccaaaaagagccaggtcatctcatccaactaagaagcatatggttgctaacaggacacctacggtgaatgataatgtggcgaataatagtatgctcacgaaacatgtcaagaaaaaaaagggcaggaacatttccagtgagaccagtcagaaggtaaaaccggtgatctcatgcccagaatcagatggttgtgctagagcttccattaatggatgggagtggcgcaattgggcacggaatgctactccgtcggaaagggctcgtgtgagagggtaccatgttcggactattctttctgcctcaaatgataatgtgtggaaaaattctcaagcaaaggtttcatctgcaagaacaaatcgggttaaactgcgaaatctgttagcagccgctgaaggttctgaactgctgaaaattacccaaatgaaggcaaggaaaaagcgtttgcgttttcaaaggagcaagatccatgattggggtctggtcgcacttgagtcgatcgaagcagaagactttgtaatagaatatgttggtcaactgattcaccggcgggtatctgacatacgtgagtctcaatatgagaagagtgggattggaagcagttacctctttcgcttggatgatgattttgtggtcgatgccactaagcgtggtgggttagcaaggttcataaatcattcttgtgagccaaattgctacacaaaggtgatcactgttgatggacagaagaagattttcatttatgcaaagaggcgtatatatgccggtgaggaaatcacatataattacaaatttccattggaggaaaaaaagataccgtgccattgtggttctcggaggtaaatctgttaatcactatacaggaggcagaaggcttttcttttttgtcagctgagacctatttaataagataatgtgttgcaaatggtgttacgggtattaaatttggccacccttgtagtattattgatgttattggcactacttgca

SEQ ID NO: 99253 - DNA, 1038 bp, Zea Mays
tcctccagctgccttgcgaaccccaacacttgtgtcacaactcggttcctgctccagctccacacctccttatcgcaacgcgagcagcagttgcattggaggcgaggaggagccacgccggggctcaaggaatggccgctctccgccacctcgccgccggccccacctgccaccaccaccaccaccacggcgtcgcggcagccaccgcctccctccggctccatcgcctccccctccccttccgcccccttcgctcccgctccggctccttcaccagggtttatgcgatctccagcaatgacatcagggtcggcaccaacgtcgaggtcgacggcgcgccatggaaagttctagagttcctccacgtcaagcctggaaaaggcgctgctttcgtcaggacaaaactgcgtaactatgtaactggcaacacggtcgagaaaaccttccgtgctggaagtacgctacaggaaccatccctttcaaaggagaccaagcaatttacatacaaggatggctcccagttcgtgttcatggatctgacaacatttgaagaaagtcggttaaatgaagcagatgtcggtgacaaacaaaaatggctgaaagaggggatggactgcaatttgttgtactggaatgggaagatcattgatttcgacctcccaatcactgtgaggctgactgtaactgatactgacccaggggcaagtgatagtgcgcaaggaggaacaaagcctgcaaccctggaaactggagctgttgtcactgtgccctcttttgtgaacgtaggcgatgatattctggtggattcaagaactgggcagtatatgaatcgagcataacgaattgaagaggatttcggatttgaggagagtactgcttttttgtttgaccattttagtcccattcacttgtacaaacgccctgggtctttggccccaggaaatttacatttctgctgcatgtgaatcctcactctgattataaccatgtacatctttggtttccagatataaggaaaattgtgttcagatttttaaa

SEQ ID NO: 99254 - DNA, 728 bp, Zea Mays
cttaatttctgcggttgaactctggtatgacgtagtaccattggcctatggtggactgcccttgcttcaccaatacatgttttatgttcgctctatatccctcagtgttttactgttatgcaacgactaatagtcacttcattgaaactttcagctacaggaaccatccctttcaaaggagaccaagcaatttacatacaaggatggctcccagttcgtgttcatggatctgacaacatttgaagaaagtcggttaaatgaagcagatgtcggtgacaaacaaaaatggctgaaagaggggatggactgcaatttgttgtactggaatgggaagatcattgatttcgacctcccaatcactgtgaggctgactgtaactgatactgacccaggggcaagtgatagtgcgcaaggaggaacaaagcctgcaaccctggaaactggagctgttgtcactgtgccctcttttgtgaacgtaggcgatgatattctggtggattcaagaactgggcagtatatgaatcgagcataacgaattgaagaggatttcggatttgaggagagtactgcttttttgtttgaccattttagtcccattcacttgtacaaacgccctgggtctttggccccaggaaatttacatttctgctgcatgtgaatcctcactctgattataaccatgtacatctttggtttccagatataaggaaaattgtgttcagattttt

SEQ ID NO: 99255 - DNA, 303 bp, Zea Mays
gagcaagtagcgattgcttgtaacccgagcgggggcaataaggtagtgtggatatcaattatggtgcatgtgcctgggtctagtgctacaaactgtggaccacccattccaagttgtgtagtgggtttagggtgccttggcaaaagcttttgcatccacacacctaaagtggcggacattgcgtgaggctggcttcacagagcagcgagtaccgcccaccaccagcggtggaaggataatgagccgctatgctctaggccaattgaggcacatgtgccctctctggtagaccactatattttt

SEQ ID NO: 99256 - DNA, 648 bp, Zea Mays
atgcgcgtgctcaacgacagccgccccaccgtcgcccccgacgcgtcgtcggcgccgccgctgctcatcacgccaacggcggcggcggggatggtcggcgtggtccagctgcagccgggcgccgccggagggagcgacgctggcttcgacgccgacatggtcgtcatcctcgccgcgctgctctgcgtcctcgtctgcgccctcggcgtcaactccctcgtccaccacttcgtgctcaactgcggccgcaccgtggccgcacctgcaccaccacacgctgccgctgccgctgctccggccactgacagtgacagcaccgggctgaagaagagggagctgaggaggatacccgtggtgctgtacgaggccaataagcagcccagcgcgtcgtcggggaccgacgacgacgacgactgcgccatctgcctcggcgagttcgacgacggcgaggagctgcgcctgctcccgggctgccaccacggcttccacgtgcaatgcatcgacgtgtggctggtcatgcacgcgtcttgcccgacgtgccggaactcgctcctggtccaccaagaccgtcacgccggcgccggcgacggcgaggcagcaacggtggcaggggaagaggcatagtgccgcgcgcagaggctcgtttat

SEQ ID NO: 99257 - DNA, 1368 bp, Zea Mays
ctcacccacgcgcttctctctctcaccagcaggccacgccgccgctgcaccaccgctctccggatcatcggctgtccccctcctcctcctcctcgcccactcaccggccatccctgctgcggtgccgcgcgttcaagcaggaggccgacgacggcgacggcgacccgactgaggccgacgcgcggaagcgcaggaagggcccgatgtacaagctcaaggcggcgatccagggcctcgcgggatctcgctccgccgccgcggaggtgtatgggggagagtaccagttccagcgcgccgtcgagaatttgtgcgagccaaggttccccaatccactcacgcgcgcgcatcgctgtggtttcctgtgttgctttccaccctcgcgcgctcttcttcttcatggagccatggcaggaagcggcaacaggagatttggccgggatatggtgtctagcagcacacatttctcccaatggcagatggtctgggttggagaccacgttcctggcggcagagtcgatctgcaatgtggaggtccaatctggccaccgatgtcagctcgctccggagccaattccgattccctagcagtgacgacgttcagatgcagcttcagatgcagcgacgacctctctctccatccatggatctctaggcaactgcgaacaagggaaccaggcatcaaaatgaagggaaccaggaatcgaaacggccccgagaatcccaaagcacgagaaggggaacaagggaactaggcatcgtgaagagagcccggggtgatgaattgttacggttcatggacggagcaagcaaggagcctctccgcaagagtacttgctctgttccacaatttgattcagaaaaaaaaaacaaatattcacctttattgcaatcaaacaagatatcagggacttgaaagtggcgaaagaggagcaagacattgggttttatgctggttttgttggggctacctatttccttggaagggccatcagcgccatgccatggggcatgttcgctgacaagtatggaaggaagccatgcatcgtgatcagcatcctctcagtgattgtgttcaacacactgtttggacttagcacaacttactggatggcaattgtgactaggggattacttgggttgctatgtggtatacttggacccatcaaggcttatgcttcagaagtctgcaggaaagagcaccaagctctgggaatctctcttgttacatcttcacgagccatagctcttgttattgggcctgctattggaggcttccttgcacaggtgaagattatggaatttagatagcagtataagttaaattcgaaatgctaatgagtgccttcatcatgtatcccttaatcataa

SEQ ID NO: 99258 - DNA, 1057 bp, Zea Mays
aaggagcgacatcccactgcaactctcctcaccactcatcaccagctagctctagcaaagcacttgccatctaccgaccgccgcattccaaacagcccgacgagctagcagagcggcaggcacctccctcctcaaggaacatggcccgcatgcagaagttggcagtggcgacggcggccgtggtggccttggtgctgctggcggcggcggcgacctcggaggcggccatcagctgcgggcaggtggcgtcggccatcgcgccctgcatctcctacgcgcgcggccagggctcggggccctccgctggctgctgcagcggcgtcaagagcctcaacaacgccgcccgcaccaccgccgaccgccgcgccgcctgcaactgcctcaagaacgccgccgccggcgtcagcggcctcaacgccggcaacgccgccagcatcccctccaagtgcggcgtcagcatcccctacaccatcagcacctccaccgactgctccagggtgaactgaaccctaaacgacgacgacggcgccggcggccgcctgaagacgatccatatctatcccgccgtcgtcggcgcccgcggatcggaccgtcatgaccatatctacctacgcatgatcacgacttgcatgtctactactactactgaataaaaaacctctccgcgcacgtcgtccttgtgtttgtgtgtgtgagagagagaggagatggagagccggccatgtccttttggctgtttggtttatttttgagttcatgcggtctttatttatttccatgtacgctgcttcctcgtatacccactttaaatttgtaccatgcatgcatgttccttatgatacactcacctctttttgtttgcaaactgtgttacgcatgcgctgcaggcatatgtgaccgtgtgttccatatgtccacacgcctttttttcatgacacgtacgacgacacgcactgcatgtgctactcggatactacaaaatttgtcttaataattcagaaaatacaaaacaaaaactataaaacaaagctgggcgaggggctgatgtaccctctcc

SEQ ID NO: 99259 - DNA, 135 bp, Zea Mays
caagtttgtcatatatttattttttctacatcaagacaccaaatttcgaaaactctcatactaattaccttggtgtcttcgtgtttcttgtctcaagttttgtgaccatgcgaccaaagcctaattgagtttttc

SEQ ID NO: 99260 - DNA, 817 bp, Zea Mays
gagcaagtagcgattgcttgtaacccgagcgggggcaataaggtagtgtggatatcaattgtggtgcatgtgtatgggtctagtgctacaaattgtggaccacccattccaagttgtgtagtgggtttcggatgccttggcgaaagcctttgcatcccaacacctaaagtggcggacattgcgtgaggctggcttcacagagcagcgagtaccgcccgccaccagcggtggaaggataatgagccactatgctataggccaattgaggcacatgtgccctctctggtagaccactatctttttgctatttttcttatctacttttgttcctatgtaaccattacgaatatcacgtttttgttctgcatcttggaataaattaaattttgatctcagatactacaactccattcatgcttagtgtgcacaagaaaatttagttcctttttttctttaactcttgtcttatatctagttctatgtccgtgcaatcacgtctcattgaatgttttctcccggtcctgcgtctacatttctctctctatctttttccatgtgcaaccaagccttgtagatgcataatgtgtcgctgcaatctaagcccagttagagcacatctacactttaccttgcattgcgaaaaacatatgctattatatatttattcttctacttccctctaggtgcaccttaaggctcatgcgccatatttggtagaccatcattttcttcatttttcctctgttgtatgtaattttgggctagtacaacctagcctcgctagaattgtttctcgctcccacctgattaacttgcc

SEQ ID NO: 99261 - DNA, 917 bp, Zea Mays
aatttattccaagatgcagaacaaaaacgtgatactcgtaatggttacataggaacaaaagtagataagaaaaatagcaaaaagatagtggtctaccagagagggcacatgtgcctcaattggcctatagcatagcgactcattatccttccaccgctggtggcgggcggtactcgctgctctatgaagccagcctcacgcaatgtccgccactttaggtgttgggatgcaaaggctttcgccaaggcatccgaaacccactacacaacttggaatgggtggtccacagtttgtagcactagacccaggcacatgcaccacaattgacatccacactaccttattgcccccgctcgggttacaagcaatcgctacttgctcagcgagtgagggggttcaagactacctatttaaggtggtgttgtactctatgagccgacagtgtggtatttaccaactacaaatagtgtcatgcatgtgacttgctagttgacaatgtctgttgtcgagctagatgtgggctatggatgaagcacattaggatatagtaggcctattttgttttttgttatttttgggccactatggactttatgttgatgttgtgaaattttttcttgtgtttcctcttcctacgatgtggaaagtgggtgcgtcagagaagaaagaaagagtagctagcattgattttccgtcataccattgagaacactaatcagaagcagaagcaacaatatttcatacatatacaacacttgtaatccatataaacaactttcctttaaaatataatgtaaaccacatgatttatatctagggtcggctatctccacaaagggcaagaaaacgctccaagtttgtagtatagaactaaaagtgtcgattctcacgatttcttcccgacatatacaaactag

SEQ ID NO: 99262 - DNA, 501 bp, Zea Mays
atggggcataatgctggtcgcacaccattcatagacatctcaaacacaagcattataggtgatcaaaatggatcaaactcgcttgtaccaatagtcgatgctaatgaatgtaagaggcaaagggataaggaaagatatgccacgatgtccattgaacaaaagaatgagaaaaataggaagcgccgtgaagcacgtcaacgaaataaagcactacccctaaagtccgagtcatctagagacattaatacgaatcagacacgtgagacggttaacgttgaaataagtcgagatgtgcatcttggttcaggtcctattaaaaacactccatcgcctggtaattctatcgaacgaaagaggcaaagggatagagaaaggcgtgcaacaatgtcggttgaacaaaggaatgagtacaataacaagcgtcgtcaaatgcgtcaacgaaataagggacaaaatgtgatgcccaatgtttcaggatgtgatgaaacccgtcaaatttaa

SEQ ID NO: 99263 - DNA, 1231 bp, Zea Mays
ttgctcccatccatcacagctagctagcatacagacgaataatctcttcttcacctcactaacaccagctagcaactctttctctcctgcaataatggccgctcgctcctcctcctcccagccgcagctggtcgcggcggcggcggtcctggcagcggcgctgctgctgctggcggcgggggccgggacggcgtcggcggcggtgagctgcggcgaggtgacgtcgtcggtggcgccgtgcctcgggtacgcgatgggcagcgcggcgtcgccctccgcggcgtgctgcagcggggtgcgctcgctcaacagccgcgcgtcgtcgacggcggaccggcaggccacctgcaactgcctcaagagcatgacgggccggctcggcggcggcgtcagcatggccaacgccgccaacatcccctccaagtgcggcgtctccgtcggcgtgcccatcagccccaccgtcgactgcaccaagtacgtaggcccggcagtcccggccccctgcatgtctagttagttaaccatgcatgcatggaagttgttatgttatatgtacattgctactaaccatggaaaataatgtcttcccgtgttatgcgcatcgcaggatcaactgatcgatggaaccatagtggaggtagctcgctcgttggatggcagcgtacgtggccatcagcagcatgcagtcgtcgtcgtagcagagatgtcctagctacgtgtgtgtcatgcatcagactggcacataataaagaagtagatcatgcacccaccccactagtgatcacttcgtctagtgtccctcccgtcgtcgtcgtcgtgtacctcgtacgtgacatgccgtagcacgtactacgctagcagagcagcacctcaatgtccttgggcttgctttgctggctctctgttttcgtctctcgtgttgcttttaatctggtacaggtttctaaattataataatgaatagttttttgtccaatatatattcgccgtacatatgcatgcatgaatcatgataaggcatatacaactctattaaatatctatctctcgagagatctctagcagggacggaggcagtggacagtggtgggcgaacagggctcaagcctcctctaccacttagcctatagagtccttattggagccttcccaagttaacatgtacaatatagtgtataaagagacttatatattgtacctgattagttcaatccctcttttttttctagct

SEQ ID NO: 99264 - DNA, 849 bp, Zea Mays
ttgctcccatccatcacagctagctagcatacagacgaataatctcttcttcacctcactaacaccagctagcaactctttctctcctgcaataatggccgctcgctcctcctcctcccagccgcagctggtcgcggcggcggcggtcctggcagcggcgctgctgctgctggcggcgggggccgggacggcgtcggcggcggtgagctgcggcgaggtgacgtcgtcggtggcgccgtgcctcgggtacgcgatgggcagcgcggcgtcgccctccgcggcgtgctgcagcggggtgcgctcgctcaacagccgcgcgtcgtcgacggcggaccggcaggccacctgcaactgcctcaagagcatgacgggccggctcggcggcggcgtcagcatggccaacgccgccaacatcccctccaagtgcggcgtctccgtcggcgtgcccatcagccccaccgtcgactgcaccaagatcaactgatcgatggaaccatagtggaggtagctcgctcgttggatggcagcgtacgtggccatcagcagcatgcagtcgtcgtcgtagcagagatgtcctagctacgtgtgtgtcatgcatcagactggcacataataaagaagtagatcatgcacccaccccactagtgatcacttcgtctagtgtccctcccgtcgtcgtcgtcgtgtacctcgtacgtgacatgccgtagcacgtactacgctagcagagcagcacctcaatgtccttgggcttgctttgctggctctctgttttcgtctctcgtgttgcttttaatctggtacaggtttctaaattataataatgaatagttttttgtccaatatata

SEQ ID NO: 99265 - DNA, 784 bp, Zea Mays
acacattccaatttccaccgaacaacgaccgccattctctccctctctcttaatttctccatccacgaacgacacgcaccagctagctactactcctgagtctgacgacgactccaccgccataggcctgcgcattcgcgataatgggctgcacaggaacccagacccagcagcagcgactccgactccgccggccgccccgagggagaggcagcagctacagcttcgtcttcgtcctccgcgcgctcacgctcatcctcctcatattgctcgccgtcttcgcacagcctgcttccagccgcaggcctctgccgctcgtcgacgaccaccacaacaacggcgtcgtcaaggccgccgccgccgccgccgccaccgacgtcatactgctgctgcctcctctacacgccgacgccgagaaggctatggtcgtcgcggcaccgtcgtccgtactgccgcccgtagaggaggacgaggatcggcggcggcattggctcgccggtggccgccaccagtggctgctcaacaagaagccccgggggaaggccccgccctccgcccccagcaaacgcaccaactgatctcaacacttcatcttgcatcatacatgatgttttccctcttttatctctctctctctctctctctctttttatttccctttctctatacccttatgggccttatccaattcttggacgcctgccgtgtgtccggtagatgacacactgatgcctgtagtttttctattctattgattcttttgggtttgagcttgactacggtc

SEQ ID NO: 99266 - DNA, 797 bp, Zea Mays
acattccactttccaccgaacaacgaccgccattctctccctctctctcttaatttctccatccacgaacgacacgcaccagctagctagctagctactagcctactactcctgtcctgacgacgactccaccgccatagacctgcgcattcgcgataatgggatgcacaggaacccagacccagcagcagcgactccgactccggccgccccgaggcagaggcagcagcttcgtcttcgtcctccgcgcgctcacgctcatcctcctcatcttgctcgccgtcttcgcacagcctgcttccagccgcaggcctctgccgctcgtcgacgaccaccacaacaacggcgtcgtcaaggccgccgccgccgccgccgccaccgacgtcatactgctgctgcctcctctacacgccgacgccgagaaggctatggtcgtcgcggcaccgtcgtccgtactgccgcccgtagaggaggacgaggatcggcggcggcattggctcgccggtggccgccaccagtggctgctcaacaagaagccccgggggaaggccccgccctccgcccccagcaaacgcaccaactgatctcaacacttcatcttgcatcatacatgatgttttccctcttttatctctctctctctctctctctctctctctctttttatttccctttctctatacccttatggccttatccaattcttggacgcctgccgtgtgtccggtagatgacacactgatgcctgtagtttttctattctattgattcttttgggtttgagcttgactacggtc

SEQ ID NO: 99267 - DNA, 2243 bp, Zea Mays
gcttttgctttcgtggttcccaatgccatgtcgccttgtcttcacagcaccaccactggccactgtcccctgcggccctgctttcctgtttcacctcccgtagtcctgctcctgctcctgcttgcatcgacttgacgccgccgccgaccgaacgtttcgagttcaggcgaggcaagggcgaaggcgtatctgccactctggtctcatcttcctcggtccgtctagagtagagttcgtcagttccaccggcaggcaggcagaggcagcagcggcaggttagtactcgtcgtccccttctcttcttcttcttgtttcttcctatgattaaccgacagttctttcgcagattggctttattttgttatgctaacttgatatactgctgctgctgtatagtttagtggccaatgtgacaaggtatataaagcctagcttgacgaatgatttgttttggttgctcattattcaaatcgtttcgcttgaaaattttcaagtcggctcggcacccttcagatctatcctgctcattcagtcgtcgaccctgcacgcgatgcatttttttctctctcatctagacgtagagtcctgcgtgaattaatcagttactaataatttctactaggaaaccgcacgcattctcacaaaatgcaaaaaaaaaagtatacactgtgttgtttctgaatgcacgagtagagttttcatttatttccccaccaatggatctagttcgttaagaaaagaactttttttattcccgtcgcgcgaattcgttaataagagaaggagaagaagaggatcgatcatattctttctggatgctgcaagcagccgccgtcgccaagacaagcaatggagtcaccagcgccagcaagaagcgcgagggctccagccactccaacatgcaccgttccggggctcctagtgggcctcaccaagctgttgagcctcaccaaggcctgcgcggctccaacgccggcggctgacgatggcggccgcgaggcagcggcggcggcggccacgaagcccggacacgaccccggccccgacccgaggctcgtcctcgtgaggctgttcgacgcggtgtcggcgctcaagtcggggtacgtgaagctgcagcgggcgcacttcccgtacgaccccgacagggtggcctcggccgacgaggccgtggcgtcggagctcgactcggtggccgcgctgcagtgcctgtgcagctcccgccgcgggatcgggccgctggtagacgaccggtggtccctggtgcagcgcctggaggccgaggccagggggagggacgccgacatcgccgcgctcgggagggagctccggaggctgcagcacgacaacgccaggctgagcaggcgggtcgtcaggagcaggaacgacgacgagcgtcgcaggacgcgtctgctgctctccgtgcccaaggagctgacgacgccggcggccctcgtgagccggttcgtggcggcgtccaggtcggtcggcgacttcgcggggctgctgcatggcgctggtacctgtgccagcagcagcgacgacgcagttgcagagcaggcgcggtcgtggaggaggtacgcgatcgaggcgcacctgtggcgagcgatgctgctcgttggcaccggcggcggcgacgccggcagcagcttccacgggatcatgaagccacgcgacgcgctcgatgccctgatgcagttcccacgctcggggctctcggcgttctgccgggcggcctacctggccgccgtgtcgccggaggcggaggcggccgcgtgccggaacctggaccacagggccttcgtgtcccgcggcgggcacccgaggacgcggctctaccgcgcgttcgcggcggccgcgaggtccgtgtgggcgcttcgggtgctgatggcgggctgctcggagtcggagcagagtggtggtggtggtgatggtgtcaggatgttctacgcgagcagggggagcctgtacagggcggagttcatggagagcgtgcctgcccttggcgcggaagaagaccgccgcgtggagacgggtgaggagaagctcagcgtcgcatttaccgtgacgcccggtgtcaaggtcggcgacacggtggtgccgtgcagggtacttctttgccgtcgccgggagggcttcgtccggatccgatgacgactctcagcaagatagttttttttagtacattttgcttttgtttacgttctgtatcttggtatgggtagctcaaaatatgaataagcaag

SEQ ID NO: 99268 - DNA, 756 bp, Zea Mays
tagcgaagcatcccctcacttgattcctgaatcttctgaacaagggtattttctagaacaggtgctcctggagacccaacttcagcctgaggccttccttgtatagattatcaacatggtggaagccttggaagctgtgggtctcagctgacatggttgcaatcatcgatgggataatcgtgtgaactactgcccacagcctccctaatgagaaggtgccttgcttttagccaggcaatagttggacctaccactgctctttttaaggctaaagtgccctggtcatcccaaagaggaaatctctcggagaaacaaagagtcttcaaaacggtgaaaggctgtacaaattgagctacaaagctgggcttcctagcaaggaattaaaacaacaatttctcagatttgtgctagaagcaagaggctgttaaagaagtgctctttagcaaaggtttgtgttttctattcacctagcagcatctgttttctttactgtgttggatcaccacacatttacagctaactacatgcttattagaagcgaatgtgtatcaaagaaattggtttagaatccattgatattttactcatccatgctttgatttttttagaaatgtatagttatggcttgatcacactttatccatggagttgaggaggcacctagctatacatttcacagtcaatcatctggttctagctgtttgtcaaatattattgctagcacatctcaaatccacggtaaaaatttggcatccc

SEQ ID NO: 99269 - DNA, 1274 bp, Zea Mays
ccaccaagaggaaggggaacgcgcagcgcaggcggcggcgtcttcctccgcggatccctcctcttcgcggacgacgcgattccacaccgcaaaccctccctccctccctggattgatcgagctgctcgtccacctccgctccgcccctcgcctcgccatttcgtagcttgtttctttttcccttctccctccctttcggtttctgctcgattcatcaaattagtttattggaggggagggagacgttaggtgggctgggcgcctcagcgcctgcgtgctccgcctcgggagaagccgagaaggtcaaaagaaatccccaccaccaacgcaggcgactcccgcaatccaccatagcttcctattctccccgtcgccagacgcccagagccccccgcccccagctcggagcaagcaataaaaggcaaaggtgccgacttttctgaaccgcttgccctccgtccacgccatattggtcgattgctcgattcctcggtcgggggagggaccccgggcccggagaagtcagcaagagatgtgcccgctgcgggtcatcctcatcttcctctccgccaccgtcgcgggcttcttcctcgtcagggggctcaacgccgagccggaccagttcgacgccgacgccgacgccgacgagtcgggatcccccagggcgcccctgcctctgcattccaaggttggatcggctgtgaaagcagggttctggacgatggtggacatggcaagcgggcgttacctctggcgcacccttgttgcacagcctgcgaattcagaatccgagaaggtccggtgacgaatgctcggttgttcgtaaattgtctcgtcctgcggatggagtgccacatagatagacataggtgaaggctggtgcaatcctgttgtatcttcttgttacatactccctccgtttctttttatttgtcgctggatagtgcaaaattacactatccagcgacaaataaaaagaaacggagggagtattggtatgatggtgttggtgtgtaatatagatgttacacgggggtcaatatattgaagtaaatttgcaacattgttcatgtgttgagttgaaccttgtgtcgtgtaaaactggaagtgggtgtattctggccatgtgatctgggtccaagtttgcaggttttgtcgttcggctaaatcccttaaatgtgagacttgaaatatagaataaaagcgaagctgagtacatggaaatttgtgattgctggattgcaatatgctcagttgttaaagaagcttgttgg

SEQ ID NO: 99270 - DNA, 3059 bp, Zea Mays
aagctagggttttcgccatggccgtcgcccacctcgaactcccctccctcgaatccacccatcccacgctctcctagctcccgcatctcgcatctccacaaaaagccgccgccttcgattcccctccccgctgcctcgcccccattcgagggtttcccctccccccccccctaaatcgaaacgcagcattaccgaccgagcaagcaacccccgccacccgtcttcaagggtccgagccgagcgacggcgctggcgatccagcagggcgtgagggcggcggagggcggataatcaatgtgtacgctgtgcgccgtgcagcgctggtcgcggcgcgtcgccaccatgctcccgtggctcgtcgtcccgctcatcgtcatctgggccgccacccagctgctcctcccggccgcctaccgcttcgaggtcacctccccgcgcctcgcctgcgtctccgtcctcctcctcaccctcttctggtacgagatcctcctcccgcgcctctccctctggcgcgcccgccgctctgcgcgcctccgcgaggagcgccgcgcccacgccctcgagctgcacaagctccgcaagaccgcaacgcggcgctgccgcaactgcagcaacccgtacagggaccagaaccctggcggtggtaagttcatgtgctcttactgcggtcatgtctccaagcgccccgtgcttgacctcaattcagccgggaaggcccccaccggatggccttgtgctcaggattgtggatattggctcgacttgcgctgctcctccggcaataacagctccttcttgggattctcctggcgcttgctttcgtccttttgctcgacagcaatgaggtggttattgaggaatatattcagacttacgtcctcaggagatggtgagggcttgagcatagatggtaaaaggttggcaaagagaggggagaatggaggaaaaaccgaggagagcaagaccgagaaggcgagaaggaaggcggaggagaagagactggcaaggctggagagagaaatgctggaggaagaggaaaggaagcagcgagaggagatggctaagctagtggaggaacgcaggaagctgagggatgaaaaagcagaggccgaggagcggtcaaaaagtgctacacctgtcggggagaaggatgctaagagggaggcagagaagcggcgccaggagaggaagaagaaagaggacaaggggtcaagcaagagcaattcagattgtgaggacattgataggagattggtccgagaaggcgataggaagagagactttgacagaaagagtgacttggataggcgtgagggttacaagcctcattactttgattctaacaatcacagtaataaaacaggtgagagcagatcgaaatactttggccgtatgacaggtggttttttatcttcttcaagagggtttggcagcagttcattctttggcagaagtgctcaggcccctgcccctcaagttagcaaggttagtagacctgtagttcctgcaactgaccagggtaatacagtcaaaagagatgtccctcatgcagccacacaagctacaggcaaatctgctacagctggagaaactagaaatgcatggactaattttaatcgacctgttagtccaaatgtgcatccataccctactggccttaaaaagtcatggcatcagttatttagtcgttcagcatcagtgtctccttgtcctgacgttacaacttcagctcatgatatggttcggaaggcagaaccaaatggagctcaaatatacaatgctcatacatttctctctcagtatccgcctctggactacaagccaagttcaagccagtctatgcaatttccaggttttccaccgcttaatggagcacctcccagtaacccactacctcattttcctgctggacatatgcctttctatgatgatgcagaatcaacactacttgaagaaccagagcaatttgaggacccatgctatgatccagatgcaattgcattacttgggccagtttcagaatctctagataacttcccgttggacttagattgtgggtttttctcgagtgatgttgctaaagagtcacatgggaggccttcaccaattgagtctcctctctcaagatctcgtacggttgaagaaaagcctatcgagcccccacactcctcagttgcaagaggccctggtggttccattctacccgagtctagcagtgaacaaggcacatggcaaatgtggagcacaccattggttcaggaaagtttaggtctgcaaggtcctcagagccagtggcttcgacaaaacacaaatcaattcaaccatagtgccaaccttttcagcagcggaggcggagcaataagtccccttggtactggtttgaatgacagtgatccatggctgcagaaagcacctttccagcaattgccacctgatacaccaagcctgttcctttcacatgaaatgccaggaaaattacacaatgacttggtttttgggtctccaaacaaatcagcccgtgaacgcccatttggaccgcctggttatttgtggcccaaggaggaactggcgctgaatggagctcaggacggtggcggtgggcatatcctgtcgccgtctggtggcgcacgagttggcggcggcgttggcttattttcttcagcaagtccagatgtacagtcactgtggtcattccatgaaacattcaatgaaaaagagagcatagaatgaacaaacttttataatagaaggaagggaaaaagtgtggagccaaggcttccttgcctcctctctcttgtagggttttaccgtctttaccgaggtgataagctggactgtgttccttaatgatgcaaaaaaagaagaagatatggggtcattttgtttcctagcactcaccctcacctgttaacatgcgtcgatgcactgcattaggccttgtttcacctgatgtcattttttaccccggttccgcattgtttttgtcgcgcacaggtgatccatccgtccacggctgtagttatcaactgtgtttctgggacgattttggttttatatat

SEQ ID NO: 99271 - DNA, 3019 bp, Zea Mays
aagctagggttttcgccatggccgtcgcccacctcgaactcccctccctcgaatccacccatcccacgctctcctagctcccgcatctcgcatctccacaaaaagccgccgccttcgattcccctccccgctgcctcgcccccattcgagggtttcccctccccccccccctaaatcgaaacgcagcattaccgaccgagcaagcaacccccgccacccgtcttcaagggtccgagccgagcgacggcgctggcgatccagcagggcgtgagggcggcggagggcggataatcaatgtgtacgctgtgcgccgtgcagcgctggtcgcggcgcgtcgccaccatgctcccgtggctcgtcgtcccgctcatcgtcatctgggccgccacccagctgctcctcccggccgcctaccgcttcgaggtcacctccccgcgcctcgcctgcgtctccgtcctcctcctcaccctcttctggtacgagatcctcctcccgcgcctctccctctggcgcgcccgccgctctgcgcgcctccgcgaggagcgccgcgcccacgccctcgagctgcacaagctccgcaagaccgcaacgcggcgctgccgcaactgcagcaacccgtacagggaccagaaccctggcggtggtaagttcatgtgctcttactgcggtcatgtctccaagcgccccgtgcttgacctcaattcagccgggaaggcccccaccggatggccttgtgctcaggattgtggatattggctcgacttgcgctgctcctccggcaataacagctccttcttgggattctcctggcgcttgctttcgtccttttgctcgacagcaatgaggtggttattgaggaatatattcagacttacgtcctcaggagatggtgagggcttgagcatagatggtaaaaggttggcaaagagaggggagaatggaggaaaaaccgaggagagcaagaccgagaaggcgagaaggaaggcggaggagaagagactggcaaggctggagagagaaatgctggaggaagaggaaaggaagcagcgagaggagatggctaagctagtggaggaacgcaggaagctgagggatgaaaaagcagaggccgaggagcggtcaaaaagtgctacacctgtcggggagaaggatgctaagagggaggcagagaagcggcgccaggagaggaagaagaaagaggacaaggggtcaagcaagagcaattcagattgtgaggacattgataggagattggtccgagaaggcgataggaagagagactttgacagaaagagtgacttggataggcgtgagggttacaagcctcattactttgattctaacaatcacagtaataaaacaggtgagagcagatcgaaatactttggccgtatgacaggtggttttttatcttcttcaagagggtttggcagcagttcattctttggcagaagtgctcaggcccctgcccctcaagttagcaaggttagtagacctgtagttcctgcaactgaccagggtaatacagtcaaaagagatgtccctcatgcagccacacaagctacaggcaaatctgctacagctggagaaactagaaatgcatggactaattttaatcgacctgttagtccaaatgtgcatccataccctactggccttaaaaagtcatggcatcagttatttagtcgttcagcatcagtgtctccttgtcctgacgttacaacttcagctcatgatatggttcggaaggcagaaccaaatggagctcaaatatacaatgctcatacatttctctctcagtatccgcctctggactacaagccaagttcaagccagtctatgcaatttccaggttttccaccgcttaatggagcacctcccagtaacccactacctcattttcctgctggacatatgcctttctatgatgatgcagaatcaacactacttgaagaaccagagcaatttgaggacccatgctatgatccagatgcaattgcattacttgggccagtttcagaatctctagataacttcccgttggacttagattgtgggtttttctcgagtgatgttgctaaagagtcacatgggaggccttcaccaattgagtctcctctctcaagatctcgtacggttgaagaaaagcctatcgagcccccacactcctcagttgcaagaggccctggtggttccattctacccgagtctagcagtgaacaaggcacatggcaaatgtggagcacaccattggttcaggaaagtttaggtctgcaaggtcctcagagccagtggcttcgacaaaacacaaatcaattcaaccatagtgccaaccttttcagcagcggaggcggagcaataagtccccttggtactggtttgaatgacagtgatccatggctgcagaaagcacctttccagcaattgccacctgatacaccaagcctgttcctttcacatgaaatgccaggaaaattacacaatgacttggtttttgggtctccaaacaaatcagcccgtgaacgcccatttggaccgcctggttatttgtggcccaatgccacaatccttgaacatatggtcttatttatggggaactgctgttccatattttgccaaggacctttggctcagtgggaaagcttctcaccactgtgccaggcctgtcctttgtagatatagaaaatattcactagtgatggttggtgactgcatcatgtttgaccttgttgtcaatgaggaggattatagggtgttggctcaacctgttgcttcattaggtatgcagtggagaactttcttcaaaggtggaggtacatgcacttgcgcaagtgggctgctacccacggaggaactggcgctgaatggagctcaggacggtggcggtgggcatatcctgtcgccgtctggtggcgcacgagttggcggcggcgttggcttattttcttcagcaagtccagatgtacagtcactgtggtcattccatgaaacattcaatgaaaaagagagcatagaatga

SEQ ID NO: 99272 - DNA, 1831 bp, Zea Mays
ggccgccaccttcttcttcatcctgagcgcctacttcgtggtgctgccgctgcgggacgagggcgccatctccctggggctcgacactctcccgggcctcttcgccggctccctcctcctcaccgtcgtcgctgcccccatcgcctccctcgccttctccctcccctccatccccaagcccaaggctttgatgatgatacacaggtttttcagcatatctcttcttgcattttttgtgctttggtatacctctacaccagggcagtccggacctacctcccagtcaagtgaaggaggttcagataaacctgcaggatggagaaaccagagctggttctacatagttgtgagaataagtttgttcctttgggttgctttgctaaatctcattaccatatcgtcaacttgggcaagggtaattgatgtcatggacagtgagtcaggttcaaggttatttggttttattggagctggtgctacgctagggcaactttttggttcattgttcgctgcgagtatggcatggctgggaccatttctgctcctattttcttcactcttgatggaacttgctgccctgtcatcaaaaggaatttgtcttgatggaaatcatgcttcggctgaattacatcaaacaggggcaggacaagctcctaataccatggctgatgatgaaatttcttcactagtcacttcacctagacaacctgtccaatctcaagaatccaaacctgaacttttcataatgtttgaaggtttctggctgatcttgcgatcaccctacctgatatacatatctctgtttctttggttaagtgcagttgtctcgtctgtattttactttcagaaagtgacgatagttgctactacaatatcaagcccaacagccagaaggagaacgtttgctctgataaacagctttatagcagtttttattcttgcgggacagctcactttgacgggtcatattcttacagtagctggtgtcacagttgctatctgtgcatctccctttgttgctgcctcaaatttggttgcccttgctgtatggccaacttgggttgccgtggctgtcactgaaacaattagaaaggtaacaacttatgttttgacaagacctggaagggagttattattcactgttgtctcacaggatgaaaaatacaaagcaaaggtctgtatagatgtgattgtccagaggcttggtgacgcaacagctgctggaatttacaggtggttgttcagtagccttgagaagaaaacatccaaggtcaccctgtttgcattgccgctctgcttcctgtggcttgtcattgcatttcacttgggccggctgcagactaatcttgccaggcttcaggctgcttctgctccgtcctactcctgaacaggaagctgctgcgagtgtctttggagatgtgcttccagaatgtttgaacaggcatggcgagaagtggttgtcatcaatagttagttacttagtttacacgtcttgcaggaatttcaggttttattgatggagaaaccttcagaatacagtagcaaccattactacactacagaagagtttagcatacacaaggggggagaaatagtacaccatagacatagactagcacactatatacaaattcaatatcccatttcgatgtgcactgcaggaaactgtagcatgcaatctgtgagtttattataaatgatgtagtagtagggccggatttgttgggcactgctctgcctttggaactactgctgtcctgacagacactgcatcattctgcatttcacctaccccagttcccagactaaatggctgtaaagacagattcat

SEQ ID NO: 99273 - DNA, 824 bp, Zea Mays
tgactagaaaccgcagatgctgcggtattttatttgcagcaaaattttaaggtttcagagcacgaaagggtaatgttttttttttcagaaacaagagaaacttccattgcatcaaagcaacacgactcatttcgttcagtggttgcttcgatcaacgaaagcattgctcctaaaatgatgtcctgatcatgcacttgcactttgaccagagaatgaattttgctcaaggtgggcacgggattcgctggatctcgcctaaacaatgactcttccaggcacatcacatggctggccgatgcaggaggcataggactgcggatgcggaagagtagagtcaacccaagccgtcaggagaggagcgggggaatggcgacgcctcgccggctcatccgggagcgcgccgaggcggcggtggctactctcgtggcagtccgcccccacgagatccccccgttgatgagcgcggccgccaccttcttcttcgtaagccaacctttgatccatctcgccgtagtcctcccgtcccgttcctgcaaggttacgatacgccatctgaattatgtttgtgctggaggtgcagatcctgagcgcctacttcgtggtgctgccgctgcgggacgagggcgccatctccctggggctcgacactctcccgggcctcttcgccggctccctcctcctcaccgtcgtcgctgcccccatcgcctccctcgccttctccctcccctccatccccaagcccaaggttccacctccctttcctagcttgggcgcatacattcgtttgggaatcataaaactaaccccggtgataaattgataat

SEQ ID NO: 99274 - DNA, 1181 bp, Zea Mays
accgtcaatccgctacgccacagcaacgaccaaccggagccgccgccgccgccgccgacggggacggggacagggaaaccaccaccaccaccaccggccatattaacagctgcgcgtgcacggtggagttctacttccgcccgcgattcgactcgactcgactgctcgttccgtctcgaccttcaggcgggtaagcaggttgaccgtccgcgaattcaccgtatcccgggatacgtatgggttccaaagcgtccttccgcgtcacgctcctcttgctgctcctcgccgccgcctggggacctgctgcacaggccgacgacgctgctgagctcccggatcatattgctattaccttgaaggagcaggtttcttcgaccaagattcctgtccgtctcaagagtggcagcccgctgtgctcagcctgtgaaaacttcacgggcaaagctgtcagttatatcagtgagaaacagacgcaagataaggtcatgggattccttcatgacgcttgctctcagtcattctcgtttgaacagaagtgtgatgaattgatggactcttacgcaaccctcctgtttgccaagatcacggagatcaaaccagaagcgttctgcaaacagtatggcctgtgcaggggcacggctcttttctctggtgtgacaagtgacagcacatgtgtgttctgccaccacctgcttgatgaagttatgtccaaactgaaagatccggacgcggagtttgagataattcagattcttatcaaggagtgcaataagattgaaggccacgtccagcagtgcaagcgactggtcctgcaatacattcccctcatcctggtgaacggcgagaagttcctcgagaagaacgatgtttgcgcgctcgtacaggcttgtccagccacccataagaagactttcagctcagtcttgaagggagccttgttgctgagtgacgcttgaaggttggagaagaacacgcaaagcgtttagcagtggttggaaatagtgtgtccaagtgccgtgtttgtacatataattgtcatatgaatgcatgaagacgtgtcttgtgccctgcattgttttcatcttgtatcataattcataaacacgttgtatttatggacatccacagggggtgaaggttaaaatatatttgtatcataattcatataagcacattgtctt

SEQ ID NO: 99275 - DNA, 1187 bp, Zea Mays
accgtcaatccgctacgccacagcaacgaccaaccggagccgccgccgccgccgccgacggggacggggacagggaaaccaccaccaccaccaccggccatattaacagctgcgcgtgcacggtggagttctacttccgcccgcgattcgactcgactcgactgctcgttccgtctcgaccttcaggcgggtaagcaggttgaccgtccgcgaattcaccgtatcccgggatacgtatgggttccaaagcgtccttccgcgtcacgctcctcttgctgctcctcgccgccgcctggggacctgctgcacaggccgacgacgctggtattgctgagctcccggatcatattgctattaccttgaaggagcaggtttcttcgaccaagattcctgtccgtctcaagagtggcagcccgctgtgctcagcctgtgaaaacttcacgggcaaagctgtcagttatatcagtgagaaacagacgcaagataaggtcatgggattccttcatgacgcttgctctcagtcattctcgtttgaacagaagtgtgatgaattgatggactcttacgcaaccctcctgtttgccaagatcacggagatcaaaccagaagcgttctgcaaacagtatggcctgtgcaggggcacggctcttttctctggtgtgacaagtgacagcacatgtgtgttctgccaccacctgcttgatgaagttatgtccaaactgaaagatccggacgcggagtttgagataattcagattcttatcaaggagtgcaataagattgaaggccacgtccagcagtgcaagcgactggtcctgcaatacattcccctcatcctggtgaacggcgagaagttcctcgagaagaacgatgtttgcgcgctcgtacaggcttgtccagccacccataagaagactttcagctcagtcttgaagggagccttgttgctgagtgacgcttgaaggttggagaagaacacgcaaagcgtttagcagtggttggaaatagtgtgtccaagtgccgtgtttgtacatataattgtcatatgaatgcatgaagacgtgtcttgtgccctgcattgttttcatcttgtatcataattcataaacacgttgtatttatggacatccacagggggtgaaggttaaaatatatttgtatcataattcatataagcacattgtctt

SEQ ID NO: 99276 - DNA, 2666 bp, Zea Mays
actcttcctcaacccgccgccagtcccaaatacgcaaacggcaaatcagccgccgccccctcccgacctgcacaggctgcacgcagctcccatctccggctccggtgaccggcgctccccctcctcgcccaggtccagagccgccccctctcgacctgcaagctgcacgcagcggggccagggccagagccgccacccccggtgaccggcgccccgcgcccccagtccccctcccccacggctgacggccccactgccacctgccaggcgccccagccgcctcctctcccggctcactcaccggtaaccggcgtccggccgggacctggacgtgccgcgtgcggcccaacgccccaagcccccaacccaggaatcagcgaccagccgaccacagcagccagcagagaagggaatacgaataaccaaagaagcgaagaacagatagagaaactgataaagagaaaggtagatagatggggaagcgcaagcccatgccttccgccgccgctgctcgaggaccgaagaaccggccaaagaggccaaagtctgtgaagcagggagctgagttacgggagcagaatctccaactgccggaacacgattacgaaaatatagatactgaatctggagcagcagagaccgttcaccgtgataaaaaagcaaatgggatctttcaagacacatcacagagtgatgaagaagaaatagaagacgagtatgatgctcctagtaatgacacgccaggtgatgcgacaaacaatggaaatggttgttttgatgaaacagagatttcatgttcatttcatcgccatgtaagccacgtcataacaaatgaagaagtcaagatgttgatgaagaagaactataaatttaaatgggaaatgcctgctgtgggcattccaaggtccaaatgggttggaacaggtgaaaaagtgcaggaagcatgtgatgatcatcttcatgatgtcaaaggaaagttgagagaccattggcaacatacactgtccgatcatttaaattctcgaatgagcttttactctctttgtaacagttatcgtgacataatgcattgcaataagaagccattttatctgaaaagtaacggtcctgattctagtaccatggacgcatatcttatgcatgctttgaatcatgtgcataggacgcgagatgttgtaattagaaatgacgcaaagcttaggaatgacactgacagagatattacggatgataagacataccttgatcagggttttacacgcccgaaggttctttttttgttgcctctcaaaagttttgcacggcgcattgtgaagagattgatccagctttccccattgccacaaaaggatagtgccatgggacaatttaaaaaggagtttggtgaatcagatgacgaggggatacctgaacatagcacaaaacctgcagactttgacctcctttttgccggagacattgatgaccactttgtttttggcgtaaagttaacaaagaaatctattaagctgtacagtaacttctattcttctgatataatagttgcatctcctttagcgctgaaacgcaaaattgatggaggaggacatgacaagaaggattttgatttcctatcttcaattgaaatagtggttgttgatcatgcggatgtgatgtctatgcagaactgggaccatctggaggctgtgtttgaacaacttaatcagttgccatcaaaagaacatggaaccaatgtgatgcgaattaggccgtggtacttggatcagcatgcacagtactatcggcagacaatactgttaagctcataccttacaccagagattaatgctttatttaacggattatgcttaaattatgaaggaaagattaaaatggtgaccgagtatgcaggagttcttcccaaaatacaacttgaagtgcggcaggtgtatgaaagatttgatgcatcttctattgctgaagctgacggtgctcgttttgattatttctgcaacaaggtatatccaaagatccaggacttggatgagggtgggctgctgctattcgtcagttcgtattttgaatacattcgaataagcaatttcttaaaatccaaggaagcgtccttttgtcgaatcggagaggctacgtctcagcaggatatatcccgtgcaaggctctggttttttgagggcaagaaaaagatcttgctttacagcgaaagatctcacttctaccaccgatacaagatcaggggaacgaagcatctactagtctattcgttgcctgggagaaaagaattttatccggagcttgtaaatatgctgggcgaatcagaaaaccgcaagtgcaacgtcctcttctctcgtctagaccttctcaagttggagcggatcgttgggaagtcttcggcgcgaaggttgatttcctcggagaagggcatgtttgtcttctgctgatgtagcagcctagcccgtactgtagagcaggcgaatggttttatacattgatccctagcaaatgtacccacagcagggggtcacgttgttgtttgcctgtcaggcaagaatctggaccatgttatgtaggcaaaaaaaaaaaaaaatctgaatcccgtttgtacggctaacattatacttttatgcccctatttgtttccatcaaacttatagattatatagtcacct

SEQ ID NO: 99277 - DNA, 1372 bp, Zea Mays
ctctcccctcctctctcgtctcgcttccggttttccaccacacaaaacaaaaacagagtagatagttcttgaaactgaaatcttcgccgttccactctcccccagcgatctgctcgtttccttgcaacttgcaaccttggtgctgtggatgacgctcgcgatgagcgcactcgcctgccaccgcccactccccttcaaaattttccggcccttcgcctgttgtatgcgtggtctcgtgaatcgtgatgtccagccagcccattgctgtcctctaatgaaatgcagaggttggaaacggaaactgcgaacctcggttgctacatggaaacatatgcggcctgaccgacgtaacgaggccgtagcatttgcggcgaagaacacaaagaggaaacggagaagttctccgaacgagtcgaaggatttgctgttggtggtaagtgaggaagctgcttcgggcagtggaggaagtgctggcacaagcctcgagaccaacggcgaggatgttgctactgacgatgaggtttcaggtgctccgaggagtgctgttcttcaggcttgcgctctcacgtcaggcttgctgcttgccggagggcttctgcttcgcgaggcatcacacctagcatcaataaatggatggccaattgctgaccctacagatgtgtcattcagttttgaaacttggcatcttgagttggttgcgggacttgtcatagtaatctcctctgcccggtacatcctgctacaaacatggccagatttcagagattccagtgaatctgcaaatagacaaatccttgcatcgctagagcctctggactacattgtcgttgcttgtctcccggggataagtgaggagttgctgtttcgaggggcgatgatgcctaccttgggattgaactggattagcgcccttattattggaaccgtttttggtgttcttcacttgggcaatggcaggaaatattcgtttgcaatctgggcaacatttgttggctttgcctatggtatgggaaccatagcttcctcgagcattgtagttccaatagcttctcactccataaacaatattatcggaggtttactttggcgccttaccaagaactcgcaaaagtagatatacataatgccctcaacagtcatccctgttcagtttagagtttagactttctagtccttaatccttacaaggttgccgtcagtattagtgtcgcatgattggttcacccatgtattttcaatagcaaaatgaggacgggactgccgtaaaatcaggacttgcttcatttttttttgtgtcaatgtgtccctttaaatgaattatggagattttatatttcatattaggtataaaataaaatttaaccgtggggcc

SEQ ID NO: 99278 - DNA, 1733 bp, Zea Mays
tcacgtcattagcccgcacctcatctcagcgcacccgcacccgcacccggccgccttcgtcttcgtcccgttccctccagtccggctatataacccgcgcgccctcccatccgccgctccattccgtcgtcgtcgtcagcagcttctgcttgctctggggggaaggagagagagagagcgagagagagatctagtagagaggctagctaggtggtcctcgaacgaagatgttggcggtgttcagcgggcaggtggtggaggtgccggcggagctggtggcggcgggcagccggacgccgtcgcccaagacgaaggcgtcgcagctggtggggcgcttcctggccgcctccgagccggccgtgtccgtgcagctcggcgaccacggccacctcgcctactcccacaccaaccaggcgctcctccgccccaggtcgttcgcggccaaggacgaggtgttctgcctgttcgagggggtgctggacaacctgggtcgtctgagccagcagcacgggctgtcaagcaagggcgccaacgaggtgctcctcgtcatcgaggcctacaagacgctgcgcgaccgcgcgccctacccggccagcttcatgctcgcccagctcaccggctcctacgccttcgtcctcttcgacaagtccaccaactccctgctagtcgcatccgaccccgagggcagggtgccgctcttctgggggatcaccgccgacggctgcgtcgccttctccgacgacatcgacatgctcaaaggctcatgcggcaagtcgctcgcgccgttcccgcaaggtagtatatatttatatgtatctcgtcgtcaagctagctagctctcgcgcgcaactgtgtgtctgtgtctgtgtgtgtgccctttgccccccacatctcatctacaattctacgtagaccttactgcattctgctggccgtctaattaataacaggctgcttctactccaacgccctcggagggctcaagtgctacgagaaccccaagcacaaggtcaccgctgtccccgccgacgaagaagagatctgcggtgccactttcaaggtactgctctgcttattacaaaaacacaaacaagaagaccagctcaacctagagacggatctatctatctatatatatatcatgcaatctgtgatctgtaactgcaggtggtggaaggctctactgtcctgacggcgctgcactgatcggtcatcagctggcggaggcgatgcgatgatgatgcagaactttgtacatgcgttggtggatggtggtgtaacatagtggctgccaacaagtcatgctcatgcaaaccgatgaatctatctctgtatcatcgatctcggttgcttgctagtccagactccagacatggctatatatatatagctggtgctaataaataggagtataatcgtcatatcgatcggttgcgtgtggaatgccaatcatgtgtgtaatctgttggcaaataacaaacctctgttcctccctgctgctgttgtccgtgcgatcatgattcagaactggcgtgggcgccaataactcagaagagagacttgctgtatatgcatgctagtatgcattgtccctctcttgtcaatgcttgtaatcgaactttattatgaaaaccaaaacgagaatccaaccaaataaacactggttattttgtccaactctaaactagcaaaactgagactgagaatatacacacacaaaaaaaaaactctcg

SEQ ID NO: 99279 - DNA, 1620 bp, Zea Mays
tcacgtcattagcccgcacctcatctcagcgcacccgcacccgcacccggccgccttcgtcttcgtcccgttccctccagtccggctatataacccgcgcgccctcccatccgccgctccattccgtcgtcgtcgtcagcagcttctgcttgctctggggggaaggagagagagagagcgagagagagatctagtagagaggctagctaggtggtcctcgaacgaagatgttggcggtgttcagcgggcaggtggtggaggtgccggcggagctggtggcggcgggcagccggacgccgtcgcccaagacgaaggcgtcgcagctggtggggcgcttcctggccgcctccgagccggccgtgtccgtgcagctcggcgaccacggccacctcgcctactcccacaccaaccaggcgctcctccgccccaggtcgttcgcggccaaggacgaggtgttctgcctgttcgagggggtgctggacaacctgggtcgtctgagccagcagcacgggctgtcaagcaagggcgccaacgaggtgctcctcgtcatcgaggcctacaagacgctgcgcgaccgcgcgccctacccggccagcttcatgctcgcccagctcaccggctcctacgccttcgtcctcttcgacaagtccaccaactccctgctagtcgcatccgaccccgagggcagggtgccgctcttctgggggatcaccgccgacggctgcgtcgccttctccgacgacatcgacatgctcaaaggctcatgcggcaagtcgctcgcgccgttcccgcaaggtagtatatatttatatgtatctcgtcgtcaagctagctagctctcgcgcgcaactgtgtgtctgtgtctgtgtgtgtgccctttgccccccacatctcatctacaattctacgtagaccttactgcattctgctggccgtctaattaataacaggctgcttctactccaacgccctcggagggctcaagtgctacgagaaccccaagcacaaggtcaccgctgtccccgccgacgaagaagagatctgcggtgccactttcaaggtggtggaaggctctactgtcctgacggcgctgcactgatcggtcatcagctggcggaggcgatgcgatgatgatgcagaactttgtacatgcgttggtggatggtggtgtaacatagtggctgccaacaagtcatgctcatgcaaaccgatgaatctatctctgtatcatcgatctcggttgcttgctagtccagactccagacatggctatatatatatagctggtgctaataaataggagtataatcgtcatatcgatcggttgcgtgtggaatgccaatcatgtgtgtaatctgttggcaaataacaaacctctgttcctccctgctgctgttgtccgtgcgatcatgattcagaactggcgtgggcgccaataactcagaagagagacttgctgtatatgcatgctagtatgcattgtccctctcttgtcaatgcttgtaatcgaactttattatgaaaaccaaaacgagaatccaaccaaataaacactggttattttgtccaactctaaactagcaaaactgagactgagaatatacacacacaaaaaaaaaa

SEQ ID NO: 99280 - DNA, 1771 bp, Zea Mays
cgctcccactcatcactctggctgcccgctagctggctgccatccctcaccgtccctcccccctccctccgccagattccctctcctcgcgcgcggcattccggaacggcgcatggcatggccaccccgggggccacctgcgccatctcctccgcgctggcccgcccgccggcgctcctcgactacgccgccatccacgcgtgcctgctccgcggcgacgcgcggcgctccctcccgctcctcgcgctgctcctcctcctccacttccgcctcctcgccgccgcggcctcggcgcgcttcaccccggcggtgtcccgcctcgccgcgcgcctgcggctgtcgccgtcgatggcagccgtcacgcttctcgctctcggcaacggcgcgcccgacgcgttcgcgtccgccgcggcgctcggggggccccggggcatgcccagggccgggctcgccgccgtgctctccgcgggcgccttcgtctccgctttcgtcgtcggggccgtcgcgctcgtcgccgcacccttcgccgtcccgccgccgtcgttcgcgcgcgacgtcttcttctacctcctcgccgcgtccgcgctgttctacgtctacctcagcgccgagatcttcctctggcaggccgtcgggttcgtgctcttctatgccttcttcgtggggctagtcttctacatggatttggggagcgcggacgggaagaaggcggtcagcgccgcggcagctgacctggagatggtgagtggcagtgaccgtgtggcggtggacctgccgatcacagtggaggatcacaggcaacaacgacgacccgcttggtgtgcgttgctctggaaggtaacagaagtttgggagtggcccatcgcactcgttctgaagctcacaataccatcaacccttccttccgagtggagcaaagtttacatcagcgcaaacatcggcctgtgccctctcctaatcctgtactccttcagctcgttcatccctctagacacccgaatagtgttcctcctcccgcaagtccgcttccctctatggtccgtcgtgctcttcgccagcctgtgcctagccctctcccactacctcctcgagaaagaagccccagagacagagaccatcgcaagcaccatcatctccttcatcatgagcgtcttctggatctcgaccacggccggagagctcctgagctgcctcgccgcggtcggagccatcatggacttccctcccgccattctcggcatgacggtcctggcgtgggggaactccgtgggcgacctcgtcgcggacgtggcgctggccagggctgggcagcctacgatcgccgtcgccggctgcttcgctggccccatgttcaacatgctggtcgggctgggaaccgcccttgtggtacagacggcgagggtgtatcccggagcttttgtgctcgagttccatgttgggatcgtcgtcgcgtttgtgttcctgctcctgagcctgatgggcaccctgttggtggtcacctgggctaggtttcgggtgcccaggttctggggatactgccttatgggcatgtacatcttgttcaccgtagtcagtattgccatcgccagttattcaggatgatatgtcatccctttttttgtgaagatagccggccgctgatagattgtggtatatagttagcatgcgcaatctgtctgtctggttcaatgcctacgtttgctgattttggcggtgccggtgtggcacgcggaatttaatgtgatatttaatttgctgccgcatttacaaa

SEQ ID NO: 99281 - DNA, 1493 bp, Zea Mays
ccgctagctggctgccatccctcaccgtccctcccccctccctccgccagattccctctcctcgcgcgcggcattccggaacggcgcatggcatggccaccccgggggccacctgcgccatctcctccgcgctggcccgcccgccggcgctcctcgactacgccgccatccacgcgtgcctgctccgcggcgacgcgcggcgctccctcccgctcctcgcgctgctcctcctcctccacttccgcctcctcgccgccgcggcctcggcgcgcttcaccccggcggtgtcccgcctcgccgcgcgcctgcggctgtcgccgtcgatggcagccgtcacgcttctcgctctcggcaacggcgcgcccgacgcgttcgcgtccgccgcggcgctcggggggccccggggcatgcccagggccgggctcgccgccgtgctctccgcgggcgccttcgtctccgctttcgtcgtcggggccgtcgcgctcgtcgccgcacccttcgccgtcccgccgccgtcgttcgcgcgcgacgtcttcttctacctcctcgccgcgtccgcgctgttctacgtctacctcagcgccgagatcttcctctggcagtgaccgtgtggcggtggacctgccgatcacagtggaggatcacaggcaacaacgacgacccgcttggtgtgcgttgctctggaaggtaacagaagtttgggagtggcccatcgcactcgttctgaagctcacaataccatcaacccttccttccgagtggagcaaagtttacatcagcgcaaacatcggcctgtgccctctcctaatcctgtactccttcagctcgttcatccctctagacacccgaatagtgttcctcctcccgcaagtccgcttccctctatggtccgtcgtgctcttcgccagcctgtgcctagccctctcccactacctcctcgagaaagaagccccagagacagagaccatcgcaagcaccatcatctccttcatcatgagcgtcttctggatctcgaccacggccggagagctcctgagctgcctcgccgcggtcggagccatcatggacttccctcccgccattctcggcatgacggtcctggcgtgggggaactccgtgggcgacctcgtcgcggacgtggcgctggccagggctgggcagcctacgatcgccgtcgccggctgcttcgctggccccatgttcaacatgctggtcgggctgggaaccgcccttgtggtacagacggcgagggtgtatcccggagcttttgtgctcgagttccatgttgggatcgtcgtcgcgtttgtgttcctgctcctgagcctgatgggcaccctgttggtggtcacctgggctaggtttcgggtgcccaggttctggggatactgccttatgggcatgtacatcttgttcaccgtagtcagtattgccatcgccagttattcaggatgatatgtcatccctttttttgtgaagatagccggccgctgata

SEQ ID NO: 99282 - DNA, 997 bp, Zea Mays
cgctcccactcatcactctggctgcccgctagctggctgccatccctcaccgtccctcccccctccctccgccagattccctctcctcgcgcgcggcattccggaacggcgcatggcatggccaccccgggggccacctgcgccatctcctccgcgctggcccgcccgccggcgctcctcgactacgccgccatccacgcgtgcctgctccgcggcgacgcgcggcgctccctcccgctcctcgcgctgctcctcctcctccacttccgcctcctcgccgccgcggcctcggcgcgcttcaccccggcggtgtcccgcctcgccgcgcgcctgcggctgtcgccgtcgatggcagccgtcacgcttctcgctctcggcaacggcgcgcccgacgcgttcgcgtccgccgcggcgctcggggggccccggggcatgcccagggccgggctcgccgccgtgctctccgcgggcgccttcgtctccgctttcgtcgtcggggccgtcgcgctcgtcgccgcacccttcgccgtcccgccgccgtcgttcgcgcgcgacgtcttcttctacctcctcgccgcgtccgcgctgttctacgtctacctcagcgccgagatcttcctctggcaggccgtcgggttcgtgctcttctatgccttcttcgtggggctagtcttctacatggatttggggagcgcggacgggaagaaggcggtcagcgccgcggcagctgacctggagatggtgagtggcagtgaccgtgtggcggtggacctgccgatcacagtggaggatcacaggcaacaacgacgacccgcttggtgtgcgttgctctggaaggtatgcattcaacaactcaaattgttaatggccaatgtgctagtacttgacggagacatcaatcctagtctgtttgatggtgtctgcagaatcaacactctcgcctgaaaatgctgaatgttatgggttttttaatcggcaaatctcatactttcgttga

SEQ ID NO: 99283 - DNA, 2241 bp, Zea Mays
ccaacccagaccaaatccaccgtttcgttgctgttctattcgggtacagaacacccattggtttggaagccatcaccaccaccacctataataaattgcacgagatttgccgcgagaccgcatctccatcccgcatcgcgcatcgcatccaccgccgagcttgctttctttctttcttttttctgggagaagaggaagaagaggggaggcgcgacaaaaagggcgccgcgccccgccccgccccgcatcgcccccgacgccggcatctctccctcgctctccttctcccgatctgatccgaagcgcggcggcgtcgacgacgacgacctaagggcacgatgcattcgaccaacctgctgctggaggagcccatccggatggcctccatcctggagccatccaagaccagcttcttcccggcgatgaccaagatcgtcggcacgctcggccccaagtcgcgctccgtcgacaccatctcctcctgcctcaaggccggcatgtccgtcgcgcggttcgatttctcgtggggagacgccgcctaccaccaggagacgctcgagaacctcaagctcgccatcaagtccaccaagaagctgtgcgctgttatgcttgacacggttggaccggagctgcaggtggtcaacaagagtgaaacccccatctccctcgaggagaacgggactgtcgtgctcacgccgcatcagggccaagaagcctcctccaccttgctgcccatcaacttcgatggactcgccaaggctttgacaccaggtgcaacgatatttgtgggccaatacttgttcactggtagcgagactacttcagtttggttggaggtttctgaagttaaaggagatgatgtggtttgtatcatcaagaacacagctaccttggctgggtcgctcttcacgctgcattgttcccagattcatattgacttgcccacgctgtctgatgaggataaggatgttatcaaaaaatggggtgctccaaataagattgacttcctctctctgtcttacacaagacatgcagaagatgtgcggcaggcacgtgagttcctctcgaaattgggtgatcttagccaaactcagatctttgccaaaattgagaatgttgagggcttgaaccattttgatgaaatactggcagaggcagatggtatcattctgtcaagaggaaaccttggaattgaccttccacctgagaaggtctttttgtttcaaaagtctgcgcttcacaagtgcaacatggctggaaagcctgctgttgttactcgtgtcgtggacagcatgactgacaacctcagacctactcgcgcagaggcaactgatgtggcaaatgcagttcttgacgggagtgacgccattctccttggtgctgagactctccgtggtttatatccagtggagactatttcaacagtgggcagaatttgtgctgaggctgagaaggtattcaaccaagatttatactacaagcggactgtgaagtatgtgggagaacctatgacccacttggagtctattgcttcttcagcagtgcgagctgcactcaaagttaaggcatcagtcatcatttgcttcacctcttctggacgagctgcaaggctcattgctaagtacaggcccagcatgcctgttttgtctgttgtcattcctcgtctaaagacaaaccaactgaggtggagtttcacaggtgtttttgaggcaagacaatcactcatagttagaggcctcttccctatgcttgctgatccacgacacccagctgaatctaccagtgctacaaatgagtctgtgttgaaggttgctcttgaccatggcaaagcctcgggcgtgatcaagtcccacgaccgcgtcgtcgtttgccagaaagtgggtgattcctctgtggtgaagatcattgagctggatgattagacaatcaggctatgctgttgtctactagggcacgtttttgccaatttttttgcctaggccgaaacttattggctatgtataatcctatagcgcttgaaaactgagcagtttttcctatggtgacatcataggatttgcttttacagttccaattatggtgtagttcgaaatttgctcgactaaactgcggtgtaacagttaaatgggcagatggaataatgtaatcatactgttccctcgttaggttgtcacttgaattgatgatctgggcttttttttttggttaatcctacctcttgctgcggtgcggcctgctagt

SEQ ID NO: 99284 - DNA, 291 bp, Zea Mays
atgctcgcgcccacctgctctcccgctggcacaccgcacactttgagcaaccccaagggcctgtgcgccgtgtcacagcagcccgggtccattgtgcttgtttgccctggtgtccagaaggggcaggttagggtggaacactataaggcaaggaagaccaagtttatcaatgcacacacttcctgcatcgcgtgctttgcgttgtcgcaaaatgggaggctcattgcgactgctagcaccaaggggactcttgttagaatctacaatgcagctgaaggcaatctcctgtag

SEQ ID NO: 99285 - DNA, 554 bp, Zea Mays
cctctgattcatcaagtagtccaggaacgtcgtcgtgtggttcgacgcgttcgcggaccgctgccgccagcgagccgcgcacgccggcgacttcaccgcgcggctcgtagacatcatggctggctgacacgcgggggtgcgcgtacgtgctcggtcgcaatggagggacgcatacggggatgtgtggagcggaaggccggtggcctggccgagctttatagagatggatcgagagagcggaggcgggcgggcgctggaggctgcatgtgagaagtgagaagtgagggccgaggccagcaggcggcggggctcccgtcagttttgtccgttgcctgcaggacactgtccgagtactataaaaacaaaactagccctcccctgtggcaggcggccgggcactggtgttcgggttccaaaccgcgagtcccaagtcccaacccacgcggcggcgcggtgttgccagaggcagactcgctcgtggtggcacccgtgtaggccgcgcatggaaggagacgacgagggggggagtggatgacacccccagcccacgagcc

SEQ ID NO: 99286 - DNA, 872 bp, Zea Mays
accagcaagcagcagtctaccaccatcccaccaatctcccaaattaagccatccgtcaccagccagccaaccagcactcactcactagctacgtccaactcgtacacaacccctctttctctctatcttctctccatccatccatcctctcgctcgcccttcgacagctagctaagcagtacgacgtagtatactagcatttagcagttcatcaacgcgctcaacctagcacgacgtacggcgatgaggcgccgcggcagcaactcctcgccgcttgcggctgctgccctgcccctcctactcctcctcgtcgccggctgcttccactgcatggcagcggcggctcgccacctgccttctcctggcgccccagtccaagcgctggatcaccaagccgagaacggtgtcaaggctgcatcagctggtgcagacggcgccggcggccttgtgctccaggaaggtggcacgggcaacaacggcgacgacctctcctccaaaaccctcctcgagacgacgacgacgacgatgggagcggaggcgtgcgaggaggggaacgacaaggacgagtgcgtgcagaggcggctgctcgtcgacgcgcacctcgactacatctacacgcagcacaagggcaagccgtgaccgtcagcgacgaggacggtgcatgccgcggctgcagaaaatgaggagcggaagaggagtgaaaaaatgatggaccatcctcaaaccaaatatcctataaattcacgcacaaggggaaggggatagtaatctcatctgctgctgctagctactagtacatgcatcgatcgaccttctgcgtgtgctgtatatttctgccacgctgcctatatattagcatgcatcatcatcta

SEQ ID NO: 99287 - DNA, 850 bp, Zea Mays
accagcaagcagcagtctaccaccatcccaccaatctcccaaattaagccatccgtcaccagccagccaaccagcactcactcactagctacgtccaactcgtacacaacccctctttctctctatcttctctccatccatccatcctctcgctcgcccttcgacagctagctaagcagtacgacgtagtatactagcatttagcagttcatcaacgcgctcaacctagcacgacgtacggcgatgaggcgccgcggcagcaactcctcgccgcttgcggctgctgccctgcccctcctactcctcctcgtcgccggctgcttccactgcatggcagcggcggctcgccacctgccttctcctggcgccccagtccaagcgctggatcaccaaggtacgcacacgacgacggcacacgatacgacttcgcttgcctcgaccgtaccgttcgtacgttgttgcttttgttgggcttgcttgctttgctgctcgacttaattaacgtccctgaatggaactctctctccgtccgcagccgagaacggtgtcaaggctgcatcagctggtgcagacggcgccggcggccttgtgctccaggaaggtggcacgggcaacaacggcgacgacctctcctccaaaaccctcctcgagacgacgacgacgacgatgggagcggaggcgtgcgaggaggggaacgacaaggacgagtgcgtgcagaggcggctgctcgtcgacgcgcacctcgactacatctacacgcagcacaagggcaagccgtgaccgtcagcgacgaggacggtgcatgccgcggctgcagaaaatgaggagcggaagaggagtgaaaaaatga

SEQ ID NO: 99288 - DNA, 680 bp, Zea Mays
tcccatccaacactgttccagacttccagtccagcgcccggctaatagccaagcagagcttctccctagcctttgcttgctcttccacagcgcaaagctccgagatgatgatcaggcgcggcagcagcaagatctcctcacccctcgccctcctctgcctcctcctcctcctcctcctcctcgtcatcgtctgctcctcctccaactgcgcggcagctgctcgcctcctgcctggcgccggtcctctccctcctctccgtgccgccgcccccagtggcggcgacgagcattccgcggcctccgaggtgacaacacaagacacgacgaagggagcggcggaggcgtgcgaggaggggaacgagaacgacgagtgcgtgcagaggcggctgctcctcgacgcgcacctcgactacatctacacgcagcacaagggcaagccgtgacggtcagcgaggagaacggtgctttgcgcatggtggagtacgtagatgaacgctgctgcggctagttaattaacatccggacggacgttgtcatccgtctagtagtagtagttagtatatatctatataatggctgtgtacgtctccaagtcttatctaatatatgcatgcacatggtacgtggtggacaaattaaataataacatgtataaccaacctctcttcttagttctttag

SEQ ID NO: 99289 - DNA, 647 bp, Zea Mays
accaagacggccactcccatccaacactgttccagacttccagtccagcgcccggctaatagccaagcagagcttctccctagcctttgcttgctcttccacagcgcaaagctccgagatgatgatcaggcgcggcagcagcaagatctcctcacccctcgccctcctctgcctcctcctcctcctcctcctcctcgtcatcgtctgctcctcctccaactgcgcggcagctgctcgcctcctgcctggcgccggtcctctccctcctctccgtgccgccgcccccagtggcggcgacgagcattccgcggcctccgagacgacgaagggagcggcggaggcgtgcgaggaggggaacgagaacgacgagtgcgtgcagaggcggctgctcctcgacgcgcacctcgactacatctacacgcagcacaagggcaagccgtgacggtcagcgaggagaacggtgctttgcgcatggtggagtacgtagatgaacgctgctgcggctagttaattaacatccggacggacgttgtcatccgtctagtagtagtagttagtatatatctatataatggctgtgtacgtctccaagtcttatctaatatatgcatgcacatggtacgtggtggacaaattaaataataaca

SEQ ID NO: 99290 - DNA, 737 bp, Zea Mays
tcccgcgttcctccagcgcgcacctcagctccccctataaatctctctccggccacgccgtcgtctcatcagaaccgatccttacagagagacacacccagcgcgcgagatatctacatcgatcatcatcaccagcgagcgagccggccgagcagcaccgatggcggcgtacatgcgcgtgacgcaccgcgacgaggaaggcaagaaggtgacggagaagatgccggtcccggagacgcggcgcccggacacggccaagcacttcgagcgcaagctggaggagcagggcctccaccgcttcgagcggcacccggcgaacgcgccccggggcgtgggcatcggcgccccgccgcccaagtccgggcgcggcggcaagtacacctgggagggccccggcagcgtcgtcgaggaccagctcgacccggcgccgcccgccatcgaccccaacgaccccaactacgaggagggaggggcggcggacgaggacgacgaggcggccagggaggtggtcgtcggggaggtggaggtcgctaaggtcgccgagagcagggacggcgtcgccagggtcgacgtcgcgccgggcctgctccaggaccagaagcagtaaaaggactgtcttttctggatacgtctagactctataagactgtgtgtcagtgtgttcgagtttgttccgtgcagagagtgcacgtcaactccgctttaattaatctgcttttgttaatatttttactgat

SEQ ID NO: 99291 - DNA, 2456 bp, Zea Mays
acaagcatactttgatcatagatcttaatagtgcatattttgatcttaattgtgcataccacggaggtctcagtactactgctacgacagataacgtcctgctgttacagttacctcagaaaatgttcacgataaacaacagctatgacgtgtctgaggtgtcgctttgttattagtgtggtaggagtacatagatctttacatggaagtaactatctgaaccacagaccgtgacaattcccagcagcatccagtagcagacctgcagtacacacactagcttgatgccagtttcttagattgtatcgctgacggagcaaaattagcaacgggtcgctttgtctgaaaggtgatattactatactataatttaacaagcatctatcccagctcgtctagttcagttgccagccgccggctgcagattcagacgtgtgtgataccgacaacacatgcatgccattgccatccaatccaacgtaccccgcgcaccagtcatcgtaaccgccgccgccgccccgcggctgactccgatccgagtccgagcttcgcgtcgagctcagcagccccgtctcgccacacgtagttgagtcccacgagcaggtccgtgaccgcggcctccgtcttcccccggtccgcgaagtggagcgtctgcagcagcagcacggcggcggcgccgccgccgccgctgccacaaggcgcgacgctccgctgcccgaagctcctctcggcctgccaccgggccgtgttgcgcgcgagcggcgcgagccacgcgagggtccgccgcaccgtgtccgcccacagcgcggggtcggcgcggggcgcggcggcggcgaacgacggcctcagccgcgcgcccacggacgcccggaggctgcccgtcagcatgccgtacagcgcgtccctctcgtcggcgcggatgtggtgcggcgccgccgccagcctgtcgatgaacatgatcaggttcgcgtagtgcagcgcgagaccggcgccgcccagagacgcctccggcgggtgcgccagcgcgtcgcgggaggcgtcgaacacggacgtcgtcgtcgtcggtggtggtggtggtggtggttgcctgccgtcgcccagggagtggaagctcatgatgccggcgccgctggagtggtcgtcggaatcggatacgtagctgaagctctgcgggatccacccgtccctgccctgaggcctgctgctccccgtgacgacgacgcagccgatgaggtgcttgccggccgccgccggccacctgagctgctgcctcaggctcttgctcctggacatgtggctcttgctgccggtagcggcggcagcagtcttcccggacctcgcacgtcgcagcgccgtccgaggcgcgtcggcgccggcgacgacgacgtcggaagggtacaccatgtgcatgctgccgctgacgaacgaggagccccacgagagccgcgaggccctggacgacgccgtctcctcctcctcctcctcgtcgtcgtccacggcgtagtccaggtcgaacacctcgatgatcctggcgacgatggtgaagagcgacctggcgagcaggcgcacggcgtagtcgaaggtgcgcggccagagcgacgcggcgcggatccgctccacctcctgcctctgcctggcgacgcggcgcgcgcgctcggcccggctgttgctggtcccggccccggtcccggcctgctgctgctgctgctgttccaggtcggcgagcacgtcgagctcgtggcacaggtgcgccgtggcggccacgaggcgctgcatcttgcgcgccttgcggtccatcttggcgcgcgcggcgtagcgcagcccgtgcgggtcggcggcgcggcgcttgaggagcgcggcgaagagggcgtcgaagcggcggagcagcgggtcggcgcagcgcgcggacaggcgggcgacggcgcgcgacaggtcgcggcaggcggcggccatctcggcgagcgcgagcgccaggagcgcggcgtcgtcgtcggccacgagccgccgcacgccctccaggcggatagcctcccctcggaggcgcgccaggtggtggtcgtccagcgcgcgccacagccccgcggcgcgcgacatgagcgccgccacctcgaagcccagcacgcccagcttctccccgccgccccggggcgcgctcagcttgcgcatcgcggatctgcctgactgactgcccctccctaccctaccaccgccgcgctcggtatggggcgcggcgtcgctgggttatgtatgtactgtacctgactgactacctggacgtatacgcggggtgggggtcaaaaggcgcctggctgcgcgccaacgggcaacggctttggtggtgggcgaggagagctgcagcgcggtggcatcggtagtgtcacggggtggtggtggtgggagggtggatgggagttgaaaccgagcgcgccgcggcatcggcagggggattattccgt

SEQ ID NO: 99292 - DNA, 190 bp, Zea Mays
gggacttattttataaacttgatctcacaaattttctcttatttggtctctgtatgatggaattatgtcattttataatctctgttcattcagtcaatcgttgtgaactctcttctaatcgctcacttcattggtcgtgttgtaccaagacatatttgcatggagtaaacaataacatcagttagccaaa

SEQ ID NO: 99293 - DNA, 370 bp, Zea Mays
gactaaaattatgtggtgtagtgctaaacgggctaaatgggctaaacaggcctaccgtgccggcacggcacggctaaggaggcttagtgccgtgcttgggcctggtcttaggcactagtgtcgtgccggcacagcacggctattaaacgggccaaacgggccgtgccctaaccgtgccgtgtctggccgtgctgggccgggccgcccatttggccatgtatacttgtaggtctgggttatcggtttattcggttttctctgttcggatattttcgatacagagaagtttcagttttcgaattataacaaccgttcgggtagggaaatttcagtaaaaccgaggaaatcggtttcagtttcagcggtttgg

SEQ ID NO: 99294 - DNA, 4413 bp, Zea Mays
atggatcatcgtcaagacgccggcgatggcgaggaggagcgccagcagcagctgggtgatctggagaccgacaaggaaccggtgcagaagcaagggcagctatcgccgtcgtcctcgtggcgggctgcggcggcggccagcatcagggagagcctatcccgctcgctctcctctctcagccaccagcaggaggagaaggacgacgacgaggtggagctgaggtgggcggccgtcgggaggctgcccaccatggacaggctccacacgtcgctgcagctccacgcgggccagcggcaggtggtggacgtgcgcaggctgggcgcggcggagcggcgcatggtggtggacgccctcgtcgccaacatccaccgggacaacctccgcctgctccgcaagcagcgccagaggatggaccgcgtcggcgtccgccctcccacggtggaggtgcgctggcgcgacgtccgcgtcgaggccgagtgccaggtggtgcatgggaagccgctccccaccatctggaacgccgtcgtctccggcctctctcgagaggccagggtgcgcatcctccacggcgtcagcggcgtcgccaagccttccaggctgacgcttctcctgggcccccctggctgcggcaagaccacactcctcaaggcgctcgcggggaagctcagagccaccggtctcaaggtgacaggagagatagagtacaacggcgtggagctcaacaatggcttcgtcccggagaagacggcggcttacatcgaccagtacgatcttcatgtccctgagatgactgtcagagagaccatcgacttctctgcaagattccaaggcgttggcaacagagctgagatcatgaaggaggtgattagaagggagaaggaggccgggattacccctgaccctgatgtcgacacttacatgaaggcgatatctgtggaaggtttagaaaggagcatgcaaacagactacattatgaagattatgggacttgacatatgtgctgacataatggtgggtgatgcaatgagaagaggcatttcaggcggtgagaagaagagacttaccacaggagaaatgatagtaggaccctcaaaagcactcttcatggatgaaatatcaactggattggatagttccaccacatttcaaattgtttcttgccttcaacaattggctcatatctcagagtctactatactagtctcacttcttcaaccaacaccagagacatatgagctttttgatgatattattttgatggatgaaggcaaaattgtataccatggacctaagagttgcattatgggtttctttgaatcatgtggattcaagtgccctgatagaaaaggcgccgctgactttcttcaagaggtattatccaaaaaggaccaacaacaatattggagccatagtgaagaaacctacaattttgttaccattgaccagttatgtgacaagttcagagtgtctcaaattggtcagaaccttgctaaggagatttcaaagccttgtgataaatcagaagggcttaaaaacgccttgtcttgtagtatctattcattgtccaagtgggaacttctcaaagcatgttccgcaagagagcttctcctcatgaaacggaatgccttcatctacataggaaaatctgttcagcttgcacttgttgccgcaattacagggacggtatttttgcgcacacatatgggcgttgatatagttcttgctaactattacatgggttcactcttctatgcactcctcctactgatggtgaatggattccctgagctttccatggcagttatcagacttccggtcttttacaaacaaagagactactacttctatcctgcatgggcttatgcagtgccagcttttatcctaaaggttccaatctctttagttgagtcaatagtttggacatcattatcttactttctcattggctatactcccgaggcatccagattttttcgtcaccttcttatcctcttcttgattcacactggagcattatcgatgtttagatgtgtcgcctcttactgccaaacaatggtggctagcatagtgggtggtacaatggcacttctactcatccttctattcgggggtttcatcattcctcgttcatccatgcctaattggctggaatggggattttggctttctccattatcgtacgctgagatagggttagctgaaactgagttcttagcaccaagatggctaaagttgacagcatctggtgtgacacttggaaggagagtattactggatagagggttgaatttctcagtcaacttctactggatttcaatcggagcattgattgggtttatttttttatgtaatataggttttgctattggcttgacaattaaaaagcctccaggaacttcaagagcaattatttcttatgataagcttagcagacttaatagaagagaccagtgtgtgcttgtggatactaaagatgggataaataagcaacaagaaaattcatctgctcgtagcgggactggaagggtggtattaccttttgtgccccttgcagtatcatttaaagatgtgaactactatgtagatacacctgcggaaatgagggagaaaggatacatggagaaaaaacttcaactactccacaacatcacaggagccttccagccaggagtcctttcagcactcatgggggttacaggggcagggaaaacaaccttgcttgatgttcttgctgggaggaaaactggtggtgttattgaaggagatataagagtaggaggttatcctaaagttcaggaaacttttgctaggatctcaggttactgtgaacaaactgatattcactccccgcaaatcacagtgggagagtcagttgcatattcagcctggctgcgccttccaacagaaattgactccaaaacacgagatgaatttgtcaatcaagttcttgaaacaattgagttgactgaaataagagatgctttggttggaatgccaggaataaatggactctcaacagagcaacgaaagcggctcacaattgcagttgagcttgtatccaacccttcagtcatattcatggatgagccaacatccggcttggatgcaagagccgctgctattgtcatgcgtgcggtgaagaatgttgcaaatacaggcagaacagttgtgtgcacaattcaccaaccaagtattgaaatatttgaggcatttgatgagctaatgttgatgaaaaggggtggacagttgatctatgctgggccgctgggataccgttcatctatactcatcaaatatttccaggcaatacctggggtaccaaagatcaaggacaactacaacccatcaacatggatgctagaagttacttcaacatctttggaagctcaactaggactcgattttgcacaagtttacatggactcatcaatgtacaaacatgaacagcaaagtctattcaatatattgggatgcatgtatggcaccactatattttctggcatcaacaactgtcaatcagtgatgccattcgtttcgattgagcgatctgtcgtgtacagagaaaggtttgcaggaatgtactctccttgggcttactccttggcacaggtcactatggagattccttatgtgcttgtgcaaatagtgttgttcatgttgatagcttacccaatgatagggtatgcatgggaagcagcaaagttcttctggttattgtataccatgttctgtacactgctctacttcctctatcttggaatgttgatggtgtcggtcactccaaacatccaagtggcatccatattaacatctttgttctacaccatacaaaacctcatgtctggattcattgtgcctggtccacaaataccaaaatggtggctctggttgtactatacatctcccatgtcatggacactcaatgtattcttcaccacccagtttgggtatgaagatcaaaagaagattgacgtatttggggagaccaaatctgttgcagcattccttaaagactactttggtttcaaacgtgaattgctaccactgtcagctatagttctagcagccttcccaatattctttgccgctctattcggttacagcatttcaaaactaaactttcaaaggagataaattagtaaacaatcaaaagcaaaatagtgcttgcatagtgcaacatataaatttatgcacatgtatttacaaaaagtaaattttgttttgccctctgatacaaaaggtcaatattatgtacattagatatgtgctacactgctaattattagcttgtgtttggaataagtggttgagtaacaaacaatgcatatagaatggaatgtattatgtggcatgtataaaatacaaattgtattcatcatatgtaattgcttgaaatatatttctcttcatttc

SEQ ID NO: 99295 - DNA, 951 bp, Zea Mays
atggcgagagctagcccaccacccgcgccggcaagcggtagcaggctccagttgttgtactgtacccacagcaacgggcaactccaccgaaccgcacgcgaaagcaggagatcggtgggggtggagcgggggtggggagggtgggttggattcgaagcttgcgttgcacgggacagatctacagctgagcggtggcgtgcgggcacagattggaatcgcccgccgacccagagcgcggggagggaggtgggcgaatcgcgatcggcacagcggaatggaagcaaaaagcaacccagggaagggggggggatggttaaggaggaggacttactgggagccgtcgtcggagtcggaggcttgtgcggcggcgtaggcgcgggtggggaaggcggcgggatcgaggcccggggcgtggtggtggtggcgggcggcgcggaacgacgggaaagggtcggggtcggcgtagccgtgggcgtagtgcgggagcggcggggcggccgcgaggcgggcgcgggcctggcgccggcgccggcggacgagcgcgcaggcgaggcgcgtgcagacgaagacgatgaagaggacgctgaagcagaagcccgccagcgccagcgccatgctcgacgacacgccggaccccatcgagccgggccgagaggggagggtggagcctgtggcgcggtggactggtgccgagtgccgagtgcgggctgtcggggctccctcagttgctgtgcctgtgcgggcgccgggcgggcgggcggctgtgtgcctgtgtactgtggaccccgtgttggagaggagagagagacaacagaatgtgccgttgcgcactcggcgctgggtctttggacctctcttgggctgggccttggctgcctccaagtctgcaacggacggcggtataatactccgcactggtacaagatagtagaacatatactcctcctatag

SEQ ID NO: 99296 - DNA, 1984 bp, Zea Mays
gtcggcgaatcccaatgccatatatgacatatttcctatctagtagcatgctcactctctctcaaagatttgaccttcctcactctcttcctccacgatgaggcaaggcaagggtgatccggcgatcgccgctctcgccattgccatcgccgtcgttctgctctgcgtggcatcgtcggcggtgctcgcgatcgacggggccaaggcagaagaagagcttccgacgcagctgctgaacggcttcgccgcgacgcacgcggccggctccgcggcgacgttcgagccggtgctgtacgcgaccagcgccgtcttcgcgctgggcttcctccgcgtcggcccggcgtcgctggacctcgccgtggtccacctgccgtcctccttccccgtctggcgcgccacgccggcgcgcctcggggactggtcgcgcccggccacgctcgccttcgacgacggcaccctggtcctcgcgggccccgacggcgccgtgctgtggcggacgctcaacaccgtcggcgacaccgtcgcgctgctcaactcctccaacctcgtagtgcagcggtacgagaatccccagccggcgtggcagagcttcgaccacccggccgacacgctcgtcgtggaccagaacttcaccgcctcgtcgtcgccgctcgtctccgcgaaccgccgcttcacgctgcagctcggcaggacgtacatggcgatgcacatgcagttcgacgccggccaggcccaggccgcgacggcgcccgtgtactggaagcacacggcgctcgaggcgcacctggagaacgccacggcgccgcctgtctacggccgcctcgacgccctcgggttcttcggcctctacctcgacggcggcggcggccagagggtggacgtgctgtcgttcgacacgttcgccctgaacctcaccggcgtcttccggcggatgacgctggacgacgacggcaacctccgcgcgtactactggaccaccggcgactcaagtgcgtggacgtcggattacaaggccatcgcggagcggtgcgagctgccgacgtcgtgcggcgcgtacggcgtgtgcgtccccgggaacgcccagtgccagtgcctcgacagtaacggcacgagcaccgccccgccgtgccacggcgaggacaccgccgacctctgcagcaccgccagcagcaacggggcgcggcagctgggtttcgacgtggtgcggcggacgcgggtgtccgtggcgtacaaggaggagctgccgttccggacgaacacgacggcggacgggtgcgagctggcgtgtgcgggcaactgcacctgccggggcgcgctgtacaacggcgcgagcggctactgctacctcatcgacttccctgtggagacgctggtgtaccaggccgacgaccggatgctgggctacttcaagatcaggaaggcggcgacagcgaactcggcgcggcgaggcatgtcgccgggcgttaccgccgcgacggtggcgctgtcgctggtcctggcaggcctggctgcggccggagcgtactggggctacaggacgtgggagaggaggaagaggaaacgagcggggatggagcaggagctggttccggggccgtacagggacctcaagtccatggccagctctaacaattcgttcaaagcatgaacccaaccatgagagtgttggttgaagttgaaggtcaagcgcactggagtggagttggatgagtcatttgctagtcgcacaacgtgagattgatcataggcccaggcctcctctccttgatgaattgcagagtctggagacgaaaatgaatccagccatccaggtacctcagatcctcagttcgggagtccaaaaatctggagaattggagaagccaaaatctcatccttattgaaaattgaatgaggagattattttagtctctctaattttctccaattttgtggctctcgaactagcctaaaagtaaagcaccgaaagaatcgatgacagact

SEQ ID NO: 99297 - DNA, 252 bp, Zea Mays
atggtgagggataccgagcgcatcggccacaaatccccgccgtgcgaagccatgaacatcacccacgcgttgcgaagaaaccgcacaggggtcggcgtggaggtgaatacgggcaccgaggcggaagatggcgccgcggacatcccgacaccggtgaggaacaggagcgcggaatgcgtgcctaggtgccccgccaccgccgtgaccccgatctgcgcagcaaccgtggcaaacaccgcgccgcgggtgtag

SEQ ID NO: 99298 - DNA, 1455 bp, Zea Mays
agtcccagcgatctagagagaagcacgtgcagggtgcaccgctgcatcggaacgaagaactagcatgggggtggccgccggcggtggggcgcggctgcgtgccagcagcgccaagaagcagcggcagcggaccctgaacaacatcaagatcacgctcctctgcggcttcatcaccgtgctggtcctccgcggcacggccggcttcaacctgctggtcagcagcggcgacctggacggcgcggcggcggacgccaaggtggtggaggacgtggagcgcatcctggccgagatccgctccgactccgaggcggacgacgtggtggtggtggtcgagggcgggtcgtcgtcgtcgtcgtcgccgcgcaacgcgacggcggccagcttcggcaacttctcggcgtcggcgacgctggtcaaggtgcgggagtacagcctgggcccgcccgtgcggggctgggacgcgcagcggcgggagtggatggcccagcaccccgagttcccgcgactccacccgcggggccggccgcgggtgctgctcgtcaccgggtcgccccctggcccctgcgacaaccccgccggcgaccactacctgctcaaggcgaccaagaacaagatcgactactgccggctccacggcatcgacgtggtgcacaacatggcgcacctggacccggagctgacggggtactggtccaagctgccgctggtgcgccgcctcatgctggcgcacccggaggtggagtggatctggtgggtggacagcgacgccatcttcaccgacatggcgttcgagctcccgctgtcccgctacgacggccgcaacctcgtcatccacggctacccggacctgctgttcgagaagcgctcgtggatctcgctcaacgccggcatcttcctgctccgcaactgccagtggtcgctggacctgctggacgcctgggtgcccatggggccccgcggcccctcccgcgtcgaggccggcaagctgctcacggccagcctcacgggccgcccgcccttcgacgccgacgaccagtccgcgctcatccacctgctgctggtgcagaaggagcggtggatggacaaggtgcacgtggagacggagttctacctccacggcttctggacggggctggtggacaggtacgagcagatgatggaggacaaccacccgggcctcggcgacgaccgctggcccttcatcacccacttcgtcggatgcaagacctgcggcaggtacgaggactatccgctcgaccgctgcatccggggcatggagcgcgccttcaacttcgccgacaaccaggtgctcaggctctacggattccgccaccgctcgctcaccaccgccaaggtcaggagggtcaccgaccccaccaccaacccgctcgaggcaaaggaggccgcgctcaacatggacgccaagttcacctagaaaacatcagttatacttac

SEQ ID NO: 99299 - DNA, 1947 bp, Zea Mays
tatagtctctatagacaaagcctcctcgaccagtcttgtgccgcacaaactctcacacgcattttcctctccttctcggcttctccccctccctgtgtgtccagttgtgcactagctaattctagacggcaagcaggcaagaggaggaagaaggaagaccccggcgaggcgccatggaagcagcagctgatgccttgccctgggcagcgcagtgcgcgggcatggccctcctcgcctcttccctctgcgtggtggcgctggccctggtgctgctgctcctccgccgctggccgtggtgcagctgccacgtctgccgggcgtacctgacggggtcgtgggcgcgggacttcaccaacctgggagactggtacgcgcacctcctccgggagtcgcccaccggcaccgtccacgtccacgtgctgggctgcaccgtcacggccaacccggccaacgtggagtacatgctcaagaccaacttcgacaacttccccaagggcaagaccttcgcggcgctcctcggggacctcctcggccgcggcatcttcaacgtggacggccacgcctggcggcaccagcgcaagatggccagcctggagctcggcagcgtcaccgtgcgctcctacgcgttcgggatcatcgcgcaggaggtggaggcccggctcctgccgctgctcgccggcgccgccgactccggcgcggtggtcgacctgcaggacgtgttccgccgcttcgccttcgacaccatctgcaagatctccttcggcctcgacccgggctgcctggagccggagatgcccgtgtccgagctcgccgacgcgttcgacaccgccacgcgcctcagcgccacgcgcggcgccgccgcggcgccgctgctgtggagggccaagcgcctgctcaacgtcggctcggagagggagctcagggcggccatcaagctggtcgacgagctcgcggccaccgtcatccgggagcgccgtaagctgggcgtcgcacccagcggccacgacctcttgtcccgctttatggcctcagccggggccgacgacgacgataggtacctgcgcgacatcgtcgtcagcttcctcctcgcggggcgcgacaccgtgtcctccgcgctcacgacgctcttcatgctcctgtccgagaacccgggcgtggcggccgccatgcgcgccgaggccggcgacggcgacggcggcccggcgccgccgctcacctacgagcacctgaagcgcctgcactacacccacgcggtgctgtacgagaacatgcggctgttcccgccggtgcagttcgactccaagttctgcgcggggcccgacgtgctccccgacggcacctacgtgccgggcggcacgcgcgtgatgtaccacccctacgccatgggccgcatgccgcgcatctggggcgccgaccacggcgccttccgcccgggccgctggctcaccggcgccggcggctcgttcgtcccagagagcctgtacaggtacccggtgttccaggcgggcctccgcgtgtgcctcggcaaggagctcgccgtcaccgagatgaaggcggtcgcggtggccgtcgtgagggcgttcgacgtccacgtcgtcggggacagtagcagcgccgcctgcaagccgaagttcgtgtcggggctcaccgcgtccatcagcggcgggctcccggtgaggatcagtagacgagttcgaagctagagattcttgttttcttctaaaaaacctaaaaaaaacaagtagaggctagatcatcggtagattgtttcatcgcggataatgtacatagacaaattcaaagaagagggaacgaaagagcaagcatgcaacagaaagcaaactgttaccaccactgtttgatgagatgagtccactggcctgcctgtgattagcaaacagttcatttcgtcttcttcgtaaagaaacaatccgtttccgtgattca

SEQ ID NO: 99300 - DNA, 1776 bp, Zea Mays
gagaataagtgagaaaaagattcgcttcctacgcgacgcctcgacctcgattccccattcccttttcccctcccgcgcctctgcctccctctctctcgtcatcttctaccggcacggcgcagcaccggcaccgcggcacggcgcatggagatggacccgccgccgccgccacccctgcacgccgaccgccgccgccgcttccgcgactacctgctggcgctggaggaggagcgacgcaagatccaggtgttccagcgcgagcttcccctctgcctcgacctcgtcacacagactatcgaggggatgaggagtcacatggacagcgtcgtcgtcggcagcgaggagacggtgagcgaccacggcggccccgtactggaggagttcatgccgctcaagcccacaaccctctcgtcgtcctcctcccagccccattaccaggacgagcacgacagcgcccactaccttgaacaccgccgtggttccgccgccacggccaacgacgtcgtcgatgccgacaaggacggcgaggcggtgggcgatctggagacggcagcagccagcagcagcaggccgttgccacatccggaaacgaagaaggcgatgccggactggctgcagtccgtgcagctctggagtaaccaacaacagccctccgcgtccccgccgcagcaccaggatgagctgctgctgccgtgcaggccggtggcgctcaacgcctgcaggaagcccgggggcgcgttccagccgttcgagaaggagaagaagaagaaggacaaggaggagaagcagcgcgccgagctggagctgccgctgcccgccgcggcgagctcggccgtggtcggggacagctgcgacagggccggcgccaccgacacggacaccgacacggccgagaacaataaggccagcagcaacaaaggcggcaacgacaaggaggctcagctgtcctcgcagtcgcaggcgcccagccggaaggcgcggcggtgctgggccccggagctccaccgccggttcctacaggcgctgcagcagctcggcgggtcccacgtggcgacgcccaagcagatacgggagctcatgaatgtcgacggcctcaccaacgacgaggtcaagagccatttgcagaagtatcgtctccacactcggcggccgaactcggcggcggcggcggtccagagcggcggcaccagcgtcgttgctccgccggccgcaccgcagttcgtcgtggtggggggcatctgggtgccaccgccggagtacgctgccgctgtcgctgtcgctgcggcagccgcagcgcagccgcagcaggtgcacctagccggcgacgcgtcgggaacgacgacaacagccgccgacaaggtgtacgcgccggtggcgacgacgttgacgcccgcaccgcgaccgcgaccgcgaccgcgtccggagaggcagtcgagcagctgctccggcgcgcggcgcagcggggacgcctgctctggctcgccggccgtgttgtcgtcgtcgtcgcataccgcctctgcctaatgaaacgccgtcggtcggtcggtcgccaactcggcttctaattttagctgattattacgtccggaggtacagacagtcagacgtacacacgtgaatctgggagctccttcttcgtgctagcttgaatacgataatatgatccagcattttgctctctgtttttgtgattaaagatgaaaaaagaagagtggtacgcgccctgcagaccacaattgttttgtactagttaaaaaaatacttttggtgttgttt

SEQ ID NO: 99301 - DNA, 115 bp, Zea Mays
ctatcacagatttacacttttcaggaatgcaaaaaactattttatttcctgtcaagaaacgaacgaacagatgtgatggggaccaagggcaatacactcagtttagaagaagggg

SEQ ID NO: 99302 - DNA, 225 bp, Zea Mays
atggagcgcgcggagaacgagcggctgcggagggtggcgcagcagctggaccaggggaacaccagcctgtgcctggagaacctgctcatcatgcaggagaacgaccggctgcggaggaaggcgcagcagctggaccaggagaacaaggccctcctcgccgagctcaagcagcgcgaacaaggcacttccgcttccgcgtccaccaacctgaagcagcccaagtga

SEQ ID NO: 99303 - DNA, 1307 bp, Zea Mays
atggccacggcggcgctggcgctcctcgtcctcgcgctgccggcgtccctcgccgtgacgtctacgtacgtgcggccgccgccgagggccacgctgtcgctgctccaggacgccggcagcgacggccagacgccgcagcaggtgcacatatcactggtagggccagacaaggtgcgagtgtcgtggatcaccgcggccgacgcgccggcgactgtcgactacggcacggcctccggccagtacccattctccgcgacggggaacactacgtcctactcctacgtgctctaccactcgggcagcatccacgacgccgtcatcgggccgctgcagcccagcacaacctactactaccgctgcagcggcagcgcctcgcgggacctctccttccggacgccaccggccgtgctgcccttccgcttcgtcgtcgtcggggacctaggccagaccgggtggacggagtccaccctcaagcacgtcgccgccgccgactacgacgcgctcctcctcccgggcgacctgtcgtacgccgacttcgtgcagccccggtgggactcgtacggccgcctcgtggagccgctggcgagcgcgcggccctggatggtgacgcagggcaaccacgaggtcgagcgcctgccgctgctggagccgcggcccttcaaggcgtacaacgcgcggtggcgcatgccctacgactatgccgccgacggcacaccgccgtcggacgacaacctcttctactccttcgacgtggccggcggcgccgtgcacgtcctcatgctgggctcctacgccgactacgccgcggggagcgcgcagctccgctggctccgcgccgacctcgcggcgctccgccgccgcggcaccccgccggccttcgtgctggcgctcgtgcacgcgccgtggtacagcagcaacaaggtgcaccagggggagggcgacgccatgcgggacgccatggaggcgctgctgtaccacggcgcgtcgacgcggtgttcgcgggccacgtccacgcgtacgagcggttccaccgcgtctacgccggcaaggaggatccctgcggccccgtctacgtcaccatcggcgacggcggcaaccgggaggggctagccgacaagttcatcgacccacagccgtcgatctcggtgttccgggaggccagcttcggccacggccgactcgaggtggtcaacaccacgcacgcgctctggacgtggcaccgcaacgacgatgaccaacccgtggttgccgaccaagtgtggatcaacagcctcgcggccaacccagcttgcaaccgaagcgacaag

SEQ ID NO: 99304 - DNA, 103 bp, Zea Mays
ctcgatactattttggttttcatatttctctctatacggatatagtcatttaaccaaccatcctacgaatgaaaaaacagtcaaagagttaatgtaaaaaaaa

SEQ ID NO: 99305 - DNA, 119 bp, Zea Mays
tctgtgtgacgaggtcgaggcagaggggcagctcgcgctgaaacacctggatcttgcgtcgctcctcctccagcgcgagcaggtagtcgcggaagcggaggcggcggtcggcgtgcagg

SEQ ID NO: 99306 - DNA, 345 bp, Zea Mays
atggccatggtcatcaaatttcaggttatgacagacccagatgttccaggaccaagtgatccatacctaagggagcaccttcattggatcgtgactgatatacctgggacaacagatgcctccttcgggcgacagatcataagctacgagagcccaagacctagcattggtatccacaggttcatttttgtgctcttcaagcagcagggtaggcaaaatgtaactgtgccatccttcagagatcatttcaacacccggcagttcgctgaggaaaatgaccttggcctccctgtagctgccgtctacttcaatgcacagagagaaactgctgctaggagacgctga

SEQ ID NO: 99307 - DNA, 2915 bp, Zea Mays
atgccattcaacatcccacactgcaaatcacaagctcctgtatcctacgccgtagcagctgtttccagcatccgcttctcctcttcctcctccctgccggcgctggttccgccgcctccgcgcctgcacgaggagaacccgttcgccgcgctcctcgcctcggaccccccaccgccggagcctctccgccaggtgctcgccacgggcgacgtccactccgcgctccgcggcctcccgggccttgcgcaccagctgttccggtgggcggagaccaccccgtgtggcttcccccgctccgcctccgcgttcgccgccgtcctcgtcccgctcgcccgagccaaccacatccgggtcgcctatccagtctccctccgcgccctgcacctcggcctcctcctccccctcgtgtccctcctgttatccggccccctcgctcccgcccctctgtcactattgaacctcctcttaagcttgtccaccaaatactccaaggaatgcaaagcccgtgacgccacgcccgacacatgttcgacgttgtgcctgtccgccttccgcgagatggcaagccacggggtggcccctgacgttaaagactgcaacaaggtgctccgtgtattgcgtgatgcggccaggtgggacgacatgtctgctgtgcatgcggagatgctccagctcgggattgagccaagtattgtcacatacaatactttgctggattctttctcgaaggagggaaggaaggacaagattgacatgctgctgaaggagatggaggcccgggggagcagttgcttgccgaacgatgttacttataatgtggtgattgctgggttggctaggaaaggttatctcgaggaggccgcggagctggttgaggaaatgcggctgtccaagaaggcttcgtccttcacttataacccacttatcactgggttgcttgcaaggggctttgtcaaaaaggttgatgatttgcagctggagatggagaatgagggcattatgcctacagtagtgacgtacaatgcaatgatccatggactgcttcaaagtgggcagatagaggctgcacaggcgaagtttgtggaaatgagggcgatgggcttgctaccagatgtgatcacctacaattctttgctaaatgggtattgtaaggcaggtaatcagaaagaggctcttttgttgtttggcgatttgaggcgtgcagggttagcaccaacagttttgacatataacattcttatagatggttattgtagattaggtgatttagaggaagccaggagattgaaagaggaaatggtagagcagggttgtttgcctgatgtttatacctatacaattctcatgaagggttcacataatgtgtgtagccttgctatgacaagagagttctttgatgagatgctgagcaaaggtttgcggccggattgctttgcctataatacaaggatttgtgcggagataaccctaggggatatttccaaatctttccagttgagagaggtaataatgttggaaggcatatcttccgatacagtgacatacaatatccttattgatggactgtgcaagactggtaacctgaaagatgccgaagagctgatgatgcagatgatcagtaatggtttacagcctgactgtatcacatacacctgcttgattcatgcacactgtgaaaggggattcctaagagaagcaagaaaattttttaatgacatgatctcagatggtttgccaccctcagctgtgacctacactgttattattcatgcatattgtagaagaggaaacctttattcagcatatggttggtttcgaaagatgctggaggaaggagttgaacctaatgaaataacatataatgtcctcatacatgcattatgcaggatgggcagaactcaactggcttatcgtcatttttatgagatgctagaaaggggattggtgccaaataaatacacatatactttgttgatagatgggaaactgtgaagagggcaactgggaagatgcgatgagattctattttgaaatgcatcagaacggtattcatccagattatgtaacacgtaaggccttgttcaagggatttgatgaaggtcacatgcaccatgcaattgagtacttggagaatgtcgttttgggtgaatagattgatcgagctctgaaagcttgtccttttgtccttgctttgctgatatctccctgccagagatgatagatggagttcatggaccattcgtttcaaaatggaaagaaaaagagagtttgaaacaatattctctgattaagccgctgggtggtttctaaacaaatagttgagcacaaacaggccttcctcttgctgctcagagatggtagaggaagtttgggccttgggggcaattccatccaaaaagaagaaaaaagaaaagcaagacctttttagaccatgttctcttagttaatcagcttggtgcttcccaaatgaatagttgatcacaatcaggtcttccccccttgctgcttaaaccttgccatgattcttttcttggcatcatagccatggatatatgtgtttagtgaaaactgggtggtaggcatctgctctgtttctagaaacctcacttgatacaattctgacccctttgttatttccttttgatgaggtatactggaaacctgttggccttcgattccttacccaactagctctgttagtaaaatggccataggccattgcgactgagctttcttcaattatttgtaggatttctcttggtaagaacataccaaggtttttttttgtaactaataattcttgtatcatcatcaattttgccataaacataagccatagtatattgacttgtcagaaatgtaactttattagtattgattgaatcatttagcgagaatattattcatttaaaaaa

SEQ ID NO: 99308 - DNA, 1463 bp, Zea Mays
cccgctttccgttccgtccccggccggcgccaacgccaacgccactccagtaagccgaagcgaggaggtggagacggtcacggtgggcagagtggcacgactctcgattccgccccgctccagattgctgtgctcgcccactcactcacccatggcgctcgccgcctcccaccaccgcctcctgcccgtcgcccccacccccgctgccacccgtaccccgtcgcgggggcacctgcgcttccgcgccgcgcgacctctgccccgctcccggagaatttgttgtcaatctatcaactcaactaatgttttgggagcttcttcgaagacatctgatgaggcaatcccagtcccagttgtccagatagatcaagactcagaccgtgatgcaaccattgtgcagctaagttttggagatcgtttgggggcattacttgacacgatgaaagctctcaaggaccttggccttgatgtctcaaaaggaagtgtggcaactgactcagctgtcacacaaacaaagttccacatcatgcgattcgggcgcaaggttgaggatcctgacatgttagaaaggatacggctaaccatcatcaacaacctgctccagtatcatcctgaatcaagtgagaagttggcaatgggtgaattttttgggataaaacctcctgtgaagaaggttgatatcgatattgcaacacatatagttgttgaagacgacgggccaaaaagaagcatgctttacatagagacagccgatcggcctggcctacttcttgagataatcaagatcatcgcggacacaaatattgatgtggagtcagctgagattgatactgaaggtttggttgcgaaggacaagttccatgtgagttacagaggtgcaaaactaaacagctcctcatctcaggtgttgatcaattgtctgcgttattacctccgaaggcctgagacagatgaagacagctattgactgttgtgttgttgaaccttgctagtactacattaaaaccagaaacttcaaagtttggcttgagttccttctctatgagcccccctgtactgctgcaaatggagtttccattgtagctgataaagtgcaggcaaggcacatgctaatgtgcataggtggcattgaaattgggctcacagtcactgaaccagtttgatattttgtagtcatatacagctgggagcaacagaagttaggtgtcgatcatcattatcccatttggttcctgttacaagggatcacattggaaggtcatcacatgattgacattgtctgtaagttggtacaatccgtttgcatgtaaaactcagctgtggagtgtggtgttctctttggatgaaataaaaagaaagagcattacgaaatcaccgacctccttggtcctgatcagatgtgcttattgtaaccgttttgatatggtcaattggaagagctaagtttatattgaatctttttc

SEQ ID NO: 99309 - DNA, 1368 bp, Zea Mays
cccgctttccgttccgtccccggccggcgccaacgccaacgccactccagtaagccgaagcgaggaggtggagacggtcacggtgggcagagtggcacgactctcgattccgccccgctccagattgctgtgctcgcccactcactcacccatggcgctcgccgcctcccaccaccgcctcctgcccgtcgcccccacccccgctgccacccgtaccccgtcgcgggggcacctgcgcttccgcgccgcgcgacctctgccccgctcccggagaatttgttgtcaatctatcaactcaactaatgttttgggagcttcttcgaagacatctgatgaggcaatcccagtcccagttgtccagatagatcaagactcagaccgtgatgcaaccattgtgcagctaagttttggagatcgtttgggggcattacttgacacgcgggcgcaaggttgaggatcctgacatgttagaaaggatacggctaaccatcatcaacaacctgctccagtatcatcctgaatcaagtgagaagttggcaatgggtgaattttttgggataaaacctcctgtgaagaaggttgatatcgatattgcaacacatatagttgttgaagacgacgggccaaaaagaagcatgctttacatagagacagccgatcggcctggcctacttcttgagataatcaagatcatcgcggacacaaatattgatgtggagtcagctgagattgatactgaaggtttggttgcgaaggacaagttccatgtgagttacagaggtgcaaaactaaacagctcctcatctcaggtgttgatcaattgtctgcgttattacctccgaaggcctgagacagatgaagacagctattgactgttgtgttgttgaaccttgctagtactacattaaaaccagaaacttcaaagtttggcttgagttccttctctatgagcccccctgtactgctgcaaatggagtttccattgtagctgataaagtgcaggcaaggcacatgctaatgtgcataggtggcattgaaattgggctcacagtcactgaaccagtttgatattttgtagtcatatacagctgggagcaacagaagttaggtgtcgatcatcattatcccatttggttcctgttacaagggatcacattggaaggtcatcacatgattgacattgtctgtaagttggtacaatccgtttgcatgtaaaactcagctgtggagtgtggtgttctctttggatgaaataaaaagaaagagcattacgaaatcaccgacctccttggtcctgatcagatgtgcttattgtaaccgttttgatatggtcaattggaagagctaagtttatattgaatctttttc

SEQ ID NO: 99310 - DNA, 1247 bp, Zea Mays
atggcaactttgggtcagtggcgcttaaagcactttctgacaatcagaaggcttgcgcagaaccgagaagctgcgcgcaaaagccggctgcgaaagaaggcttacatccagcagcttgagagcagcaagctgaagcttgcccaaatggaacgggacatgcagagagcacactcccagccccagggcgtctttcttggaggagctccaggtgcaaacgccagctcaggcgcggcaatgatcgacgcggagtacgcccgttggctggatgaccaaggccagcgcaaggccgagctacaaggagctctgcaagcgcacttgcccgacggtgatctccaagcgatcgtggatgacaccctgacccaccacgacgagctgttcaggctgaaggcttcagcagccaagtccgacgtgttccacgtcatcaccggggcgtggacgacccctgccgagcggtgcttcctctggatgggtggattcaggccatcggatctggtcaagacgctgctgccccagctagaccccctgaccgagcagcagcaactggtaggcatatgcaaccttaagcagtcgtcacagcaggcagaggaagctctctcccagggcctggaccagctgcatcagtcactagctgacaccatggccaacggatcgctgatcgacgacaccagcatgagcttcatgggtcaaatggcccttgcccttggcaagctgtccagccttgaagtttttgtgatacaggctgataacttgaggcagcagactcttcatcagatgcgccggattctgacagttcggcaggcagctcgctgtttccttgccatcgccgggtaccagaaccgcctgcgcgccctaagctccctctgggtttctcggcctcgagagatactggttgcagatgaaggcgactgtggggagatgagcgctgcagcataggcaggcatcccaaagccaatttccgtccttctgattcaggcatgactcggagctctaaccaaccttctgactcaggagcaagggagaaacgactgggaagtggaaagagaggttttggatgccatcagatatatctgagaggcactgaagagatctggggaatggaccaagctttagaacagggaaatgatccgtctgaaaacgtgcggaacctgtaggagcagtttccaggacgtgaaaaattgttctgttcactggagccgtgcccagtacactgcacgttcttctggttctgtctggtctcaattctcaaa

SEQ ID NO: 99311 - DNA, 2890 bp, Zea Mays
gagggggaatgagaaagacatttgatagtcgggaatggaaatgtgaatgagctttgcagggagggggaatgagaaagacagacaactgagtctaccccttaccgtcttaataggtagtacagattatttttgataatatagagtgtcatgaaaatcaactagtttctataaattagagtcgcatatttctattcaacttttttttaccacaatcgggtgaggggcgtccattgcgagttgcgactgcgtcgccgattcccctgccggcatgtccagtccgcgccctcccctcggccggatcctccgcctcgccgtcgccgtcgcggcctgcgcctgctttcctagccccgtctccggcatccggaagggcattgactttattcaaccaattgtgtgcagaagcactgttcaggggcggcatctgatctctgatgataatggttatgtatgttctgcactttcaatcaatccatggtctcactgctgcccaacaacaggggaccgcttttcctgccagggctgcgaacttgatttacagtgctgcaattcatatgaatattgtgtttcttgctgtttgaatccttctaagatcaagaaagaagacgtgctgaagctgaaggtagctaagccagttactgctggaacatacacaaatgttttcgatttctgcatgggacgatgccgccatagctctgcaagtgtggttcatgaaaatgcctatgccagtgatttccatcactgtttttcagtgcaacaaaattcatcaggatcaactgagtctagttctgtatcaaagttgttgggcattaacgttgtagtaggaaggcccagggaatcttgcagcttggtgtgcaaagtaagaggacagtcctgtgttccaagcaggctctctgtgttgaacaaatgtgagattttgcagaaatatatgagatgcaagagtggctgctttcccagccttggaccagatcaacctgctgaagttgttgacgaagctccaaccagcttgaatccaggagcatgcttatacatgcagatggatgagcggctcacatgtgatggttcgcaccatcatacccggcggctctgtccatgcgcctgagaaggggaaatgaatgtgacactcataagacagcagaggggaaacaagtggaggcgataagctgataaccgatggttctccatcacacccccatgacgaacaacctctccacgcaccggttgcgggtttcctcaacaagaacgccctactctcctcctgtttctgggaaggattatggatgcaaaatgaaatggagtgcctgcaaagatctgctccggttcttgagaagcgtcgtggatgcagaaggagatgcaatacctttcaaatccttgcatggtatctggtaggattttgcatgctgaatgaaaatgcacgcaggcgattccacgagcctttcatgcatgttttgagacacctgaaccaattatatatattcgtaatatattgcacaagcttccatgcatgttttaagacaaaagtaacccaaacagaactacggatacatgatcttttaaatcaattacaccatgccagcatctctgcaccacaaactcccatgcccctttttttttggtttccttcgccagcctgaatcaaaaagaataatcaggcttgaaatctctcatggacctgggtctctccctccctttgttatcatctttggtgtttgcactctcttctgcagcagcagctccgtctccctggtcctcctcctggaaggccgggtgggtgaggatgttcgccaggagctgcgtgcccctgagggcgttggtgagcggcaggtgtccctcgggcgtgtcgtccgtcaactcccacaagaactcgtcggggaaggccctgtagttgtactgctccacctccgtgtccagcttcctcatccagccgacccggatgaagaagcgggtgaagtcgcgccgcgacttctcccagagccgccgctgcacgctgtacccgaacctgccgccgctgtgctccttccagagcccgtcgatggcggcgaggtcctcggccgggatgaactggacctcggagaagaagacgtaccctcggcgcctcgcgggctcgccggcgaggtcgatgatcagcgcccgcgtggtctcgtccgcctgccggtagtcgcccgcggcgagctggcggcggaggaggtcgagagaggggccttcttcttcttcttcgtcccctgccgctggtgcagatgccggggcaactggagtcggagctgacgaattggtggctgaggctgctgtcaccgagggggaggttttggtgtagagcctgaaggaaatgctgccgctggtgttggtggagagcttgtgcacggcggacgcggagccgtcacggctgccgccggcgccggcgaaagaatggtcgtgcgggagaaggaaggattgcagagaagcgtttgccatgggtggcaggaggacgcagctgagctgagagcctgagactgagaatggaggggagggagacgatgataaaggagcgagtggatggggtttagtgctgcgagagctgagctgggtggtggtcgtcgtgtggtgtggagaattgaggccgtcgtgttgcctttgtgtgtgtgtgtgttcttgtgacagtccacctttgtgggtgtcgtgtgccaagtcctggcctcgatggctgtgggagattttgggcggtggttttttagggggcccattctgggcgagaatacgaaggtggggctgtgattggtgggttctgggtgagatgaggatactggctatggcaaacaatccaaacaccaacggagatagggtctgtttcgtttagcttcttttcttgacgatttctgaaaatctgaccgttagaaaaaacctgagtatcataagg

SEQ ID NO: 99312 - DNA, 2997 bp, Zea Mays
gtgaatgagctttgtaggagggggaatgagaaagacacgtgatagccgggaatggaaatgtgaatgagctttgcagggagggggaatgagaaagacatttgatagtcgggaatggaaatgtgaatgagctttgcagggagggggaatgagaaagacagacaactgagtctaccccttaccgtcttaataggtagtacagattatttttgataatatagagtgtcatgaaaatcaactagtttctataaattagagtcgcatatttctattcaacttttttttaccacaatcgggtgaggggcgtccattgcgagttgcgactgcgtcgccgattcccctgccggcatgtccagtccgcgccctcccctcggccggatcctccgcctcgccgtcgccgtcgcggcctgcgcctgctttcctagccccgtctccggcatccgcagttgaaggttccttgtacataacgccgagtacttgcaccactgaggattcacttggtcacgggttgggacctcatgcttgattctagtattgacgtgtgctgtgagggcagaaggaagggcattgactttattcaaccaattgtgtgcagaagcactgttcaggggcggcatctgatctctgatgataatggttatgtatgttctgcactttcaatcaatccatggtctcactgctgcccaacaacaggggaccgcttttcctgccagggctgcgaacttgatttacagtgctgcaattcatatgaatattgtgtttcttgctgtttgaatccttctaagatcaagaaagaagacgtgctgaagctgaaggtagctaagccagttactgctggaacatacacaaatgttttcgatttctgcatgggacgatgccgccatagctctgcaagtgtggttcatgaaaatgcctatgccagtgatttccatcactgtttttcagtgcaacaaaattcatcaggatcaactgagtctagttctgtatcaaagttgttgggcattaacgttgtagtaggaaggcccagggaatcttgcagcttggtgtgcaaagtaagaggacagtcctgtgttccaagcaggctctctgtgttgaacaaatgtgagattttgcagaaatatatgagatgcaagagtggctgctttcccagccttggaccagatcaacctgctgaagttgttgacgaagctccaaccagcttgaatccaggagcatgcttatacatgcagatggatgagcggctcacatgtgatggttcgcaccatcatacccggcggctctgtccatgcgcctgagaaggggaaatgaatgtgacactcataagacagcagagggcttgctcactcgacaggaaacaagtggaggcgataagctgataaccgatggttctccatcacacccccatgacgaacaacctctccacgcaccggttgcgggtttcctcaacaagaacgccctactctcctcctgtttctgggaaggattatggatgcaaaatgaaatggagtgcctgcaaagatctgctccggttcttgagaagcgtcgtggatgcagaaggagatgcaatacctttcaaatccttgcatggtatctggtaggattttgcatgctgaatgaaaatgcacgcaggcgattccacgagcctttcatgcatgttttgagacacctgaaccaattatatatattcgtaatatattgcacaagcttccatgcatgttttaagacaaaagtaacccaaacagaactacggatacatgatcttttaaatcaattacaccatgccagcatctctgcaccacaaactcccatgcccctttttttttggtttccttcgccagcctgaatcaaaaagaataatcaggcttgaaatctctcatggacctgggtctctccctccctttgttatcatctttggtgtttgcactctcttctgcagcagcagctccgtctccctggtcctcctcctggaaggccgggtgggtgaggatgttcgccaggagctgcgtgcccctgagggcgttggtgagcggcaggtgtccctcgggcgtgtcgtccgtcaactcccacaagaactcgtcggggaaggccctgtagttgtactgctccacctccgtgtccagcttcctcatccagccgacccggatgaagaagcgggtgaagtcgcgccgcgacttctcccagagccgccgctgcacgctgtacccgaacctgccgccgctgtgctccttccagagcccgtcgatggcggcgaggtcctcggccgggatgaactggacctcggagaagaagacgtaccctcggcgcctcgcgggctcgccggcgaggtcgatgatcagcgcccgcgtggtctcgtccgcctgccggtagtcgcccgcggcgagctggcggcggaggaggtcgagagaggggccttcttcttcttcttcgtcccctgccgctggtgcagatgccggggcaactggagtcggagctgacgaattggtggctgaggctgctgtcaccgagggggaggttttggtgtagagcctgaaggaaatgctgccgctggtgttggtggagagcttgtgcacggcggacgcggagccgtcacggctgccgccggcgccggcgaaagaatggtcgtgcgggagaaggaaggattgcagagaagcgtttgccatgggtggcaggaggacgcagctgagctgagagcctgagactgagaatggaggggagggagacgatgataaaggagcgagtggatggggtttagtgctgcgagagctgagctgggtggtggtcgtcgtgtggtgtggagaattgaggccgtcgtgttgcctttgtgtgtgtgtgtgttcttgtgacagtccacctttgtgggtgtcgtgtgccaagtcctggcctcgatggctgtgggagattttgggcggtggttttttagggggcccattctgggcgagaatacgaaggtggggctgtgattggtgggttctgggtgagatgaggatactggctatggca

SEQ ID NO: 99313 - DNA, 2965 bp, Zea Mays
gtgaatgagctttgtaggagggggaatgagaaagacacgtgatagccgggaatggaaatgtgaatgagctttgcagggagggggaatgagaaagacatttgatagtcgggaatggaaatgtgaatgagctttgcagggagggggaatgagaaagacagacaactgagtctaccccttaccgtcttaataggtagtacagattatttttgataatatagagtgtcatgaaaatcaactagtttctataaattagagtcgcatatttctattcaacttttttttaccacaatcgggtgaggggcgtccattgcgagttgcgactgcgtcgccgattcccctgccggcatgtccagtccgcgccctcccctcggccggatcctccgcctcgccgtcgccgtcgcggcctgcgcctgctttcctagccccgtctccggcatccggaagggcattgactttattcaaccaattgtgtgcagaagcactgttcaggggcggcatctgatctctgatgataatggttatgtatgttctgcactttcaatcaatccatggtctcactgctgcccaacaacaggggaccgcttttcctgccagggctgcgaacttgatttacagtgctgcaattcatatgaatattgtgtttcttgctgtttgaatccttctaagatcaagaaagaagacgtgctgaagctgaaggtagctaagccagttactgctggaacatacacaaatgttttcgatttctgcatgggacgatgccgccatagctctgcaagtgtggttcatgaaaatgcctatgccagtgatttccatcactgtttttcagtgcaacaaaattcatcaggatcaactgagtctagttctgtatcaaagttgttgggcattaacgttgtagtaggaaggcccagggaatcttgcagcttggtgtgcaaagtaagaggacagtcctgtgttccaagcaggctctctgtgttgaacaaatgtgagattttgcagaaatatatgagatgcaagagtggctgctttcccagccttggaccagatcaacctgctgaagttgttgacgaagctccaaccagcttgaatccaggagcatgcttatacatgcagatggatgagcggctcacatgtgatggttcgcaccatcatacccggcggctctgtccatgcgcctgagaaggggaaatgaatgtgacactcataagacagcagaggggtagttttctctgaaaaactttctaccatgttttaggttcatttaattgccaactgccaagatgtggacaacgttggtttgcagcttgctcactcgacaggaaacaagtggaggcgataagctgataaccgatggttctccatcacacccccatgacgaacaacctctccacgcaccggttgcgggtttcctcaacaagaacgccctactctcctcctgtttctgggaaggattatggatgcaaaatgaaatggagtgcctgcaaagatctgctccggttcttgagaagcgtcgtggatgcagaaggagatgcaatacctttcaaatccttgcatggtatctggtaggattttgcatgctgaatgaaaatgcacgcaggcgattccacgagcctttcatgcatgttttgagacacctgaaccaattatatatattcgtaatatattgcacaagcttccatgcatgttttaagacaaaagtaacccaaacagaactacggatacatgatcttttaaatcaattacaccatgccagcatctctgcaccacaaactcccatgcccctttttttttggtttccttcgccagcctgaatcaaaaagaataatcaggcttgaaatctctcatggacctgggtctctccctccctttgttatcatctttggtgtttgcactctcttctgcagcagcagctccgtctccctggtcctcctcctggaaggccgggtgggtgaggatgttcgccaggagctgcgtgcccctgagggcgttggtgagcggcaggtgtccctcgggcgtgtcgtccgtcaactcccacaagaactcgtcggggaaggccctgtagttgtactgctccacctccgtgtccagcttcctcatccagccgacccggatgaagaagcgggtgaagtcgcgccgcgacttctcccagagccgccgctgcacgctgtacccgaacctgccgccgctgtgctccttccagagcccgtcgatggcggcgaggtcctcggccgggatgaactggacctcggagaagaagacgtaccctcggcgcctcgcgggctcgccggcgaggtcgatgatcagcgcccgcgtggtctcgtccgcctgccggtagtcgcccgcggcgagctggcggcggaggaggtcgagagaggggccttcttcttcttcttcgtcccctgccgctggtgcagatgccggggcaactggagtcggagctgacgaattggtggctgaggctgctgtcaccgagggggaggttttggtgtagagcctgaaggaaatgctgccgctggtgttggtggagagcttgtgcacggcggacgcggagccgtcacggctgccgccggcgccggcgaaagaatggtcgtgcgggagaaggaaggattgcagagaagcgtttgccatgggtggcaggaggacgcagctgagctgagagcctgagactgagaatggaggggagggagacgatgataaaggagcgagtggatggggtttagtgctgcgagagctgagctgggtggtggtcgtcgtgtggtgtggagaattgaggccgtcgtgttgcctttgtgtgtgtgtgtgttcttgtgacagtccacctttgtgggtgtcgtgtgccaagtcctggcctcgatggctgtgggagattttgggcggtggttttttagggggcccattctgggcgagaatacgaaggtggggctgtgattggtgggttctgggtgagatgaggatactggctatggca

SEQ ID NO: 99314 - DNA, 2881 bp, Zea Mays
gtgaatgagctttgtaggagggggaatgagaaagacacgtgatagccgggaatggaaatgtgaatgagctttgcagggagggggaatgagaaagacatttgatagtcgggaatggaaatgtgaatgagctttgcagggagggggaatgagaaagacagacaactgagtctaccccttaccgtcttaataggtagtacagattatttttgataatatagagtgtcatgaaaatcaactagtttctataaattagagtcgcatatttctattcaacttttttttaccacaatcgggtgaggggcgtccattgcgagttgcgactgcgtcgccgattcccctgccggcatgtccagtccgcgccctcccctcggccggatcctccgcctcgccgtcgccgtcgcggcctgcgcctgctttcctagccccgtctccggcatccggaagggcattgactttattcaaccaattgtgtgcagaagcactgttcaggggcggcatctgatctctgatgataatggttatgtatgttctgcactttcaatcaatccatggtctcactgctgcccaacaacaggggaccgcttttcctgccagggctgcgaacttgatttacagtgctgcaattcatatgaatattgtgtttcttgctgtttgaatccttctaagatcaagaaagaagacgtgctgaagctgaaggtagctaagccagttactgctggaacatacacaaatgttttcgatttctgcatgggacgatgccgccatagctctgcaagtgtggttcatgaaaatgcctatgccagtgatttccatcactgtttttcagtgcaacaaaattcatcaggatcaactgagtctagttctgtatcaaagttgttgggcattaacgttgtagtaggaaggcccagggaatcttgcagcttggtgtgcaaagtaagaggacagtcctgtgttccaagcaggctctctgtgttgaacaaatgtgagattttgcagaaatatatgagatgcaagagtggctgctttcccagccttggaccagatcaacctgctgaagttgttgacgaagctccaaccagcttgaatccaggagcatgcttatacatgcagatggatgagcggctcacatgtgatggttcgcaccatcatacccggcggctctgtccatgcgcctgagaaggggaaatgaatgtgacactcataagacagcagagggcttgctcactcgacaggaaacaagtggaggcgataagctgataaccgatggttctccatcacacccccatgacgaacaacctctccacgcaccggttgcgggtttcctcaacaagaacgccctactctcctcctgtttctgggaaggattatggatgcaaaatgaaatggagtgcctgcaaagatctgctccggttcttgagaagcgtcgtggatgcagaaggagatgcaatacctttcaaatccttgcatggtatctggtaggattttgcatgctgaatgaaaatgcacgcaggcgattccacgagcctttcatgcatgttttgagacacctgaaccaattatatatattcgtaatatattgcacaagcttccatgcatgttttaagacaaaagtaacccaaacagaactacggatacatgatcttttaaatcaattacaccatgccagcatctctgcaccacaaactcccatgcccctttttttttggtttccttcgccagcctgaatcaaaaagaataatcaggcttgaaatctctcatggacctgggtctctccctccctttgttatcatctttggtgtttgcactctcttctgcagcagcagctccgtctccctggtcctcctcctggaaggccgggtgggtgaggatgttcgccaggagctgcgtgcccctgagggcgttggtgagcggcaggtgtccctcgggcgtgtcgtccgtcaactcccacaagaactcgtcggggaaggccctgtagttgtactgctccacctccgtgtccagcttcctcatccagccgacccggatgaagaagcgggtgaagtcgcgccgcgacttctcccagagccgccgctgcacgctgtacccgaacctgccgccgctgtgctccttccagagcccgtcgatggcggcgaggtcctcggccgggatgaactggacctcggagaagaagacgtaccctcggcgcctcgcgggctcgccggcgaggtcgatgatcagcgcccgcgtggtctcgtccgcctgccggtagtcgcccgcggcgagctggcggcggaggaggtcgagagaggggccttcttcttcttcttcgtcccctgccgctggtgcagatgccggggcaactggagtcggagctgacgaattggtggctgaggctgctgtcaccgagggggaggttttggtgtagagcctgaaggaaatgctgccgctggtgttggtggagagcttgtgcacggcggacgcggagccgtcacggctgccgccggcgccggcgaaagaatggtcgtgcgggagaaggaaggattgcagagaagcgtttgccatgggtggcaggaggacgcagctgagctgagagcctgagactgagaatggaggggagggagacgatgataaaggagcgagtggatggggtttagtgctgcgagagctgagctgggtggtggtcgtcgtgtggtgtggagaattgaggccgtcgtgttgcctttgtgtgtgtgtgtgttcttgtgacagtccacctttgtgggtgtcgtgtgccaagtcctggcctcgatggctgtgggagattttgggcggtggttttttagggggcccattctgggcgagaatacgaaggtggggctgtgattggtgggttctgggtgagatgaggatactggctatggca

SEQ ID NO: 99315 - DNA, 2359 bp, Zea Mays
gcgccgaggtaacacacatcgacgccagtaccattggcgccactatgtgttacctcggcgccaatgatgacgacgccgaggtaagggtccattttttgaaatgaaactacaaagggcataattgtgcaaaagaaaccccaaaaggactaaaatgcaaaaaagctggggattttgacttgctatggatttccgactcaatcccacccaatccacgtggattaacgcaaaaacgaactagccctcacgtggattcagtggattcagatgaaaacaaacgtgccctgagtttgattggtgtggaatatctggtatctgaaaaataaataaaataaaataaattggagaaaaagagaacaaccgagcaagtccgtcagacataaacaattcgtgtgactgaggcccgtcacatgtggaggtcaaatccacgtgtttgcgtggaattgcgatagtcgcacagagcacttttgctaaatcgctagttcgtttcctaaaccctagcaaagtaggaatggcgtcggcgagcatgctcgcgcgctcccttctccgcaccccagaccctacccaaacgagccacccgaaccgccggagcgccgctgtcgtctccttcccccgccgccaccgccgcctgtccgtgcgcgcctccgtctccacggcctccccttccccaccgccacagcccgcggcggcggctgccggcgtgccgaagcactgcttccggcgcggggccgatggctacctgtactgcgagggagtgcgggtggaggacgcgatgacggctgccgagcgcagccccttctacctctacagcaagccacagatcctccgcaacttcgccgcctaccgcgatgctctccaggggctccgctccatcatcgggtatgccgtgaaggccaacaacaacctccccgtgctacgcgtcctgcgtgagcttggctgcggcgccgtcctcgtcagcggcaacgagctccgactcgccctccaggcgggattcgaccccgccaggtgcatatttaacggaaatgggaagacactcgaacatcttaaattagctgctgagagtggagtatttgtaaatgtggatagcgaatttgatttggagaatattgtcagagctgcaagagctactggaaagaaagtgcctgttttgcttcgaataaatccagatgtggatccgcaggtacatccttatgttgccacgggaaataaaacgtctaaatttgggatccgcaatgagaaattgcaatggtttttggactctatcaagtcatacccgaatgaaatcaaactcgttggtgttcattgccatctgggatctactattacaaaggttgatatattcagagatgctgcagttcttatgctgaattatgtcgatgaaattcgagcacaaggttttaagttggagtacctgaatatcggaggtggtttgggaatagattaccatcataccgatgcagtcttacctacacctatggatctcatcaacactgtgcgagaattagttctctctcaagatctcactcttattattgaacccggaagatccttgattgctaatacttgctgcttcgtcaatagagtaactggtgttaaatctaatggtacaaagaatttcattgttgttgatggcagcatggcagaactcatcagacctagtctgtatggagcataccagcatatcgaactggtctctccccccactcctggtgctgaagcagcgaccttcgatattgttggaccagtttgtgagtctgcagatttccttggaaaagatagggaacttccaacacctgatgagggagctggactggttgttcatgatgcaggtgcctactgcatgagcatggcttccacctacaacctgaagttgaggccaccggaatactgggtggaagcggacggttcgatcgttaagatcaggcatggagagaagcttgatgactacatgaagttctttgatggtcttcctgcttagatgtttattatctgcgactgctacggacgatgttttcttggggataattggattttctttgtcaagctcatttttgctttcttgtggttatgtaatgttactggatactggatagctagttggtgcatcctcaacttccttttcatttctgttagtttcgtcaccaagttcgtcctcaattgctatttggttgtaacccagctgtaggatgcctggctagcctgtaaccgcctgagcgtgatttggttgggaactgacggtttcacctggtgagacatgcctgcgaaccaaatctgtcccctgggctgccgtatgtgtgataccaaaatctgttgtagccttgtaggtttactattgctgcatatagtataatgatgtctttgt

SEQ ID NO: 99316 - DNA, 686 bp, Zea Mays
attaccaaatgagccattttagggccaactcccctcagagcaagcagttcattcagagaatccggaatatcccctccaaagcgctcaagacaaattttagaagcttcttttatgaactgcgcctttcgctgatagaatccgacctgttaaaatcatgaacagtatgctgtgagtcatctatctgagaagtttcttgtaatctttagcttcaaatcattttgagactaaagcaatgttccatttcagatagtgttaagcctggtgtatttgcaaagcctgtgatggataacaaaagcaaacgtgaatttacattttcatgcttctaagttcattttttttgggtacataaaaggggaggctgcttcgaacccatgatctggtgactcaataaaacaactcccaccactgcaccagacctgcccttctttttttggtttgataagattcgcaagcgtggtctcatcagtcctcactatagcatccggatcaagtaaaccgttttcagagaggcgttccacagcagctgaaaagaattgactccaaaatgcaatcagcaaatttctaaaggacaactatttagtacaaacacatcagcgaatctcatgacaaggctaatttttcctgaatttcatatgacagaacaaaaaaactcttgagtttccaaagtaacaatagatacttcagtg

SEQ ID NO: 99317 - DNA, 2096 bp, Zea Mays
tctcctccgcagaacacactgctcccgtacctcgtctcctgcccaaacccaatggaggccacgacagcgctcgcgctctcctcctcgtcccttgccaccgcacgtcgctcgccggagaaggcgaccgctgcgtccctcagcctccgccgtttctcagctaccacctcgctccacctccgcgctgcccggagcccagcgcttcgctcgcaccagtcacccttccagggatggaggcggcgggggagggcgggcgggctggtggttcgggcggagatgtttggccagctcaccaccggcctcgagtccgcctggaacaagctgaggggagtcgatgtattgacaaaggaaaacatagctgaaccaatgcgggatatcagaagagcacttttggaggccgatgtaagtttgccagtagtaagaagatttattgagtctgtaagtgaaaaggctgtaggcaccgatgtgatccgaggtgtccgacctgaccagcagttggtgaaggttgtgagtgatgaactggtacaactgatgggcggggaggtatcagatttggtgtttgcaaaatctgggccaactattatattattggcaggtctgcaaggtgttggaaaaactactgtttgtgcgaagcttgccttctatctcaaaaaactgggcaagagctgtatgctagttgctgcagatgtttacaggcctgctgctattgatcaactcactattctgggtaaaaaggttggtgtaccagtttactcagaaggaactgaagcaaaaccttcacaaatagccaaaaacggtttgaaggaggcaaaagtcaataaggctgatgtaattatagtggacacggctggaagactgcaggtagataaagcaatgatgaatgagttgaaagaagtaaaaaaagcagtgaatcctacagaagttcttcttgtggttgatgccatgactggccaagaagctgcagggttggtcagctccttcaatgatgagattggtataactggtgctatactgacaaaactggatggtgactcaagaggtggagcagcactgagcgttaaagaggtgtctggaaagccaattaaatttgtaggacaaggagagcgtattgaagatcttgagcctttctacccagatcgtatggcacaacgtatcttgggaatgggagatgtactttcatttgttgaaaaagcacaagaagtgatgcgccaagaagatgctgatgaattacagaagaagatcttgagtgcaaaattcaactttaatgacttcctgaagcaaacacaaatgattgcaaaaatgggttcattcagtcgtttgattggcatgattccgggcatgaacaaggttactcctgcacaaatccgtgaagctgagaagaatctcaagtttatggaatcaatgatcaatgtgatgactcttgaggaaagggaacgaccagagcttcttgctgaatcacgcgagagaaggaaacgagtggccaaggactctggaaagactgaacagcaggtgagccaattggtcgcgcaactcttccaaatgcgtgcaaaaatgcagaaaatgatgggcgctatgcaaggaaaagagtcaccagacatggacgagctcatgggatcgatgaaagctgaggagcagtctgctgccggtactggacggcgtagaaggaagtatggcaacctgaggcagcggcaactggatgccatgcgtggtttccgcagacggtgagatgttcattgccgactagcactggcggtgcctgcacgaacgatggcatttagggacttgggctcggatatagaagtggaagaagatgaagtgcttttgggtgcaatggcaatcatctgggtacattgagttgagtttgcatattcatgtgcagtgtcctattttgtcatattagctgtattattatctttcttcggagcaagaactcgcaaaattgcgtcatctgaaccctgtccaccgtcgtggaaacgagtgcacttcggccatgctagcaaatacaaattcggatctggatcatacatgtggcacataactctgtggaagaattttgcgagaaaaaaaaatcaccaataagcatagctaactttgctttt

SEQ ID NO: 99318 - DNA, 1995 bp, Zea Mays
tctcctccgcagaacacactgctcccgtacctcgtctcctgcccaaacccaatggaggccacgacagcgctcgcgctctcctcctcgtcccttgccaccgcacgtcgctcgccggagaaggcgaccgctgcgtccctcagcctccgccgtttctcagctaccacctcgctccacctccgcgctgcccggagcccagcgcttcgctcgcaccagtcacccttccagggatggaggcggcgggggagggcgggcgggctggtggttcgggcggagatgtttggccagctcaccaccggcctcgagtccgcctggaacaagctgaggggagtcgatgtattgacaaaggaaaacatagctgaaccaatgcgggatatcagaagagcacttttggaggccgatgtaagtttgccagtagtaagaagatttattgagtctgtaagtgaaaaggctgtaggcaccgatgtgatccgaggtgtccgacctgaccagcagttggtgaaggttgtgagtgatgaactggtacaactgatgggcggggaggtatcagatttggtgtttgcaaaatctgggccaactattatattattggcaggtctgcaaggtgttggaaaaactactgtttgtgcgaagcttgccttctatctcaaaaaactgattacagggcaagagctgtatgctagttgctgcagatgtttacaggcctgctgctattgatcaactcactattctgggtaaaaaggttggtgtaccagtttactcagaaggaactgaagcaaaaccttcacaaatagccaaaaacggtttgaaggaggcaaaagtcaataaggctgatgtaattatagtggacacggctggaagactgcaggtagataaagcaatgatgaatgagttgaaagaagtaaaaaaagcagtgaatcctacagaagttcttcttgtggttgatgccatgactggccaagaagctgcagggttggtcagctccttcaatgatgagattggtataactggtgctatactgacaaaactggatggtgactcaagaggtggagcagcactgagcgttaaagaggtgtctggaaagccaattaaatttgtaggacaaggagagcgtattgaagatcttgagcctttctacccagatcgtatggcacaacgtatcttgggaatgggagatgtactttcatttgttgaaaaagcacaagaagtgatgcgccaagaagatgctgatgaattacagaagaagatcttgagtgcaaaattcaactttaatgacttcctgaagcaaacacaaatgattgcaaaaatgggttcattcagtcgtttgattggcatgattccgggcatgaacaaggttactcctgcacaaatccgtgaagctgagaagaatctcaagtttatggaatcaatgatcaatgtgatgactcttgaggaaagggaacgaccagagcttcttgctgaatcacgcgagagaaggaaacgagtggccaaggactctggaaagactgaacagcaggtgagccaattggtcgcgcaactcttccaaatgcgtgcaaaaatgcagaaaatgatgggcgctatgcaaggaaaagagtcaccagacatggacgagctcatgggatcgatgaaagctgaggagcagtctgctgccggtactggacggcgtagaaggaagtatggcaacctgaggcagcggcaactggatgccatgcgtggtttccgcagacggtgagatgttcattgccgactagcactggcggtgcctgcacgaacgatggcatttagggacttgggctcggatatagaagtggaagaagatgaagtgcttttgggtgcaatggcaatcatctgggtacattgagttgagtttgcatattcatgtgcagtgtcctattttgtcatattagctgtattattatctttcttcggagcaagaactcgcaaaattgcgtcatctgaaccctgtccaccgtcgtggaaacgagtgcacttcggcca

SEQ ID NO: 99319 - DNA, 1784 bp, Zea Mays
ctttcctctcattcctcccctccggactccgcccctccgatggaccaggaatgcacgccgccgatggcgaagagggcgaggcgctcgcctccgcaggccggcgcggaggaccggctcggcgcgctcgacgacgccaccctccacgccatcctcgtgcgcctgccgctccgcgacgcggcggccacggccgtgctctcccgccgctggccccgcgtcttcgccacgctcccgcgcctggtcctccgccccgccacattcaaccgccgcggcttccccgacgaggaccgctgcgaggacccgccgcgctggcttcgcgccctccgctgcgtcctcgaccgccgcgccgcgccggtcgtggctttcgaggtcgactgcggattcatgtgcgtgtacggcgagtggttcggctgggtcttccgcgaggtctgcggcagcggcgggctcctggagctcagcatcgccaacaccgactacaaagagtgctacgcgctgcccgacgctgtctacacctgcaagacgctcacctcgctggacctctacaattgccggctccaggtgccgatcagggccgctgcggtgaccctgcgcgccctgcagacgctccgcctccgcaacgtggtcgccagggacagcgacatccgtctcatcgtctgccggtgcacggcgatagaacgtctggagatccacggcatccacatggcgcgaaacatcgtcatacgcgcgccatgcctcaagaggctagacatctactcgtatcgcccgctctgcatctccctgaagaaggcgaaggcacagccactgaacatggtgaggctgagcctttcctacggctaccctgagcattattggagcctccatgacaccaaggacaccaaaagagagtactccgttcatgaaatagaggagatgcttgattataagaagatggccgagagggagcacaggcagacggatgagatcaagaacatggaaacattcctcactgcactcagctgcaccaagacgctccagttgcacttatcgactgaatactccgaggttttggacatggtcaaggcttcaacgttgacgagtttgcccaagaaaaagtacctgcatggcttgaaatcactcagccttactctggaccacaaccatgcagttcttgctactctagtctcatgcttgctgaacagctctcccaacctcaaggatctcagaatcattgagctccggcacccggggagccccgtgcccttggctgcggagttctgggagaagaagataaccgcggacgggtttctgtaccacctggcgagcgtcaccttctacaccgactcgctcctggaaggccacccttgcgagggcatctgcaagttcctggtgatgaacgcgagggtcctcaagaggatgagcatcgtgtaccaccactcgcaggtcaggccggagcatgcagccaagctcgaggcggcccggagggagctccgtgtctggccgagggcttccgcggacgtgctgctggagttgactcctgtccatcggttcccatggttctgaggggcgaggtcgctgatccattgctcacatgcagatcctgcactgcagcttttgttcgactcctgttctatctatgcctctcattgactctggcttgctctaagatgtagacaccacatgctaggcaccgtttaagttgcttgtggggatggattggaagtttaaatttgcactttagtgcaggttatatttgaccttgttaatagtaacagtatagcctgctggattccgtgaatcgggtttccttc

SEQ ID NO: 99320 - DNA, 638 bp, Zea Mays
agttatcgaatatttgtcgccgctagttaatttattttgaactaaactacgataaataaacaagaaagagtatatccgatctgcgtctccacccgcggcggcgctggatgatggcgtgatgctccccgacggccacggcctcttaccccggccacgcccgcttcctcaacctcgacatgaacggggcgcatggtgcgcgcctggaaaaaaaccgctcctccaggaccactgcgccaccgactccgtcgacggcctcctgctgcgggacctggacaacgacagcgccagcgccgccgggcgccggcctcctccaccctttcaccgacggcgtcaccgatcgagcgcccacttccaccactataggtgtacattagagccgtccggcccggacccagctcgaaaaggccagtattgtttgaatttcgggccagcccgacccgtttaaatttcggtccgtgccggaccggcccacatgtctagccctcggcacacggttcggcccgcaactgcttaaacgtgtcggtcttatttcgggcggtctaaaattataaaagcccgcaattcacattaggactcgaaatttagtttttggcccgaaattcacataagagccctaaatttaaaaaaacagataaaaa

SEQ ID NO: 99321 - DNA, 2594 bp, Zea Mays
acgcgtgaacgagaagcgaggagagcgtgcgcacgagcatccatgtgtccataaaggagaagggagaggagtaggagcagtagacgaatgatggtgccatactgccatcgccgccagctcaagccctcccttcaatccaactccacctccacaaaaatcctatccattctccaccaaacgcccccacgacgagagctcatcatcccctgctaaaaatttgcgtcttttatttctaaagattccttaccggagttttctttaataaaaaaatcccccttctgttgtccatttctcgacgcgccaattgtttttttctttctttctgatttggattcgtggatttggaccacgcgcaccaccacaaccaatcctcctccccccttcgagtccccgtcctgccccaacaatcccaatctccggaagaaggggaagcaagcatcagaaatcctaaatagggggggcgcaccaagaactccactgagaatccccaatcatttctcggtgcatttggccccgctccaccatcaccgaaatctccaagaaaactcatcccgaatccgcccccgcccccaaatcggccctacaccgcaccagatcacagctcataattccagtgagaattcggaaaggaggggagcaatgacggaggtggcgctcctccggggcccgaccaacctcgcttccaccgcaagccgcgcccccgcctccccctccccctccccctcctcttcgctgcggtatttagccaatgccgacagcgacgtgctccaaggaagcgacagcccggagcgcactgcgggatctgcggggagccgacgactccttgaactgcgcgggcaagaggcggcggaggaggaagaggagcggtggtccttcttggcgctgctctttgagctactgcggaagtcgttgctcgggtgcaggaccgtgggcggcggcgaaggcgaacacggcggctgcgggatggagattgggttgcccacggacgtgcagcacgtggcgcacgtcacgttcgataggttccacggattcctaggcctgcccgttgaattcgagcccgaagtgccccgccgtgctcccagtgccagtgcaagtgtcttcggtgtttcaacagaatcaatgcagtgttcctatgattcccgaggaaacagtgtcccaaccatccttttgatgatgcagagacgcctttatgaacagggtggtcttcaggcagaaggtatcttccgtataaatgcagaaaatagccaggaagagtttgtgagagaccaactaaatagtggaattgttccagatggcattgatgtccactgtttggcaggtctaattaaagcctggtttagagaaatgccgaggggtgtactggaccctatcccacctgaacaggtgatgcaatgccaatctgaagaggactgtgctcgcgtagcgaaatgccttccaccagctgaagcagctttgcttgactgggctgtgaatctgatggccgacgtagtccaagaagaacacataaacaagatgaacgatcgcaatattgctatggtcttcgcaccaaatatgactcagatggcagatcctttgactgcactgatgtatgcagtccaagtgatgaattttctcaagatgctggtacaaaagaccctcaaggatagagaggagtcgaccccagaggatgctttgctgccccagaaggacccatctgatgaaaacgggcatcagaagcccaccgtgacacttgattctctcctcgaggaaggatccaggcgcccttctttcgccaaggaagagcccctcctgaacagccctggccacagcactgatgacaagtctaacgaaactaacaccgatttaggagccactgctgctttcactgcccagacaagcgaggtagcaacgggtgtggaggactccactagtagtggctcacagcctgcacctgctggcccagctgctatcgctgatgcttccggcacgacagccacaaattctctccaggcaggcaaggggagccgaagcctgaaccggaggaggactagaaagggcaagggccagtctggcacgcgcaccacgcctgcagctgagaaatcaagaggtgcgagcatcgtgagccggataaactccagagttgagcggatcgaagcgtggagatgagaccgaaagccatttccatcgctgttgtgtactagatgatgactgacccagcgtttcctgaaaatagcaccccccgaactgcttgcttgcacattttacatttttctctctctctctatgcgcttatcatttcttgctgtatcatggccatggtattttgagattcgatcttcctgtctttactaacttctgtatctttcttatggttaattctgtgagtcaatgaaagatgcttgtgctttcctttgtacgttgatctttttgatgcctaatttatcaagtccctgaaagttcaggtgtgacctctgttgtgctggccttactgattgtatttgtacctcctgcatgtttccccttcccccttcgtgaagatggattggtctgctcacattgatcttccttgttcctttttctttttgaaaattcaagccaacttccgtatcagaaca

SEQ ID NO: 99322 - DNA, 118 bp, Zea Mays
ttttttttcagagccgcccagtctttttggtttggagccgctcaaatcagccaagcccaaagtctctgaattgagccattaattacagattgaggacctccctaatttgtagggggga

SEQ ID NO: 99323 - DNA, 492 bp, Zea Mays
tgggatgttactggagtgccatgcttacatgccgtggctgctatccacgagttcaaacataagccagaaaattatatgtcattattcttcactagggagaaatatgtagccacatatgagggtatgattatgcctgtgccagacaaaaggcaatggttaagcacagacttgccagatgtggatcctccattgtatcatgcccagcctggaagaccaaagaaaaagcgagttagagcgaaaggagaacctcatgttgaggcaagagcctcaaaaagggctgcagtgaaatgctccaactgccacacttatggtcacaatgttaagggatgtggagtgccacttagagctgattgggagcctaggaagggagctaagtacacgagggcctcaattggtgttcctacttcatctcagccagacccgccgacatttgaaggaggatcaagaattaggccacaaaagttgtcaccgatcaggaaaaggaatgcttga

SEQ ID NO: 99324 - DNA, 324 bp, Zea Mays
atggctgctgctggctctgaggacgacgacaatctgtcctctcctagaccacagatcctttgtatggaatttcaagtgcatgttggagtgaaatttgatggtagcatagatggttattctggtggaagggttggttacatgagatttatggaaccacaaggggttgattggtttgtaatgcaggaaaatcttgtgtatcatggttacgaaggaaataccaccttgtactatttgaaacctggtcatacggcaccaaaaggccttgttttgatggatagtgcagaacatgtacaacaactgatgaaggatcatgagggcctaaag

SEQ ID NO: 99325 - DNA, 879 bp, Zea Mays
atggcggccgttgctgcaggggagctggcggcgttcctgacgggggcgaacctgatcatggagtacgtgttctccaacgccgccgtggcgcgcagcttcacggcgtacctgggcacggcggtgggcgtggacgcgccccgcgagtggcggatcgccgtgcgcggcctgcccgagggcttcaaccaggtggacctcgtcgccgtcgccgtcatcctcctcgtctccgtctgcatctgctacagcaccaaggagagctcggcggtgaacctggcgctgacggcggtgcacgtggcgttcatcctgttcgtgatcgggatggggttccggcacggcgacgcgcgcaacctgacgcggccggcggacccggcgcgcagccccggcgggttcttcccgcacggcgccgcgggcgtgttcaacggcgcggccatggtgtacctcagctacatcgggtacgacgccgtgtccaccatggcggaggaggtgcagcggccggcgcgcgacatccccgccggcgtgtccggctccgtcgtcgtcgtcaccgtgctctactgcctcatggccgcctccatgtccatgctcctcccctacgacgcgattgacccagaggcgccgttctcgggggcgttcaaggggcgggagcggtgcgcgtgggtgtccaacgtggtcggcgccggcgccagcctcggcatcctcacctcgctcatggtggccatgctggggcaggcgcggtacctgtgcgtcatcggccgctccggcgtcatgccggcgtggctcgcccgggtcaacccccgcaccgccacccccgtcaacgcctccgccttcctcggtacggacagcgttattcctaataataaatccgacgtcttcaccgacccttga

SEQ ID NO: 99326 - DNA, 834 bp, Zea Mays
atggattcaaagaccttgaaggaggaacaaagagaggagctatttgaaagtttaaaggtcaatagctctattaggtgggaagtggatgtcatacgcccaaaggatctatctgctaaaatgttaaaaaaatcccattgtttcaggtcgaaagttaatctgaatgaaatatcacataactctgccatgggccttgttagaaaagttcttgacatgggagttctactggcagaagcatatatagatacagtgggagatcttaaaaagtacagaatcaagctgacagaaaagtttacagggttcaaatttgtggttgccaaaaaagttgatagcctttacactgttgttagtggagcaagtatagttgcaaagaacatcaatggtgcagaccctgatactaagcggtggttagaagatcacaagcatctggtatttggcttcttcaaggacgcagtcgctgtgacatgtatcctgcacagacttaaccgttgtccacgttcatcaacgactaatcacccgcaatcctcccttgttcaactgaaagaccccgtttcacaagacgcttggagcagacttcgtcacatgctaactcgcagcggaagaagaaggccaccgcggcggcggcggccgcctcctccaagcgggagggagagggagcgggagcgggagcggaacaaggaggcggacgaggtcaccgtggagctccgcgcggtggggttcgacaaggaggtggtgctgaagcagcggcggcggatgcggcggaggcgccgcctgggcgaggaggagcgcgcggccatcctgctcatggcgctctcctccggcgtcgtgtacgcctga

SEQ ID NO: 99327 - DNA, 2245 bp, Zea Mays
tcaaaaaaaaaggaaaataaaaaaaaaatcgtagagagttcgattggcagttgctgagcccgagcgcgccctccggcgccgacaagccgggaccccacctccgccggcggcgatgggcaactcgcaggcttcgccggcgtccgcctccagctcccgcttcgtcatggcctcgaggtaccgcctccccactaacagctgtctgccacctccttcgctgccgcgattcgcaagccctgtctggtgctctcaccgctgacacgcttcctcgcagggccttcccgaagcaggagctggacggcctccgcgagctattcgcctccctcgcagcgcagtcgcggaccggcggccgcgccatctcacgccccgtcttcctcgaatactaccaggtccgggggcgattaggcgacaggctgttccagctggtggcgaaggagagtggcgggagcgatggggtcacgttcgaggatttgatcatctccaaagttagtgctcgactcaattcgatccactctgttgttcgtttagttgtcgcgagcaaggtcattgatgtgttggtgcctggtggaatttgtccaagcaacatatggaaggggaactcgtgatgaggtcgatgaattcatttatcaactatgtgatgtcacaggagatggcgccttaacaaggtctgatttggaatcagtcttggcgtctgttcatgaaactgtatttgcaataaagaaggaagctgtcgaagtttccaacaatagaccattcgaagaattcctcaactctgcagtgttttcaaaggatgttgaaggggtctcagggaagtctatgtcattatcagactttaggaactggtgcactctcttgccatcattgaggaaattccttggaaatttgttgatgcctcctgattcaggtagaccaggatttgaagtaccactgcttcattatcctgaaaacatctgtactgatacgctgcttctaaataaagagtatgcctggcatattggaggaggtttctcccaacatgaggtgcaagagtggaagcttttatatcatagttctcttcatggacaaagcttcaacactttcttgggcaaagtaacgaatggggatgctcagactgttctgattgttaaagatacagaaggatcaatttatggtggatatgcttcacagccttgggaaaggcacagtgatttttatggtgacatgaagacattccttttcaaatgctatcctcaagcatccattttccgccctactggagcaaacaagaatttgcaatggtgtgctgtaaacttcagctctgagaacataccaaatggtattggatttggagggcagccacatcatttcggactctttttatcagcaaattttgaccaagggcactcatttacgtgtagcacatttaccagccctcccctttccaagacaaataggttcaggccagaagttattgaatgttggggtatacaaatgagaggagcacaagatgaaaaactggagttagtcaaggggacagtcctcgagagattcaaggaggaccggaacatgctgaagatggttggtttggcaaatgcaagtgattaagtgatagaggatcacaatgatgtacatgatggagagtctgtacatcacatgttcataaaaataatcaaatctgagaccatgtttctatattctactgttcatattttgtcactcaaaatattcatctggtccacactttgtaacaattgaccagtcgtgaaggacagccgagccaatgttgcgtttgatctcaagaatgacgtcatccaagataagatggtctcatatgagttcatcccattaactttaatgggatgactttatcctttctgttgtactaatgtgcttgtaagatgagaaagtatctagatctttagtggttttggtgattaatgccaacacaagattattgtaactaacatgtgtgtttacaaagataaattaatgttaggtcacaatgatgaaaatgatttgggcagtcttttgtcttgatgcctctgattatgatttcctaaaattttcaaatgatgaaagataaagttaaagatggactaattctaagtatcgtttagagttgagaaacacttagaataatttagaactttgtttttatttaaccgcactataaatgaggtatgaattaacagtctgatctagataagtcaaataagtttagtatgatacacactaattatctttagctttaagtggcttaggagaggcc

SEQ ID NO: 99328 - DNA, 2091 bp, Zea Mays
gacaaaagggaaaagaataactgaaaaagtaaatcgctcaaaaaaaaaggaaaataaaaaaaaaatcgtagagagttcgattggcagttgctgagcccgagcgcgccctccggcgccgacaagccgggaccccacctccgccggcggcgatgggcaactcgcaggcttcgccggcgtccgcctccagctcccgcttcgtcatggcctcgagggccttcccgaagcaggagctggacggcctccgcgagctattcgcctccctcgcagcgcagtcgcggaccggcggccgcgccatctcacgccccgtcttcctcgaatactaccaggtccgggggcgattaggcgacaggctgttccagctggtggcgaaggagagtggcgggagcgatggggtcacgttcgaggatttgatcatctccaaagcaacatatggaaggggaactcgtgatgaggtcgatgaattcatttatcaactatgtgatgtcacaggagatggcgccttaacaaggtctgatttggaatcagtcttggcgtctgttcatgaaactgtatttgcaataaagaaggaagctgtcgaagtttccaacaatagaccattcgaagaattcctcaactctgcagtgttttcaaaggatgttgaaggggtctcagggaagtctatgtcattatcagactttaggaactggtgcactctcttgccatcattgaggaaattccttggaaatttgttgatgcctcctgattcaggtagaccaggatttgaagtaccactgcttcattatcctgaaaacatctgtactgatacgctgcttctaaataaagagtatgcctggcatattggaggaggtttctcccaacatgaggtgcaagagtggaagcttttatatcatagttctcttcatggacaaagcttcaacactttcttgggcaaagtaacgaatggggatgctcagactgttctgattgttaaagatacagaaggatcaatttatggtggatatgcttcacagccttgggaaaggcacagtgatttttatggtgacatgaagacattccttttcaaatgctatcctcaagcatccattttccgccctactggagcaaacaagaatttgcaatggtgtgctgtaaacttcagctctgagaacataccaaatggtattggatttggagggcagccacatcatttcggactctttttatcagcaaattttgaccaagggcactcatttacgtgtagcacatttaccagccctcccctttccaagacaaataggttcaggccagaagttattgaatgttggggtatacaaatgagaggagcacaagatgaaaaactggagttagtcaaggggacagtcctcgagagattcaaggaggaccggaacatgctgaagatggttggtttggcaaatgcaagtgattaagtgatagaggatcacaatgatgtacatgatggagagtctgtacatcacatgttcataaaaataatcaaatctgagaccatgtttctatattctactgttcatattttgtcactcaaaatattcatctggtccacactttgtaacaattgaccagtcgtgaaggacagccgagccaatgttgcgtttgatctcaagaatgacgtcatccaagataagatggtctcatatgagttcatcccattaactttaatgggatgactttatcctttctgttgtactaatgtgcttgtaagatgagaaagtatctagatctttagtggttttggtgattaatgccaacacaagattattgtaactaacatgtgtgtttacaaagataaattaatgttaggtcacaatgatgaaaatgatttgggcagtcttttgtcttgatgcctctgattatgatttcctaaaattttcaaatgatgaaagataaagttaaagatggactaattctaagtatcgtttagagttgagaaacacttagaataatttagaactttgtttttatttaaccgcactataaatgaggtatgaattaacagtctgatctagataagtcaaataagtttagtatgatacacactaattatctttagctttaagtggcttaggagaggcc

SEQ ID NO: 99329 - DNA, 792 bp, Zea Mays
atgtcgtcgtcgtcgtcgtccagggcgcggcggggcgggagcgggagcctgcagcagttcccggtggggcggtggcggcacgtggcggtggtggacgccgggtgcggctgccgcccgcgccgggccacaaccaggctgctgagccagctgccgtccttcctccgcccgtccccaaagccgccgcagccgccgccgccgccgcgcagcagctcgcgctcctcctcgggcttcttcccgtcctcggccgcctccaccgcctcctcctccgccaccaccttcaccaccacccactcctcccactccaactacgactcctcctacacccaccaccccaccaccaccaagcacctggcgtcggccgccgacaagccgccagcagcggcggcggggaggaggaggcagcagctgcagggccaccaccaccaccaccaccagggcagcaggaggaagaagcggtacgagaagatgggcggcccgggcgcgggcgcggcggcggacgcggacgcggacgccgccgcagcagagggcggcgttgggggcgtggccgtggagaaggagtcctccgacccgcgcgccgacttccgggagagcatgacgcagatggtcctggagatggggctgtgcggctgggacgacctgcgctgcatgctccgccgcctgctcgcgctcaacgcgccccgccaccacgccgccatcctcgccgccttcgccgaggtctgcgcgcagctcaccaccgcggccccgccgtaccacgccgccgcctacgactacgactaccactaccactactga

SEQ ID NO: 99330 - DNA, 201 bp, Zea Mays
ttattcagaatcagcagccaacacacaagattcttctttcatgtcttcttcattatcttcaaggcaagaccaaaaattattgaatcttccatcaccagcatctttaagagtgtgacgaagccaactttaactgcacatcaaagcttccaccattttaggagtgagacgactgcgatggtcacttaaaagcctgccccttgt

SEQ ID NO: 99331 - DNA, 112 bp, Zea Mays
ctgggatatatgttgtccccgtgttcccaaaccggatcttgccgctccgacatccctgaaaatagcaacaacaattattattacaaatattattagcctacaattattagcc

SEQ ID NO: 99332 - DNA, 141 bp, Zea Mays
atggcagctgccgagctgagggagcagctcaacgccctcctctcctccatgatcaccttgatttcatccctcagctcggtgctagccgttggtgtgcgactgtatgtgcctagatgtagaccagtagacatgcacatttga

SEQ ID NO: 99333 - DNA, 436 bp, Zea Mays
agtgttaatcagagggtccttacccattcctcagccttttgcccttattgtcaatgatgagtgccggctctaatttattttaggattggtaaaatcgggcaagctctgttctagtttcaggattatcgtggccatggtgatagctgttgagagcgtgatctcttggatgccaatgtattcagaaatgaagctagctttctttgtgtacctgtggtaccccaaaactaagggaagtgacgttgtatatgacacctttcttcgccccatagttatgcaatatgaaccgaacatcgagcagagattgttccatctaagggcaaaatctgggcagttaatttccttctacatgaagaattttgcggataaaggaacagccttcttcatggatgtcctccgttatgtcgtatctgagaaacctgaaggatccaatgcagag

SEQ ID NO: 99334 - DNA, 759 bp, Zea Mays
ccaaccccactgggcaactgcaactgcctgcgccagcgcccccctcgattgaaatctcgccgccagttcggtcgcagtcgcaccgcagccgtcttctccttcccttccctcctcgctaaaaagccaacgcaaccgcttctcctcctcctcctccgcctcctccctcctcaactcaccccagcacgcctcagcccgcattccgccacccacgcgactgatcgaccgacgacttccccattcccgccccgcaacccgcagggctctgggttcggaggaaccgagggcgggggacctccgaccgggccgggcgacatgttgggcgacctcctctccaggatcctcctgctcctgttcggctacgccatgccggcgttcgagtgcttcaagacggtcgaggcgcgccccaacgacgcccgcatgctgcgcttctggtgccagtactggattatcgtggccatggtgatagctgttgagagcgtgatctcttggatgccaatgtattcagaaatgaagctagctttctttgtgtacctgtggtaccccaaaactaagggaagtgacgttgtatatgacacctttcttcgccccatagttatgcaatatgaaccgaacatcgagcagagattgttccatctaagggcaaaatctgggcagttaatttccttctacatgaagaattttgcggataaaggaacagccttcttcatggatgtcctccgttatgtcgtatctgagaaacctgaaggatccaatgcagag

SEQ ID NO: 99335 - DNA, 1242 bp, Zea Mays
gacgaggtagaggacaagtcaggtaacaagttttgggcagatttcaaaagttgtatctacgaagaccgagaagagatttacttcacacagaaatggcatgaattgttggctaaatacaaccttgaggataacaaatggatgtcaaacctatatgatttgagggcaaagtgggctgcggtacaccgtgactcatttacagcagacattcactcgacccaaaggagcgaaggtatgaacaatgtcttcaagaaaagatttcgtaggaaactcggtctttcagaactccttgtagaatgtgaaaaagttgtagttgatctaagatcaaatgagacggatcctttcagaaatccacttttattatgcaaacatgctcttagagtctacaatatgaatggagtatataatttgccatcccaatatatactgcctagatggacaaagtatgctaaaagtggattttatattgaaaaaaaacaaggaaccgaggagggagatttgaaaacacaggcagcacttatatctcgacaggccacaactcttgcattgaagtgttcgtcatcaaaagaacttcttgataagttgcagaaagccatgtatgacttgaacttggaagcagatacttatctaagtgagatgcatgaaaaatccaatgagattccccctactccaaatgaatgtgtccgacaaccactaaatggtgtaatatcattcaaaatccctccagtcataaaaggtccaaagcaaacacgttttaaaaatgttcttgaaaagaacccagggaagaagaagaagggtgcccggaagaaaggtagggacctgttcaatatcttttgctcatgtgtattttttttctaatattgtattatcatatatattgcatttgtaggtgacggtttggaacatgttgatatcgaaacaagagacgaacatgctgatgcaaacctaattgattttaatgttggtgcatcttcaaccatgaatgctcctttcgtccaaggtggatatgctaatgtcacaatgccccagttcaatttatttgcaaatccttctgcaatggctcctccatacataccaggagggtacacaagtctcttaatgggagttgatcaagatgatacaacgcaagctgctgttaggaagttacattttgatgaatctatgtagacatgttctcatgaaatgaaccataatgttttgtaaacatgaatttattttgctgtcatgaaagtaatcattttggat

SEQ ID NO: 99336 - DNA, 103 bp, Zea Mays
cagcggctgcggccagcgggtaagagtaagattgcgaaccgggcctcgagtccatagggctagctggctagcgctgcccgcgggtaggggaaccgatcgagcc

SEQ ID NO: 99337 - DNA, 2084 bp, Zea Mays
aatttccctcgcttctcgcaccccttcgtttccctcgttttcttccctcccttcctccccctaccccgcgcaaaccctcgcccgccgcctcctcctcctcagatcccagctccaggaccctgccgcccgcccgcgcccgcgaccgggcctccgatccgcgcacccgcgcgtgccccgatccccatggcggcggcggccggtgacggggccggcgaggccagggcacgggcgctgctgcagcagcaccggccgtttgcgacgccgccaggggagtaccaccacttcggcgcgccttccgccgccgccgacgagatggtggaggcggttgtcctcaggacgccattgaaacggaaacataacgacagaacagaaaatgaagctgccgaatcaaatgactggatgagccctggatatgctaatgctggcagcagcccagttcctacacccccttcagggaaaggtttaaaagcatccaccaagcctaaggctacgaagggccagaaatctggtcctcagacccctttgggttttggttctccgggcaatccttctactcctgttggtggctgccgctatgatagctccctcgggctcttgacaaagaagttcctgaacttgctaaaaggtgcacctggtggcattgttgatctgaataatgctgcagaaactctagaggtacagaaaaggcgtatatatgacatcactaatgttcttgaagggataggactgatagaaaaaaagcttaagaacaacatccgttggaaaggagttgatgactctcgacccggagaagttagtgatgatatgtcaattttacaggcagatattgatgctcttacactgcaagagcgcaatttggatgaacgaataagtgaaatgcgggacagattaagagggcttactgaagatgaaaataatcaaaagtggctttatgtcacggaagaagatatcaaatctttgccatgcttccagaatcagactctaattgctataaaagcaccgcatggcacaactttggaagtcccagatcctgatgaggttaatgattatcctcaaaggagatataggattgtcctaagaagtaccatgggtccgatagatgtgtacctagttagtcaatttgaggagatgagtggcatggagactcctccaaggcctacacagacaataagcatggattctctagagaatcctaggacgcctttggctgcggattgcaacaaagtcacagggatggaatcaaatattcacggaggactgatcctaccttctgatgcacctagtagttcacaggacatttcagggatgatgaagattgtcccttcggagcttgatgctgatacagactactggctcttatcggacaacacaggagttagcatgacgaacatgtgggagacaggaccagatgagtgggatgggattgagaaattcaacgcggaggatttcttggaagtgggcactccccagcagcaggataaaccagccgatgtcgtggatgacgacccctcctgtataatctgaagcccgccgaatcacggtggcgaaacctttcatagttcagcgcccgctccgatcaacctggagcagtagatggctgtgactgatgtacagatgccagatcagtattaataacttactaactgtctagaccatggcatcatccagaaatgtcgatcataaccgagagttgatggtgcaggcagtccttgtcaggttcaggctcaaacattgcagatgcaggctgaggctgcattagctgtgcctggtagttggtgcatgctgtgtatcttaagggtcacagcactagtagtgtacaactaggaatatgtgtgtcgaatccatttgtaaaatagcagccgttattgtttgtgtggtactgatccagcttttttttagaagaaaacatgtgttgccatcccgagatggctggacaggtgttgctactattcgcgccgttgccgggcaatatcgtgtgctatctgcatcgttatttctgccactacgtgacgttgtctgtaatagaggatttgtactacattgtttatatagtgaagtattgtttatataatgaagttcaaaat

SEQ ID NO: 99338 - DNA, 1350 bp, Zea Mays
gtgaatctatcaagaccaaacaagaaataaatggatcgtcctattaatatccgtacatcaccaaggacgcccttgtcgttgtccgagcaacaaacgataaaagaattttggaggaagaaacaagaagaaattgaggcaattgaggactttggagagcacacaatccccgtgacctgtctcaaaaaggttatttgtgctaagaagggtaaaatgatgatgacgtctgacaccccaacattcatgacaaaggcatgtaagatatttgtgcaggaactttcactcagtgcttggatgtgtgccaattcacacaaccgtagcatcgtactggattctgatattgctgagtcaattgcctccattgagtcatatggttttctaaatgatgttctatgcgcacatcttgaaaagtacaagtctgatacacatctacaatctataaaaaatcctcatcacaatagggctataaatcagtcaccaacatatctccaacctctttctcatcaataccaaatgacacaatttattcctcagtctactagatattgtccctttattcacattcctccaactttaccacaaactaatgatattcacatgcatctacccttgccactcccacctatcacatacatgaccaaggatcttgtgttctttgaaaaaggcattagcaacaatgatgatgctatagatcttgtgactcctccacaattacttccagaagcactgtccaatattccaaataagtgttacatgtgtaacattgcttctactgatacatattgtgttggtagtgctaagacttgtaattttattgctgaagatggagacatggtgttccattttccatatgttccttcaaagcctttccaattatcaacctcattaccaatgactaatggcggttgttctatatatactgatatcaccgagctgaatcatatcaaattaaaggtaacacatattgaaaaatctacatatggcattaatcctgaagctactttcaatgttattgatggtcaacaacatgcgggagatgaaaccactgctgccaatcatatgcatactgaacatggagagttagatgcagaatttgttactactactaatgctaatgcagatgacaacaatataaattgggacgaagttgacatggcaagtgattccatgttgatggagttttggagagatgtaatgatgaaagaagacccaacatctttacctgacactatctctaccaatgatactattttagatcctagtgatatgttagaacttgaggggtgctgtgatgattcttatcttcttgatgatgtcatgtctaacacaagtaacgatgtaaggcatggctag

SEQ ID NO: 99339 - DNA, 397 bp, Zea Mays
ttcaaagacggcgtccaagaagatggtcctcgccgtggcggcactgctgctagtcacgctcgcactacaggtcacccctcctatgatcgccatggactgtaaggctggctgtgccgagatcaagaactccccactcggcataagcatcgaggagtgtctgaagaggtgcaaggggatcgccaccgagcagggacccagggacccttacaaggataacaaacttgacatcccataaacacttatgacttgctgatatatttgtgcctatccaatcatttgtgatagatcaatgcatctttgtgttaaaaatagatagatcaatacatctgtatatatgctcactccgttcttttttatttgtcgtcgtttagttcaaaaatgaactagcggacgacaa

SEQ ID NO: 99340 - DNA, 273 bp, Zea Mays
atggcggcggcgggcaggaagacggccctcgccgtggccgccgcgctcgctctggaggcggcacctccggcggcggccgccatggactgcaaggccgggtgcgccgagctccgggcctcccggctcggcgtcgccaactgcgagaggcgctgccaggcgatcgccgcccagcggaaccctgctagcaagtcgcccttgttttgacaccttcctcctacctgatggtggtgcagcgtcgatcgaccggtcggaggatacatatctcagcacaaa

SEQ ID NO: 99341 - DNA, 139 bp, Zea Mays
gcgcgcgcacagggatggctctgcaccggcgcacccgagctgctcctctcttgcgtcggcgcacccgagctgctcgtcgtcgccgccgccgccgcagccgacagtacgtcaccaccgtacccctcaccggactcaggtg

SEQ ID NO: 99342 - DNA, 1183 bp, Zea Mays
ctcctcccctccagctttattacgcaccttcacataacactgcaaaagcactcctctcttcgtcctccccctccctcctccatcccattccataccattccgccaaagaagaaccacagacgctcgctcccaactcccaagccaagccggatcccaaaatcggcacagcgcacccactccgctcagtcccttcgttcacccccatccatccagccagccatgggcggcaaggactgcggcaaccacggcgaggacgacctgcggcggtcgtgccggcgcctgctagcgatcctcctagtcctggccctgatcgtgggcgtgatcgcgctgatcatctacctggtggtccgccccacgcacccgcgcttctacctacaggacgcgtcgctccagcagctagacctctccaactccaccaccccgtcctcctccctcctctccacgacgctgcaggtgacgctggcctcgcgcaacccgaacgagcgcgtgggggtgtactacgaccggctggacgtgtacgcgtcgtacaagtaccagcaggtgacggtggccgcggcgctgccggccgtgtaccagggccacggcgacgtggacgtgtggtcgcccgtgctgtcgggccccggcgtccccttcgcgccctacctcgccgacgcgctccgccaggactgccaggcgggctacctcgtcctccaggtcaaggtcgacggccgcgtgcggtggaaggtcggcagctggatctccggccactaccacctcttcgtcacctgccccgcgttcctcgtcaccgccggcggcaacggcgcgcccggcgcttccgggttcaggttccagaccaccacctactgccacgtcgaggtttaaattaggagcgagaggaggggaaggaagcagagagccagagaccatggtggctacctctctagctgctgctccacctcctgccgttgcctggtgcggtaataactctctctctttctatctgtccgctgctggcgttactgctgctgcagtgatgcgggatgtaaaggaggggtaaaaaaaattcctttcgttctagccccttgtttttttcatcttctccttcacctttccatatactactagtatgctctgtcgactgttgttcaaaggaagcttccaattgtcaataaacattttggatcggaggatcaatcgcaattaa

SEQ ID NO: 99343 - DNA, 2281 bp, Zea Mays
atggaccagacggtgtcggcactgcacaagcggattgagacgctgtcgctgcaggcgagcgctctgcgggacgccttgcagcggagcgaggagaacacggacagcgcggtcgccgcccctcgactcgttcgaccaccacatctccgcgatcgaggcctccatccgtcccgcccaggttcggccactctccgcgttcccgtccggcgaggagggagaggtgacccgtactccgattcggccgtgtcgcaggtgagggcgcaggccatcacgatggcgaacgagaacatcgacaggaccatcgagaccgccgaggccatcctcgcgcagttcgagatcatccgccggactgaagctgtgatagtgaggggtccacgtgcggatctgaagagcttcctggaagctatggctctgctgaaaggcgtcatccacttcttttcctcaaataagaagtttaagagttgtgaaggagtactgaatcaagttaacaacctcttaaccaagtcaaagctgaagattgaggaggaattcaggcagttaatgagcacttacagcaaagctagtgagcccacacatctatttgattgctttccaaacccgctattggcatcagaagggaactctagagcagttggagagcaactatccaaaagctttgaaagtgctacatacaggactccaacactaattcccccaagaatattaccacttctgcatgatatagctcatcagttggttcaggatggaaatcaacagctgtgctatagaatatacagagatgctcgcagctcagcattagaactgagtcttcaaaaactgggcatagaaaagctaactaaacgtagcatgcagccgtggctggcctcaggaacctggaatcagattatgcacgttacagttaaagtattactagctggagaaagaaaaatttgtaatcagattttcgatggtatcactttcaacaaggatcaatgttttgctgaagtgacaggaagcagtgttatgactcttctcagctttggtgatgttattgctaaaagtaaaagatctcatgaaaatttgtttgtactgctggagatgtatggattaatgcatggacttaggtcagaggttgaagtgacatttcaaggaaagttttgctctgggatgcgggaggctgcattaagcctgactaagagcttggcgcaagctgtacaagaaactctggttgattttgaggtggcagttgaaaagaataattcaaagactaccgtacagaatggaaatcttcatccttttacaatcgaagtgattaattatgtaaaaggcctatttgattaccaatcaacactgaaaatactatttcagcaatctgaaagtgacagtgagactgaatctgaacttgcaactgtaatcatgaaggttatgcaggcctttcagaataacttgaatgggaaagctaagcagtacaaggatcctgcattgtatcacatatttcttatgaacaaccttcactatatggttacgtctgttagcaaatcagaatccaaagatatactcggtggtgactggattcagagacaccgtaagattgtgcagcaaaacgctaatcagtacaagagggtagcatgggcaaagattttccagacactctccatccaagtttcaggtggcaatagttcgtcatcaccatgtgatgttagcaaaactggagtttcaaggactatgatcaaagaacggttcaagtccttcaatatacaatttgaagagcttcattcaaagcagtctcaatggactatacctgatcaggaattgcgagatgaactgaggcttgccgtggctgaaattctcttgccagcatatatgtcttcgttagccgttttgggaatcttgttcaacgttcgaagaaccctcacaagtacatcaaatacacacaagaagaattggatcaattgttgggtcagttcttccaaggacactaagctggtgaacagaagcagttaacacagagcagtatagggagggaaaagccttgtctaggtaaagttttgtaccacagcttatgtcaaatgtttctacagaagaactacctacccttttgtttgcacgcccgtaaaatggcactgaactactgatgtagcctaactatggctcctccacaacacctgtatcgcgaaggactcacgttcttttactacttggctgaggctgagtactgttccatgctaacgtttgagaagacattggcatatatgcaacctcatgagtcaggatcctgttcccgatatcaatttgtggagttaat

SEQ ID NO: 99344 - DNA, 737 bp, Zea Mays
cagctaactattagctctagtgcattcaaacattctcttaggaagctttatgttcatgtccctattttccagacactctccatccaagtttcaggtggcaatagttcgtcatcaccatgtgatgttagcaaaactggagtttcaaggactatgatcaaagaacggttcaagtccttcaatatacaatttgaagagcttcattcaaagcagtctcaatggactatacctgatcaggaattgcgagatgaactgaggcttgccgtggctgaaattctcttgccagcatatatgtctttcattagccgttttgggaatcttgttcaacgttcgaagaaccctcacaagtacatcaaatacacacaagaagaattggatcaattgttgggtcagttcttccaaggacagtaagttggtgaacagaagctgttaaaacagagtagtatagagaggaaaatggcttgtctaagtaaagttttgtaccacagcttatgtcaaatgtttctacagaagaactgcgtacctttttgtttgcatcgcccgaaaaatggcactgaactactgatgtagcctataactatggctcctctgcaacagccaacacctgtatcgcgaaggtctcacgctctttcattacttggctgattaccctttcatgttaacgtttgagaagacatctgtgacatatgcaaacctcaggagtcaggatcatgttcccgatttcagtttgtgtagttaat

SEQ ID NO: 99345 - DNA, 1282 bp, Zea Mays
agttctccacccgcttcttttccctcgctcgctcgtccgtcgcccgcctgcctgcctgccagtgcgcgccctctccctccctccctccctcatggcggactgcttcccgcccgagtcggacgacttccaccgccgctggctgccgcgggagatcctcgccgacattggcatcgccgaccccgaggccgtcggcgccgagaccccgcccgaggccgccgccgccgccgccgtggaggagctcgcggctcagctcgccggcatcctcggcggcggcgccaaggcgtggccgctcggcccgccgccgacgccgcctacgcccgcggctccgcccgccgccgcggcggccgttgccccgtgctacggcgcgaaggtctgcgggctgcaaggtagcgtcgtcgtgtcctgcggcgagaccaatggcggcggcgccgtgtcttggccgttcgtgccgtacccgccgcagctccactggcaggtcgggagcggcctggtgaaccacggcggcgtgctggactacccggtgctgccccctgctgctctaccctgccacgtcccgccgcccgccaacctgcgcggcggcaccggcgtgttcctgccgcgcatcgaggcgtaccgctacgcggccgctcccccggccaccgccaaaggtggggcagcgacaaagccgtgggctgggactgggagcaggccggcaacggggaagaagcaggagcggcagcaggccgagcaggcggcgccggcagcaaagcacccccagaagcagcggcagcagcagcagcaggctaccggcgcagcgctggctctgccccaggactggtgctaccgctgatgatgtgttggaggcgcgtgcgtgcatgcatggacatggacatggacatggatggacgcgatggtgcctgccaagacgatggcgaacgttcaagcaattcgtattcgtagcagacgttctttagtagtggcagtggccagggaaaaagaataacaacaacaataaataagaataaggaaacgatgatggatggatggataatgtagctgcagctgcaagataaacaaagacaagggtagcaggagtcttattatactactactatagtataagtggtcatcttcctcgggtcgtactgtcgcatgtcgctgtagcaagcctacacctacgctgatctgatccccgacttctgttgtttgctgagcgatgtactaatactgctagaggaataaatatgttatctgcagtattgtagtattgctcaaaagaaaataaagtggtattgatattata

SEQ ID NO: 99346 - DNA, 822 bp, Zea Mays
atgcaaacatatgattgcaggattctattcagttgctccgcccctggggccacggagctggccttggcgctgctggcggagctgtgcgcgtgcgcggacgggcgcgcggccgtggcggcgcacccggcgggcgtggccgtggtggcgcggcggctgcttcgcgtgtccgcggccgccgacgcgtgcgccgtgcgcgtgctggcggccgtcggcggccgggccgcgtcccccgaggtgctgcgcgagatggcgcgcgtaggcgccgtcgggaagctctgctgcgtgctgcaggcggactgcgacgccgccgtcaaggacgcggcccgcgccgtgctcaggctgcaccacggcgtgtggagcgggtcgccctgcgtcagcgcgtacctgctctccaggtacctctagtcgttgccgccagtaagggcacgccatgcatgcatgctgcgaggcagcgacttcctgtcggcattgcagaccgacgacatggttaagtcttctctactagtaactagctcatttagttttcttgttcgtcgatcggtcaagattatgctgccagcaaataatggtagtcaacccatctatcaccagcaaatgtatgtagaggaatttaatgttattttccttatatatctttattagacgaggcttttcctttctttttccttgtccaaatttaaggctagtttgggaacccattttacaaagggaaattagttaatttttctttgaaaaaattgaaatctcttgagaaaatgatgttcccaaactagactttaatgttatccagtgcctcttaatatgttcgaaggcttaacaact

SEQ ID NO: 99347 - DNA, 173 bp, Zea Mays
aattccatgtgtatgagttatttgtttaaacaaattaataaattaaaaataagactttcatcatgctggattcattgtctgctgcatttatatttgaattcaagaatcataaccagatttgatattagaaattcaaaatacgaatttaaaaaggaattagaaacggaaaacat

SEQ ID NO: 99348 - DNA, 2483 bp, Zea Mays
agttggagcaaatctaagtcgttaaattgagaatagtccaaggaaacctaattcatcctattttggcccaagacgacgctttccaactagaatgaaggtggcaaatgggttgtctttgaggaaatctaatggtaggtttaaatcaaagcttatgatggaacttgttaaacaatggcgagaacatcaagcaattatgaggtgcatgaatctatccaagcgtaataacaacatctatgttggggcagaaggagccaacataacttctcccaacgatagcaacatttggccaacgagtgctttagtagcaaagaatagcaactcaagatatgtgctagcctcaaagtgtgcaagccagcctcctacaatgtggctagagaatagcttgaatacttcatcgggtttcaagtgctctaagccctctatcgttaggaatgcacttccttcgaaaacacctaaggcgtctgtctcttggaagtcaaaggatgattcgaatgccataccaagacacctagagcaatctcaccgtaaaaagacatctagagcaactcgaactcacttcaaggcgatgccaaatttgattcacaaggcaaagaatgttgatacctcaaatctaaacgatggtgcctcgggttcaagttggaggggtcagtcggattcatataagggagaggacataaatatcgggaaggaatgcactaaaacttcagagttgttgaaaagtagagaagcctcaagaaaatcaaacatcctagtggtagatcggaaggatcctaacaaagatgagccagacaaagtgaaaggaatccaagatgaagttgtgaccaaagaagagggattgaaaggccatacctgtgaaggttgtgcgacgtgttggagttgtcttaagcaggcgaacaccacaaaggcaaatgatgctccaaatttaggttcattgttggttggtaacaaacacacgcaaggcctcatgagtaatttgagagataattcatcccatttgtttgaaaagaatcattcaagacaccaaagggatgatccatgtgagtatagagaaacaaacttgaagtttcctaataggatccaatcagttggaggcaatgggaaaaccaatgatgtcacatctaggagaaaacgactcttgttagaagaaaaggctagcgcacacgtgcaaaatgatcttacttatggaccgatgaagaggcggaggtacatagaagccaacgaagatgaagaagagcaaaatgatcttacttatggaccgatgaagaggcggaggtacatagaagccaacgaagatgaagaagattatgtcggcgaccaccatccggtgcatattgaagatgctaccactgaattgacaccgcaggattctatttcaaagcattgcgttgagcgacaatgctattgttgctcaaagcctattgacatacctagatggaggtacagtagatgtgaagttttcttttttacgatctgaaatgctagtctttgtatgctattttttttcttttctgtaaacagtggaacctttaagatagatggaaaggaacacatatcactggctggacatttgtcatccaaatcttgtgagaaagtgtggaaattgtcatcattgccgaaggtggttcaagtgacaaaggttcctagaatggcagtgtggcctaagatatttaaagcatcagaacccagtggtgacaatattggcctatatttcttccctcctgaaatgaggcatgatgaagaactagatcaactagttaatgaagtcatggataaagatttgatcttgcgagctattattggtgaagctgagatgctgatattcccgtctgttctactacctgaaagatatcagacattccaaaccaaacactacctatgggcggccttcaaagcaaaggaggataaaggtgatgcaattgtagagcaggaggttgagaagggaaattgcgtttcaaaccagccagacaaggtacagtctgataatgcttcatttccttcaaaccatggactggaccgtccaagcatggaagctccccctcaaagcagtagcagtgtctttggtattgttgtccgacaagctccaaatcttgaaccagaagtgaagcgatttatccaggagatggaacgcaaaggtgcgttggtaacggttatgaggggggaggcaattggtggagggccatagccaagcaacaccacgaccactatgcattagttgtagagagagtagagagtaaaccatgtcaaactatgctgtagttgtatagagtctgacacataacgtcgtggacttgagctcttgttcagttttttttgtaaggtacctacaggtttggtcatatgataatttctccggaacggcataccttagcacctgttttctaaatgcttgtcatttccccagttgcaattgtgtctacgtgccatctggattctggttgtttttcctagactcttagagctaatttgggaaccatatttttcca

SEQ ID NO: 99349 - DNA, 3867 bp, Zea Mays
ggccttagcgatccatagtgtggcgatgaataatttagtttgtgtggcttgaaacgattcaattcatcatgtttattttttcgtgggttgtataacttatttagctgggtggattcgattgcacgaaagcagcatacttgtttgtagcctatcacgtagcatttgcttatcctttctccatttcagtttatgtggctaattgcatttgttagattgtttataaaattgtttgcaactagtgcagtgacttgggattagcacacatatataatataagataggtttggagtgtctactatgtttgtgttctttgtagggcttgatgattttatacaaaatcacatttgtattttggtaattacttacagtcattagcttagagttaacatgaattacgattcaaatatttaccatttgtaagaccttttcaggattctggtacacagatgcccatgagtagtttctcttgtacacttgctttagctttaatcatagtgttagcattgtatgcataacctaaaattacttctccaaactataagggtaaaaatactgagtgatatgtacacatgcctatactaatttatatatagtatagataataagctgttcaaataaacttacacggtacaaagaagttagcaaggatagcccatgtaccgttgcaacgcacgggtattatactagtataatttaacatgtgacgagaagctggtctcctcaaggtaggagcaactggagttcacagttcacacaattgtttcgctgcctctagtccatggacctcatggtcatgtgaatgctagtccctccatgttttttgttgcttctttgtagttgagaattttaggggtgtgggttcattcagcatttatccaatcaacattttatgagagctgattacaattatatttttctagattagaatttacaatcacatgcaacatgttggtgtaaaagatcacaaatcatgcaaacataaccttaggttgttcggtgaaatttcgctaaagtggcttaggcaaacaaagtgcactattggggttagtaaaacagaaattttgtagaatttttttataaagtttactaccatataaatatgattgcatttgagcaaagtcatggcaaaaaagtggagaccttagaagtcttcaagcaaagggccatcaaagatggcacatggaaggaagaagatgacacaaacatgcgagagaagatggtaacttgtatttggaaggtggtcttggaggtgtgtggagcaacaaaagggagtgtatgcgaagctaaagatatttgttagtggaaaagaggaagtccaaatggctatggaggcgaagaatgataagcgtttgtaccaagacatgactgtggacaacatagagatagggtattcccagatgcaagcacctcacctcaatgatgttgaggaatggaagagattctaccaagtccataatggtcaagattccacacagaagggtcatgccgtgaagcatcttattcctgtggttctacagcagtaggagaagattggtttgtatttctcgcatctttttgataacttgttttgtgagtctctgaccacgaaaaaagttactactttactgaactgacctcgggcgtgttaataccagttgaaacacgctttggtccctcatccgtgaatcaatccctagcaggttttgtcttgtatccaagtagattataatcaatatcggtatctatggaccttagaaattcattcttcaccttgcttacttttaagtatggttaattcatcccgactagtatctttggacaccgaataaaccttctccctcttctaggtacctaacctaatccctagtacaccatctatctctacatccagggtcgcctccaatctcgttccgggttaaaaaagctgagtgacttaagcggtatatataggttctcggccttaaaagaagataaagcccagtcctattacaaaaggcgggaaaagtcactctatgtaagtattctaataaattgggcacacatttcactatatagtgagtttgagtctaggttactgtacctaagatggattatatagcctaagtcggggaataattaagtagatattagctttaaccatagcatacttgtgcatcaaaggacaatataggatgactattgttcgtgagaggaagacgaggaacttcaaccaagtttagtgcattaaggatgaaacgttgcacctcttggtggaggaagagatcagatatagatggcgagagtattttgactaattgttcaacggggacaaaggggacacaacctttcagttggatgagtcttttgatgacatcaatagacgctttatgcataggatccaagaatatgatgttagagtggtactgaaaaggatgaaatagggtaatagggtaaggcgatgagccctgatggtggcatggagatgcctcagggacataactatagtatggctaaccaagttgttcaaccatatcttttggtcgaacaaaatacctaacaagtggagaagtatattagtagatgaacaagaataagggagatatttaaagtggtaccatttatcgaagaattaagttgatggggcatgctatgaggctattggagttatcgagcatcgtctgagaggaataacgaggatctgtatgaaccaatttggtttgatgcccggaaggtcaaccgtggaagccattttattaataggatatgggaagaggcagtaaaaggggacttaaaaggatggagtacacctaaagatttaaccttgaacaggagtgcatggaaacaattatctatgtgcatgaactttgacttgcattttctgttgggtttcaactctaacttacccaacttgattaggactaaaaggcttcattgtcgttatacatagatgatagcattaggtttttaacttctatgcacgttaggaacctgtatggggttttgtgttttggaattgcatgaactttgatggagttgaatgttatgaataattccttttgtggacattggcatgagacttgatcctaggaacatattacttttggtcttgcattgacatactgttcacttattgtcatttatgttttgtttgtagcatcctgtcatggaccttcggtccatggggatagctgtcttctccggcgaggttatacccctctgccgcaggcttggttctagggtagcagccctaggcgcttgagaaggtcattgcaagagagagagagattggtttgataatgattttgcttgatttattccctgctgccatgcggcttataaatagccctatggctaaccaacttctcctacaaactctcaactaactcctactttcttggacttatctgatgctaaccaactctccacaattctctcatctcaatcttattatctagccttatcgcagctcatctcaatcttattctctagccttatcccagcctggctgttgcctctcgctccctacgatacccatgacttcggtccatggggatagctgtcttctccggcgaggttatacccctctgccgcaggcttggttctagggtagcagccctaggcgcttgagaaggtcattgcaagagagagagagagattggtttgataatgattttgcttgatttattccctgctgccatgcggcttataaatagccctatggctaaccaacttctcctacaaactctcaactaactcgtactttcttggacttatctgatgctaaccaactctccacaattctctcatctcaatcttattatctagccttatcccagctcatctcaatcttattctctagccttatcccagcctggctgttgcctctcgctccctacgatacccatgaca

SEQ ID NO: 99350 - DNA, 204 bp, Zea Mays
atggctatggaggcgaagaatgataagcgtttgtaccaagacatgactgtggacaacatagagatagggtattcccagatgcaagcacctcacctcaatgatgttgaggaatggaagagattctaccaagtccataatggtcaagattccacacagaagggtcatgccgtgaagcatcttattcctgtggttctacagcagtag

SEQ ID NO: 99351 - DNA, 1188 bp, Zea Mays
gtagtgcggcgattgaggttttgttccgctttctcagggttttctatcgtctcgtctcccatcgtcgtcgtcgcccgccgctgctaggtttggggtttccggtggccaggacccaagccagctccgtcgggcgccgtggggaactgctgggaggggcggtcgaccggcggtgcctctgcttcgggttctccgtaccggcgtcggaggggatcggatggcataagtggaacctttaagatagatggaaaggaacacatatcactggctggacatttgtcatccaaatcttgtgagaaagtgtggaaattgtcatcattgccgaaggtggttcaagtgacaaaggttcctagaatggcagtgtggcctaagatatttaaagcatcagaacccagtggtgacaatattggcctatatttcttccctcctgaaatgaggcacgatgaagaactagatcaactagttaatgaagtcatggataaagatttgatcttgcgagctattattggtgaagctgagatgctgatattcccgtctgttctactacctgaaagatatcagacattccaaaccaaacattacctatgggcggccttcaaagcaaaggaggataaaggtgatgcaattgtagaggaggaggttgagaagggaaattgcgtttcaaaccagccagacaaggtacagtctgataatgcttcatttccttcaaaccatggactggaccgtccaagcatggaagctccccctcaaagcagtagcagtgtctttggtattgttgtccgacaagctccaaatcttgaaccagaagtgaagcgatttatccaggagatggaacgcaaaggtgcgttggtaacggttatgaggggggaggcaattggtggagggccatagccaagcaacaccacgaccactatgcattagttgtagagagagtagagagtaaaccatgtcaaactatgctgtagttgtatagagtctgacacataacgtcgtggacttgagctcttgttcagtttttttttgtaaggtacctacaggtttggtcatatgataatttctccggaacggcataccttagcacctgttttctaaatgcttgtcatttccccagttgcaattgtgtctacgtgccatctggattctggttgtttttcctagactcttagagctaatttgggaaccatatttttc

SEQ ID NO: 99352 - DNA, 2614 bp, Zea Mays
gcgattgaggttttgttccgctttctcagggttttctatcgtctcgtctcccatcgtcgtcgtcgcccgccgctgctaggtttggggtttccggtggccaggacccaagccagctccgtcgggcgccgtggggaactgctgggaggggcggtcgaccggcggtgcctctgcttcgggttctccgtaccggcgtcggaggggatcggatggcataagttggagcaaatctaagtcgttaaattgagaatagtccaaggaaacctaattcatcctattttggcccaagacgacgctttccactagaatgaaggtggcaaatgggttgtctttgaggaaatctaatggtaggtttaaatcaaagcttatgatggaacttgttaaacaatggcgagaacatcaagcaaatatgaggtgcatgaatctatccaagcgtaataacaacatctatgttggggcagaaggagccaacataacttctcccaacgatagcaacatttggccaacgagtgctttagtagcaaagaatagcaacccaagatatgtgctagcctcaaagtgtgcaagccagcctcctacaatgtggctagagaatagcttgaatacttcatcgggtttcaagtgctctaagctctctatcgttaggaatgcacttccttcgaaaacacctaaggcgtctgtctcttggaagtcaaaggatgattcgaatgccataccaagacacctagagcaatctcactgtaaaaagacatctagagcaactcgaactcacttcaaggcgatgccgaatttgattcacaaggcaaagaatgttgatacctcaaatctaaacgatggtacctcgggttcaagttggaggggtcagtcggattcatataagggagaggacataaatatcgggaaggaatgcactaaaacttcagagttgttgaaaagtagagaagcctcaagaaaatcaaacatcctagtggtagatcggaaggatcctaacaaagatgagccagacaaagtgaaaggaatccaagatgaagttatgaccaaagaagagggagtgaaaggccatacctgtgaaggtcgtgcgacgtgttggagttgtcttaagcaggcgaacaccacaaagacaaatgatgctccaaatttaggttcattgttggttggtaacgaacacatgcaaggcctcatgagtaatttgagagataattcatcccatttgtttgaaaagaatcattcaagacaccaaagggatgatccatgtgaatatagagaaacaaacttgaagtttcctaataggatccaatcagttggaggcaatgggaaaaccaatgatgtcacatctaggaggaaacgactcttgttagaagaaaaggctagcgcacacgtgcaaaatgatcttacttatggaccgatgaagaggcggaggtacatagaagccaacgaagatgaagaagagcaaaatgatcttacttatggaccgatgaagaggcggaggtacatagaagccaacgaagatgaagaagattatgtcggcgaccaccatccggtgcatattgaagatgctaccactgaattgacaccgcaggattctatttcaaagcattgcgttgagcgacaatgctattgttgctcaaagcctattgacatacctagatggagtggaacctttaagatagatggaaaggaacacatatcactggctggacatttgtcatccaaatcttgtgagaaagtgtggaaattgtcatcattgccgaaggtggttcaagtgacaaaggttcctagaatggcagtgtggcctaagatatttaaagcatcagaacccagtggtgacaatattggcctatatttcttccctcctgaaatgaggcacgatgaagaactagatcaactagttaatgaagtcatggataaagatttgatcttgcgagctattattggtgaagctgagatgctgatattcccgtctgttctactacctgaaagatatcagacattccaaaccaaacattacctatgggcggccttcaaagcaaaggaggataaaggtgatgcaattgtagaggaggaggttgagaagggaaattgcgtttcaaaccagccagacaaggtacagtctgataatgcttcatttccttcaaaccatggactggaccgtccaagcatggaagctccccctcaaagcagtagcagtgtctttggtattgttgtccgacaagctccaaatcttgaaccagaagtgaagcgatttatccaggagatggaacgcaaaggtgcgttggtaacggttatgaggggggaggcaattggtggagggccatagccaagcaacaccacgaccactatgcattagttgtagagagagtagagagtaaaccatgtcaaactatgctgtagttgtatagagtctgacacataacgtcgtggacttgagctcttgttcagtttttttttgtaaggtacctacaggtttggtcatatgataatttctccggaacggcataccttagcacctgttttctaaatgcttgtcatttccccagttgcaattgtgtctacgtgccatctggattctggttgtttttcctagactcttagagctaatttgggaaccatatttttc

SEQ ID NO: 99353 - DNA, 1598 bp, Zea Mays
atctacctatcggcccaggaatgtgcccgggatgtgggacggggtttcacgaggagaacataccaacgacatcctcaggaaccgttgacgtggcgctcctcctccgacgattcgctccctccctcgagtttcaccactccctcctctcgcggccacgcactcccccgcctccgcaacctctcaccgccggtccccgccctccgaccctccacgcgcaaacagcccgcctccatccaccaggatccccgatgaggtgaggcctgctaccgatctcttttcgtgcacgaatcccatctcgcccccctcccctggccggggactccgatgcggcgggatcccgtggccgtgcctttcgcgcgtggaagccgggagccgcggagagaatgcggaccagcggtggtgcgtgcttgcgacggcgtttcggcggctgcgggatccgtttctagcttggtttcgtgtccgtgtccgaggtatcgggtcgtcggtcgggattacgatttgcgtgcctccagctgtgctgtgatccggtgatcctgagcggggaagtgattggttccctgtttttatgggattttgctccaatcggaagggggaactggctaggagaagtgttgatttggatattcgtggagtgtgcaatggtggactttgttcgacggctcgcctctgccctgctcaagtgctgcgaccttgacatacccaatcggccaaagggcctcgaggaccccgaacgcctggctagagaaactgtttttaatgtgaatgaaatcgaggctctgtatgagctgttcaagaagattagcagtgctgtggttgatgatggcttgattaacaaggatgaattccaattagccttgtttaagaccaacagaaaggatagcatgtttgctgaccgggtatttgacttgtttgacacgaaacacaatggaattctcgagtttgaggaatttgctcgagccctttctgtgttccatccgagtgcaccaatcgatgacaaaattgattttgctttcaaattgtatgatctcaagcaacaaggtttcattgaaaagcaggaggtcaagcaaatggtggtcgcaacacttgctgaatcaggaatgaatctttcagatgatattattgaaggcattattgataaaacatttgaggaagcagatacaaagcacgacggcaaaattgataaggaggaatggcgcagccttgtcttgaggcatccatctctgttaaaaaatatgaccctcccatatctccgggatatcaccacaacatttccaagctttgtgttcaactctcaagtagaggatgcgtgaggtcccagcgtctacggcaccattgaagcccctggggcacagcagatcaggttctgtgggggcacttagttgtttttgtttccttgaaaatgtaaattttatgtggtggcatgtcctcctgtatagtgagtattgctattgtgcacagaattggggcatgaagcgtttcttgtcgctgtttataaaatattcttcaaacatattgctcataaaaaactactcaaagtaagaatcaaattgagtacaaaactactcaaagtaagaattgaattgagtacatgtgatgcc

SEQ ID NO: 99354 - DNA, 1252 bp, Zea Mays
atctacctatcggcccaggaatgtgcccgggatgtgggacggggtttcacgaggagaacataccaacgacatcctcaggaaccgttgacgtggcgctcctcctccgacgattcgctccctccctcgagtttcaccactccctcctctcgcggccacgcactcccccgcctccgcaacctctcaccgccggtccccgccctccgaccctccacgcgcaaacagcccgcctccatccaccaggatccccgatgagctaggagaagtgttgatttggatattcgtggagtgtgcaatggtggactttgttcgacggctcgcctctgccctgctcaagtgctgcgaccttgacatacccaatcggccaaagggcctcgaggaccccgaacgcctggctagagaaactgtttttaatgtgaatgaaatcgaggctctgtatgagctgttcaagaagattagcagtgctgtggttgatgatggcttgattaacaaggatgaattccaattagccttgtttaagaccaacagaaaggatagcatgtttgctgaccgggtatttgacttgtttgacacgaaacacaatggaattctcgagtttgaggaatttgctcgagccctttctgtgttccatccgagtgcaccaatcgatgacaaaattgattttgctttcaaattgtatgatctcaagcaacaaggtttcattgaaaagcaggaggtcaagcaaatggtggtcgcaacacttgctgaatcaggaatgaatctttcagatgatattattgaaggcattattgataaaacatttgaggaagcagatacaaagcacgacggcaaaattgataaggaggaatggcgcagccttgtcttgaggcatccatctctgttaaaaaatatgaccctcccatatctccgggatatcaccacaacatttccaagctttgtgttcaactctcaagtagaggatgcgtgaggtcccagcgtctacggcaccattgaagcccctggggcacagcagatcaggttctgtgggggcacttagttgtttttgtttccttgaaaatgtaaattttatgtggtggcatgtcctcctgtatagtgagtattgctattgtgcacagaattggggcatgaagcgtttcttgtcgctgtttataaaatattcttcaaacatattgctcataaaaaactactcaaagtaagaatcaaattgagtacaaaactactcaaagtaagaattgaattgagtacatgtgatgcc

SEQ ID NO: 99355 - DNA, 1248 bp, Zea Mays
atctacctatcggcccaggaatgtgcccgggatgtgggacggggtttcacgaggagaacataccaacgacatcctcaggaaccgttgacgtggcgctcctcctccgacgattcgctccctccctcgagtttcaccactccctcctctcgcggccacgcactcccccgcctccgcaacctctcaccgccggtccccgccctccgaccctccacgcgcaaacagcccgcctccatccaccaggatccccgatgagctaggagaagtgttgatttggatattcgtggagtgtgcaatggtggactttgttcgacggctcgcctctgccctgctcaagtgctgcgaccttgacatacccaatcggccaaagggcctcgaggaccccgaacgcctggctagagaaactttaatgtgaatgaaatcgaggctctgtatgagctgttcaagaagattagcagtgctgtggttgatgatggcttgattaacaaggatgaattccaattagccttgtttaagaccaacagaaaggatagcatgtttgctgaccgggtatttgacttgtttgacacgaaacacaatggaattctcgagtttgaggaatttgctcgagccctttctgtgttccatccgagtgcaccaatcgatgacaaaattgattttgctttcaaattgtatgatctcaagcaacaaggtttcattgaaaagcaggaggtcaagcaaatggtggtcgcaacacttgctgaatcaggaatgaatctttcagatgatattattgaaggcattattgataaaacatttgaggaagcagatacaaagcacgacggcaaaattgataaggaggaatggcgcagccttgtcttgaggcatccatctctgttaaaaaatatgaccctcccatatctccgggatatcaccacaacatttccaagctttgtgttcaactctcaagtagaggatgcgtgaggtcccagcgtctacggcaccattgaagcccctggggcacagcagatcaggttctgtgggggcacttagttgtttttgtttccttgaaaatgtaaattttatgtggtggcatgtcctcctgtatagtgagtattgctattgtgcacagaattggggcatgaagcgtttcttgtcgctgtttataaaatattcttcaaacatattgctcataaaaaactactcaaagtaagaatcaaattgagtacaaaactactcaaagtaagaattgaattgagtacatgtgatgcc

SEQ ID NO: 99356 - DNA, 553 bp, Zea Mays
atctacctatcggcccaggaatgtgcccgggatgtgggacggggtttcacgaggagaacataccaacgacatcctcaggaaccgttgacgtggcgctcctcctccgacgattcgctccctccctcgagtttcaccactccctcctctcgcggccacgcactcccccgcctccgcaacctctcaccgccggtccccgccctccgaccctccacgcgcaaacagcccgcctccatccaccaggatccccgatgagctaggagaagtgttgatttggatattcgtggagtgtgcaatggtggactttgttcgacggctcgcctctgccctgctcaagtgctgcgaccttgacatacccaatcggccaaagggcctcgaggaccccgaacgcctggctagagaaactgtttttaatgtgaatgaaatcgaggctctgtatgagctgttcaagaagattagcagtgctgtggttgatgatggcttgattaacaaggtttgtaggttctaagctcttagtgtgaagtggcagtgaatgacaactttgtttccatgaagt

SEQ ID NO: 99357 - DNA, 407 bp, Zea Mays
tatgttttgagtttgttttattattaataggtcaagcttcgattgctaaaatattcttgttagtatgctcttttggtgtcttttgtttatctctggtatttaatcttatactaaattggctcgtttgattttcagggcatgttatggtgttctctggtttgtcatcgagaatagctctttctcttcggtcaagggtttcaccaatggcttgtaacaactggatgtagaatgatttttgtttttttaactgatgtagtgtgtttttgcattacactccattgcggctatgggggcagcacatgtagtgtgtagtcatcgtgaatttaatagtaactagctctgcagttgtgattggtttatgaatgtgtttggttggacctatcaattggatgtttgttggctacatc

SEQ ID NO: 99358 - DNA, 378 bp, Zea Mays
acatggtatgcagtccctagggaccgagcctcagagctagaggaagttattcgtgtacatggatatggaggaaaccctgaccgccttgcatcgctggcagtgcttggggagaagacaacattgatgtctccagatgttcttgtagcccgtggtgtgccctgctgtaggttagtactgtatcctggagagtttgtggtgacattcccaagggcataccacattgggtttagtcatgggcgtccacaggctacgccatgcctccacctccgcagatcacgcctaccttgccccgcccgcgacagcctgcaagcattaatgaagttatctgttttgcaataactatgtggagcagtttgatcatcactgtccatgggtcgg

SEQ ID NO: 99359 - DNA, 466 bp, Zea Mays
atgaacagcctcctcctgctcgccgtcgccgccgccgccgccgtctgcgccttcgtccccacgccggctaccgccgaccccttcctctgcccatggaggacggtggctcaccccgaggaccccttcatccagaacctcggcagctgggcggtggaccagcagcatagcgtcctccacttcgacaaggtggagagcgccaaggcgcagggcgtcggcgactgcaccagcatgacccgcaactacgagctcgtcatcgacgcgtccatccgcgccggctcaggcgactacaagtatagggcggtggtgtacgtgactaacttcacccagccgcagaaggtcatctccttcgcagccatcccaccgagccgccgcccgccggcggccaactgatcgattttaatctacttatatgatgaagctcccaatttttgaaattacatataaaaggagtataatgaacgtgtcc

SEQ ID NO: 99360 - DNA, 2395 bp, Zea Mays
atggacagccggagccaagcgccctacaagtccagcagcttctcgccggcaaccacccgcgacgacagcggcggcaagacgcgggaggtcgaccgcaacttctccctcggtgccctccgcgacaaggacgctcagcacggcggctcaagggagcagtccatcaaggaggagaacgagcaagagggggatggtgaccatggggcgcgagtcggcggcgaggatccgggcttggtgggagggggatgcggcgagccggacctcgcctccttgtcggtggaggtggacgcgttcctcgcgggtcaggacgaggacgcggcgccggtgagcatcacggagacgacgctggagaggttcgcctccgccgtcgagctgctggtcgccaggtacgagggagtcgaggacaggtgggcgtcggaggccggcagcgagccgacggcgctgctggccgcgataacgcgcatcgcggcgctcgcgtccgcgctcggcaagacacccgagggcggcggcaagcacgccgccgccgtgaaccgcgtcactgccgtgctgcaccgggccatcacgttcgtcgaggaagagttcctcgcgcaactcgaggacccgcgcgtccccagggccgggcccgggggcgagcagcagggcggcgcgcacgagcccgaccggtgcgccctcgcgccgccgtcgaacgccggcgccgggatagagtccgcgccgccgtacccgccggagaccgtggagcggctccgcgccatggccgacgccatggtcgccgccgggtacgtgacggagtgctcgcagatgttcctggtggcgcggaggaacgccttcgacgcggcgctgcaggggttgggctacgagaagtccaacatcgacgacgtggtgaagatgacgtgggaggcgctggaggcggtgatcgtgacgtggaccaaggcgttccggcacgccatcaacgtgggcctgtccacggagcacgacctctgcactcgcgtcttcgccggtcgccacgccggcgtggggcgcggcatcttcgcggacctgtcccgctgcgtcatgctgcacatgctcagcttcacggaggccgtggccatgaccaagcgcgccgcggagaagctcttcaaggtgctcgacatgtacgaggcggtccgcgacgcgtcaccggtcatcgaggccttcctctccgccgacgagccggccgccgagcacagccactccggcctggcggagctcaagtccgagatcgccgccgtgcggtcccggctcggcgagtccgccgccgccatcttccgcgagctggagagttcgatccgcgccgacgccggcaagcagccggtgcccggcggcgcggtgcacccgctgacccgctacgtgatgaactacctcaagtacgcgtgcgagtacaacagcacgctggagcaggtgttccgtgagcaccacgacggcggcggcggcggcgacgacggcggcaacccgttcgcggcgcagctgatggaggtgatggagctgctgcacggcaacctggaggccaagtcgcggctgtacaaggacccgtcgctgagcaacatcttcctgatgaacaacgggcggtacatgctgcagaagatccgcgggtcggcggagaccaacgcgatgctgggcgaggcgtgggcgcggaagcagtcgaccaacctgcggcagtaccacaagaactaccagcgggacgcgtggagccgcgtgctggggctgctccgcgacgacggcgtgctgacggtgaagggccacgtgcagaagccggtgctcaaggagcggttcaagcagttcaacgccgccatggacgagatccaccggacgcagggcgcatgggtcgtcagcgacgagcagctgcagtcggagctgcgcgtctccatcgccgccgtcgtcgtgccggcctaccgctccttcctcggccgcttcgcgcagcacttcagcgccgggagacagacggagaagtacgtcaagctcagcgctgaggacgtggagaccatcatcgacgagctcttcgacggcaacgccacgtccatgacgaggaggaagacatgacaacaataacaacaacactagagcttcttgcttgacagtgccgcggcacgtccattggccggtccagcttattcatccattatcgatttgagcaatgtgttgttccttttttttgtttcctcttcaaaaattcttctttttatttgtcttctgtcaactaaaaacgttactgtactaattttggtccagcaacagtcgatccatgtactaagaactgtacttactaccagtgcttctgtcaggagccagggcagctagatcatctctctgtaactctttgtacccatatatgtactgcttgcctgatgacactgttctgaacccgtgttcttccaaagctttc

SEQ ID NO: 99361 - DNA, 814 bp, Zea Mays
attgtacaacaaaaaggcttggaaataagttcagtcctccctgaaaaaaggaaagaggaagtagggtcaatgctctctctatcagcatggacttgtcatctgttcggtagcctcgctatatactgcccgctgcgcattggtgtatcatcacgcagagcagtgaaaaaaaatgatattttaccgtagctaggctttaacttctcttagtcttctggctttgctctgttcacgtttagcacaacagtgcctactctttcgtgtgatatcatgtttgtaattgctctccgcagagagcaatacgggagcaaaagaacactcttttggattctgagaagctagactcagctaggaagaggcttcaggaaaactaccaggaagcgcaaaacgcgaaaaagcagaggacgatacaagtgatggatatccacgacataccgaagccgaagaacaggaacaccttcgtgcgcaagagcggcagcagcgccggattcccggcaaagcaccggtgatctctgcctgaccaccatcggatctgtagcggactcagcgtatttatttctgtactagcaaaaagaaaaaaaagaaagaaattttaagaagcaaactcttgttttcccagtttgatttgtagccctgcagtccagctcactgatattatagggatatatatactgcctagtccatgaggctacgcttttgtacctctctttaagattggagaacagaaggaaagcaaattgtgttattattcaatgacattcacattcctgcctgataaagatatggccggtagatcatgcatatggctggattacgt

SEQ ID NO: 99362 - DNA, 1710 bp, Zea Mays
acccataggaaattttggtccccatattgcagctttcccaaccaaccatgaactcacccgcaccacgccgttaacgggtccagaacctcgcttccaatctgccctcccgtgtccccctccctgtccgattccccacagtagcgcctcgccctcgtcctcctcctccagtccggatcgccatttcccaccgatccgtcccggcatcggcatggctgcgcccaagccaaaggcgccggcgcccagtgcttcggcagcctagcgtttgtttgcctccgaggatttccgcctatcgcgttaccggatcttcggtgggccggcgaccctctacgccactatgagctccgacgggcgcctccgccgcgcgctggccgcgttcggcggcgacgtgtgggacctcgtggacgcggcgctcgccgccgccgcgcgggacagccccggcgacctgcgcgcgcgccgcgacggcatcgtccagcgcctctacgcaggggcagcccgctgccgcaactgcgacgccgacgcaaccccggcgcctgctcagccgaggaaggcgaatgacgccgtcgctgctgctgcttctcctgcggcggcggcgtcggcgtttccggcctcgcctgaacaggaggtcgacgcggacggcctcgacgacgtcgacgacgcggccgacgctggcatggagagcaagattctggcgatcagggatttcctggaggacccggaccagtctgaggacgacatagtgagcctactgcagaacctagcagacatggatatcacttacaaggctctccaggacacggacatcggccgccatgtgaatggcctgcgtaagcacccatccagcgaggtccggcaactggtgaagctgctcgttaggaaatggaaggaaatagtggatgattgggtgaggctgcacaactcatgtggtgatggtagtggctccatcataagcgatggtgactcacctgacaaagttcaatccaagtaccatcaaaatactcatgcttcagacttcaagtatccccccagcccacagaggcataatgttttgagctcagagagatctagcaaccacaatttggtggagtcaacaatggagaagcgtagaacgagccctgctcctgcatacaataacaccaagcagaacaacagcaacaactattccagtatttcatcgtcagcaccagctagagcaatacgggagcaaaagaacactcttttggattctgagaagctagactcagctaggaagaggcttcaggaaaactaccaggaagcgcaaaacgcgaaaaagcagaggacgatacaagtgatggatatccacgacataccgaagccgaagaacaggaacaccttcgtgcgcaagagcggcagcagcgccggattcccggcaaagcaccggtgatctctgcctgaccaccatcggatctgtagcggactcagcgtatttatttctgtactagcaaaaagaaaaaaaagaaagaaattttaagaagcaaactcttgttttcccagtttgatttgtagccctgcagtccagctcactgatattatagggatatatatactgcctagtccatgaggctacgcttttgtacctctctttaagattggagaacagaaggaaagcaaattgtgttattattcaatgacattcacattcctgcctgataaagatatggccggtagatcatgcatatggctggattacgt

SEQ ID NO: 99363 - DNA, 1825 bp, Zea Mays
acccataggaaattttggtccccatattgcagctttcccaaccaaccatgaactcacccgcaccacgccgttaacgggtccagaacctcgcttccaatctgccctcccgtgtccccctccctgtccgattccccacagtagcgcctcgccctcgtcctcctcctccagtccggatcgccatttcccaccgatccgtcccggcatcggcatggctgcgcccaagccaaaggcgccggcgcccagtgcttcggcagcctagcgtttgtttgcctccgaggatttccgcctatcgcgttaccggatcttcggtgggccggcgaccctctacgccactatgagctccgacgggcgcctccgccgcgcgctggccgcgttcggcggcgacgtgtgggacctcgtggacgcggcgctcgccgccgccgcgcgggacagccccggcgacctgcgcgcgcgccgcgacggcatcgtccagcgcctctacgcaggggcagcccgctgccgcaactgcgacgccgacgcaaccccggcgcctgctcagccgaggaaggcgaatgacgccgtcgctgctgctgcttctcctgcggcggcggcgtcggcgtttccggcctcgcctgaacaggaggtcgacgcggacggcctcgacgacgtcgacgacgcggccgacgctggcatggagagcaagattctggcgatcagggatttcctggaggacccggaccagtctgaggacgacatagtgagcctactgcagaacctagcagacatggatatcacttacaaggctctccaggacacggacatcggccgccatgtgaatggcctgcgtaagcacccatccagcgaggtccggcaactggtgaagctgctcgttaggaaatggaaggaaatagtggatgattgggtgaggctgcacaactcatgtggtgatggtagtggctccatcataagtatggtgctgtacagaatgttgaacttctctaatgtgttgtgtttagctccaaagcttttcgaattacttcgtgtttggtgatagttttgataccttttcattcatggtggtaggcgatggtgactcacctgacaaagttcaatccaagtaccatcaaaatactcatgcttcagacttcaagtatccccccagcccacagaggcataatgttttgagctcagagagatctagcaaccacaatttggtggagtcaacaatggagaagcgtagaacgagccctgctcctgcatacaataacaccaagcagaacaacagcaacaactattccagtatttcatcgtcagcaccagctagagcaatacgggagcaaaagaacactcttttggattctgagaagctagactcagctaggaagaggcttcaggaaaactaccaggaagcgcaaaacgcgaaaaagcagaggacgatacaagtgatggatatccacgacataccgaagccgaagaacaggaacaccttcgtgcgcaagagcggcagcagcgccggattcccggcaaagcaccggtgatctctgcctgaccaccatcggatctgtagcggactcagcgtatttatttctgtactagcaaaaagaaaaaaaagaaagaaattttaagaagcaaactcttgttttcccagtttgatttgtagccctgcagtccagctcactgatattatagggatatatatactgcctagtccatgaggctacgcttttgtacctctctttaagattggagaacagaaggaaagcaaattgtgttattattcaatgacattcacattcctgcctgataaagatatggccggtagatcatgcatatggctggattacgt

SEQ ID NO: 99364 - DNA, 812 bp, Zea Mays
cccatattgcagctttcccaaccaaccatgaactcacccgcaccacgccgttaacgggtccagaacctcgcttccaatctgccctcccgtgtccccctccctgtccgattccccacagtagcgcctcgccctcgtcctcctcctccagtccggatcgccatttcccaccgatccgtcccggcatcggcatggctgcgcccaagccaaaggcgccggcgcccagtgcttcggcagcctagcgtttgtttgcctccgaggatttccgcctatcgcgttaccggatcttcggtgggccggcgaccctctacgccactatgagctccgacgggcgcctccgccgcgcgctggccgcgttcggcggcgacgtgtgggacctcgtggacgcggcgctcgccgccgccgcgcgggacagccccggcgacctgcgcgcgcgccgcgacggcatcgtccagcgcctctacgcaggggcagcccgctgccgcaactgcgacgccgacgcaaccccggcgcctgctcagccgaggaaggcgaatgacgccgtcgctgctgctgcttctcctgcggcggcggcgtcggcgtttccggcctcgcctgaacaggaggtcgacgcggacggcctcgacgacgtcgacgacgcggccgacgctggcatggagagcaagattctggcgatcagggatttcctggaggacccggaccaggtcctcaaatatcccatctataccgcttttgattgacactttgacagtgctacaatttgccgacaaaaaagtagataaggagctcactgcttcgatgcaatatgtacctct

SEQ ID NO: 99365 - DNA, 914 bp, Zea Mays
atgtgggaaatggaaaggaggccactaagaggagctgggcagaaagagacagagggaggaggtgatggtaacacactgattacaccacctcctgctctactgggtcctgtgatcgccgagatgagcctaagggaagaaggagaagaaagggttcgacctcctatgtccaatattacctccagggaggatggatacgcctcaaatactgcattcacatgtatgcatatgaagttggatttcccactaaagaaatacagagagaagacattcagtaagtggataaattgttcacgtgaagctgcaaaaattgaactggtaaacttggagcataaccatgagttcataactgacgaagcagagaaacaacatttacgttgcaacaaaattagggatgctgagttcataaattttgttgatgcaatgcatgatagccgagtgccgcagcattgcatagttgattttatatcagaaatgcatgatgggccggagaacgtaccggtaactgctcaagatctgaaaaacatgtaagcaatatttttttgttacatgtgtatatattaagtgccataaatattactatagtaaatgtgtgtgtaatcattttttgtgcaaacaaatgttggagggcagccaggagaagagaaaactgcgcaaatgatgtagccaaacttttggctttctttagagaatgcaagaaacagaatccacattttttttgtgatttccagctagacaatgatgggaaaatagtgagtaatttttggtcacacgcaagtatgcagggggaatatgcggattatggtgatgctgtgacatttgatacaacacacaaaacaaatatatatgataaaccactgggcatgtttgttggagctaacagccatctgcagtgtacaatgtttggatttgttttg

SEQ ID NO: 99366 - DNA, 798 bp, Zea Mays
actcgaaaatagcttagcctctagcatcagcaattgctacaagaaggtttattcaagttttaaggcaaaagaaaggtgataacaaatttctagagcaaagaataaaaaaggctaacaaatgattagcgacgtgggctccttctgctcctgctaattgcccctctagtcattcagctacctggatggaacaaatattaaccttcattaaaattacggacaacaacattaaaattacggacaacaacaacacacaattatttagttaacaataacttacaagtagctaagtttactcatgttccctagtcctgggttatatttctagtgagtttgttgccacgtaaatagctgaaacaaacagtaatcaaacgattaataaaagaaaagaagagaaccttggggaaagaatggttgacactgctgcatgttggtctaaattggaaataatggttgacactgaggttgattgctttgaatttgaaagaatggttgacactgctgcttcttggtctaaagtggaaacaatggtcggcattgaggctgcttgctctgaatttgtaagaatggtcgacactgctgctgctgcttggtttgagttagaatgatcgaatgaaactgttgctactttgtctaaattgaaatgaatggttcactgctgcagttttgtgtccaggtgaattgtctggtttgtgtcgactgaatgttgattgcagcagcaccagcaggtgaatcatagtgaggaagcagtgaaacggtgaattacccgtggatgaaattcagtcagcagcagcagtgcaa

SEQ ID NO: 99367 - DNA, 853 bp, Zea Mays
gttctgcgtacgccattattatccacaacactcatcgatctacacacatacatagtttcttctactacacgacgacaaacatggggaagcctgcgaagatcggagagtggggtggatacgccggcgatcgtcgggatctgagggctactccggaccggctgatcgaggtgaaggtcacggcggacaacagcagctgcatccgctccatctccttcatctacatcggagccgatggcaaaccgtacgaggaggggccatggggtttcggccatgctggcacggagtacaagattgatctgtgcaggttcgacgagagcttgacggagatctccgggaccacgggcccagcctacaacattgacaatctggtcaagtctctcaaattcgtcaccaacaaacgcgcttacggaccgtacggcagggacgagggcaccccgttccgtgtcaaggtgatgaacaacggccacgtcgctggcttctttggccgctctggagattgcctggacgcgatcgggctctacgtgaaccccaactaataactaaaacgatggatcggatcatctgcatgcatgcatatgcagtatgcatgctgcttgcctgcctgtaacgaatatgaatgcataaaataacgcccctgctgctcccatgcatcagcagtgtgtaccactatgttatatatatatatatatactgtatttcgctaccgaataaaaacataaataaaagatccagtgtcgtctgcatctttgttttatatatatatatatatatatatatatatatatatatatatatatatatatatatagtattttagagccctgggctctttttaactacagggaagccccaa

SEQ ID NO: 99368 - DNA, 1453 bp, Zea Mays
gttctgcgtacgccattattatccacaacactcatcgatctacacacatacatagtttcttctactacacgacgacaaacatggggaagcctgcgaagatcggagagtggggtggatacgccggcgatcgtcgggatctgagggctactccggaccggctgatcgaggtgaaggtcacggcggacaacagcagctgcatccgctccatctccttcatctacatcggagccgatggcaaaccgtacgaggaggggccatggggtttcggccatgctggcacggagtacaagagatggcaacgggtacaaacccgccgggttttgttatcccaaacccgtacccgtgaaaaatatttacacccattaaaaaacccgtacccgtgacgggtttgaaatcttgcccaaacccgtacccatcgggttagcgggtacccacgggttacccgcgggttttatctccaatatacttattctttttataatcaataagtatcataatgattaatgagatcatggtccaaaatttatgtaatgaacaacgagttcatgatttggtataaaaaatattagtagagagaattaaatacaaataataagttgtataatcaagttaccttgcactaagttatacatccaccacatatataacgctagtaataactataatagcaagtaagcaacactctcaccaactacttatacattcactatttgataaaaaaacatgaagtaaataggtagataaaagtttgttgttcgtttataaaataaaatgacaatatacactaagtttggtcgggtttaaaaaacccacgggttaacgggtttgggtactataggaacaaatccgtacccatgaacccgtcgggtatacatttatgcccattaacaaacccatgggtatgaaaattgacccaaacacgtaccctaatggggtaaaaacccatcgggtttcggatttcgggtacccattgccatctctaaccggaatatatatgcagattgatctgtgcaggttcgacgagagcttgacggagatctccgggaccacgggcccagcctacaacattgacaatctggtcaagtctctcaaattcgtcaccaacaaacgcgcttacggaccgtacggcagggacgagggcaccccgttccgtgtcaaggtgatgaacaacggccacgtcgctggcttctttggccgctctggagattgcctggacgcgatcgggctctacgtgaaccccaactaataactaaaacgatggatcggatcatctgcatgcatgcatatgcagtatgcatgctgcttgcctgcctgtaacgaatatgaatgcataaaataacgcccctgctgctcccatgcatcagcagtgtgtaccactatgttatatatatatatatatactgtatttcgctaccgaataaaaacataaataaaagatccagtgtcgtctgca

SEQ ID NO: 99369 - DNA, 213 bp, Zea Mays
atgtctaaggctcctattcagaagtttgatgattatgtagccagcattttcgttcctattgtcatcaccctgtccttcttgacattccttgcatggtttctatatggatggttgggagcatatccaaactcatggtctgttgaaagtagcaattgctttgttttctccctcatgttctctatatctgatgtgtcttattatgattatggataa

SEQ ID NO: 99370 - DNA, 654 bp, Zea Mays
tacgccggagtgacgagcccagcatacaccttcgaccactacgccgtcgcccccgatgcagtagatcgggacgacagacaattcaacaacaaggcggagcgggtgaagcaagagctgtgggatttcttcagatgcgatgctggatacgaggccagggcggatgtggtgtctactacgtgctgtaagaagctcgtcgtggacatgcactacgaggcgcgcatccaggccatcgtcacttaccacggctccgtccttggggagaaggtgaacaagaaggacgcccgaaccatgtcgttgactccggaccagtacttgcagatgattcctcattggtgcgccgcgcatcctgagtgctgggagaagatggtgcagaggtggtgctcggctgagtgggacgaggcgcacaacgctagccgggaacgacgtttgctgatgcaaggtccctcccaccatcaaggcagccgcagcctgggcaaatacgcagaagcatggtcggcggcacatggtggcgtgccttgctccacgttctcggcatatgctatggcccacaaggggaaggcgacgtccgacgtcacctacaacccggatgacgggcccgaggcgtacaccaaccctgtcatccacagccgcctcagtgagtacaccgccatggcc

SEQ ID NO: 99371 - DNA, 243 bp, Zea Mays
atggctactgaagaagaatgggatcaagataactgcccactgctcaagatgtccaaactccggtcgctagagctgcacggactcattggcgctagacacggcgctgcgctgatcactgccctcgggcaaatgcatctccttggccacttgaagctcaaaggcgacaagatctcttgctgcgtcttcaccggagaacgccttcgatatcttcagactgtagagttggatggaactgtgcaatga

SEQ ID NO: 99372 - DNA, 1609 bp, Zea Mays
cccctgatctcgcgggctcgtataaaatcggcccatcacgaacccctcgcatcgccctcgcgcacccgacagagtccgcgaagcccgcccgcccgcccgcccgctcgcgcaaacgagagagaggcgagatccggccccgggccggcggcgagagagagagggatcggtgacggtctgacggactaccagggaccatcctcctcgcccttctccttcggccgctcgctgctctcgctgcgtaggcaccccgccgccatgccgtcaggcgaggaggccgacctcgaggcgttccaacgccacgtggcgtcggctctcgcggagctgctgcccgcggctgaggccggggccggtggcgacgccgcggcggagggggcgggcgaggagttcctctgcgccgcgtggacccgccgcctgctcgaggcgttcgtgctgtgccaggaggagttccgcgtcgtggtcgcccaggcgcggcgccgcgccggggccctgccgcccgccgccgagaggctggtcgccgagttccacgagcgcgccgtcaaggtcctcgacgtctgcaacgcggcgcgcgacggcgtggaccaggtgcgccgctgggagcgtctcgccgacgtcgccgcgtccgcgctgcgcgcgcccggggaggtccacgagggccagctccgccgcgcgcgccgggcgctcaccgacctctccgcgctcctcgtcgacgacgacgccgccgccgccgccgccgcgtccggcgccggcggcgtcgcctccttcctctcctcccaccgcaaccgctccttcggccgcgcgcgcgcctccccgtcgcgcacggccggcgccggcgccggcaccctcgcctccgcctccgcgtcccacttccgctccctctcctggagcgtgtcccgcacctggtccgcctcgcggcagctgctggccatcggggccggcctcgcggcgccgcgcgcccacgaggcgggcctcgccgcccccgtctacgccatgggctgcgtgctccacctcaccgcgtgggcgctcgtggccgccgtcccgtgcccggaccgcggcaacgcgctgcaggcgcaccacctgccggccgcgccgccgcgcgccgcgttcccgtgggcgccgcccctcctcgccttacaagaacgcctcgccgaggagggcaagcgcaaggacaggcgccactcgtgcggcctgctcaaggagatccactcgctcgagaagtccacgcagaagctcgccgaggcgatcgacgcggcccccatcccgctcttcggcgaccgggaggccgacgtgcgggatgctgccgcggagcttgccgccgtgtgtgaagccatgagggacggcctggagccgctggaaaggatggtgcgcgaggtgttccaccgcatcgtgcgcagccgcgtcgatggcctagattcatccatgcacaatgccgactgactcgccgatccgagttctgccttcaattgcgcgatgcggcgaccgtaggtatcttcttgtaaagaagggatttggatgtggccatcgcgatgtaagatggctgcttagctcccatgtttttgatgctgcattttgtcatcacatttttgtgttctatagttctgcaagatcgttc

SEQ ID NO: 99373 - DNA, 98 bp, Zea Mays
gatgagagtgatactctctagcaaggaaaagaaaaaaggtatttgttcaccttatcttttgcactttaacctgactactctgattgctgatggcatcg

SEQ ID NO: 99374 - DNA, 2172 bp, Zea Mays
ccaccaccaccacttgttctttcccttcccttccttcgcctccgcttcctcctcctcctcctgcccctcccccacccccacccgtcgggacgcctccccactttcccctcccccggatccgcatggcgcctctgcagcccgcgccgctcggcctcccgtagccgacgcccggccccgtcccaggctcatctttgcacagagtcattggaggaagtttgatgtttcagcagtactgtgacctttattagatgtctttccgcagcattgtgcgtgatgtaagagatggctttgggagcttgtctcgaagagggtttgaggtgaagtttctgggccaccgccgaggcagatctcacggtgctgtccatgagctgcgtgatccagccccagtgatccagagcagttgctgggctaatttgccccctgaattgcttcgagatgtgattgagaggttggaggccagtgaagccacatggcctaacaggaagagtgtagtctcttgtgcagctgtttgtcggacctggagagaaatctgcaaagagatcgttaagaatccagagttctctggaaaaatcacttttcctgtgtccttaaagcagcctgggcctcgagatgtaaccatccaatgcttcatcaaaagggataaatctactcaaacctactacttgtatctgtgccttagcacagctgtgcttgttgaaagtggcaagttcctcctatgtgcgaaacggacctcccgcccaacctgtacagaatatacaatatttatgaattctgaaaatttatctaggtcaagcaaaatgtacattggaaagctgaggtcgaatctcctcggcacaaagtttgcaatatatgatacccagcccccatgcaatgcagcagaacccgggaaaacaagccgtcggttctactcccggaaggtgtcgccaaaggtctcctccagcacctacaacatagcgcaggtttcatatgagctgaatgtcttgggtactcggggccctaggcggatgaactgtgttatgcactccatccctacctcgtgccttgaggctggtggcactgttcccagccagctggacagcatccttgctcgctctactgatgagtcatttggcagcatttccttctccaagtcatctgttgtggaccggtctatgcgtttcagcagctcaagattctccgacatctcaatgagcagcagccgcaggattggagacacggcatcgggagacaatgatgagtgcaaggagaggccattgattctccggaacaaggccccaaggtggcacgagcagctgcagtgctggtgcctcaatttcaggggcagggtgacagtcgcatctgtgaagaacttccagctcgttgctgccacgcagcccgctgctggagcaccaaccccatcacaggctaccccagtgccgcccgagcacgagaaggtgatcctgcaatttgggaaggtggctaaggacatgttcaccatggactaccgttacccactgtcagccttccaggccttcgcgatctgcctgagcagcttcgacaccaagctggcctgcgaatgaagccaccagtcatggctcaaagtcaaggacgatctgtctgtttcacgaagacggtggccccaaattttgctgggccaccattctgttgtatgttgttgatgccttcttaacttacctaggaagctgcgtttagacattttgcacctgatctacagctgctgctgtgtttctgtcctgatcgcattgttttccatagctttgctctgtggagcggcaacttgatctgccctgcccttaactagccggcaggtttattaatttggttttccatactatggttgtattaactgagaagagactccgacactttcgttgtgcctacctaagttctgtctgcctttgccctctgggatatgcaaatgtgcatcttgtaaaatttctgaattgcttttgtggcaagtcatagtaataaaagaactagcttccattcgattgcctgtttgggtacgtgttcctccaagtgaccactggccactgcaagcggcaacgccggcgaggtttttttcttgtttaaagtgcatgttttttttttgaattattatgtgcatgcttgtgctcgtaaaggcaagtgcttgcgaccttgcgtgtttgtgttctacaaaagaaaaaaaaa

SEQ ID NO: 99375 - DNA, 2113 bp, Zea Mays
ccaccaccaccacttgttctttcccttcccttccttcgcctccgcttcctcctcctcctcctgcccctcccccacccccacccgtcgggacgcctccccactttcccctcccccggatccgcatggcgcctctgcagcccgcgccgctcggcctcccgtagccgacgcccggccccgtcccaggcaggctcatctttgcacagagtcattggaggaagtttgatgtttcagcagtactgtgacctttattagatgtctttccgcagcattgtgcgtgatgtaagagatggctttgggagcttgtctcgaagagggtttgaggtgaagtttctgggccaccgccgaggcagatctcacggtgctgtccatgagctgcgtgatccagccccagtgatccagagcagttgctgggctaatttgccccctgaattgcttcgagatgtgattgagaggttggaggccagtgaagccacatggcctaacaggaagagtgtagtctcttgtgcagctgtttgtcggacctggagagaaatctgcaaagagatcgttaagaatccagagttctctggaaaaatcacttttcctgtgtccttaaagcagcctgggcctcgagatgtaaccatccaatgcttcatcaaaagggataaatctactcaaacctactacttgtatctgtgccttagcacagctgtgcttgttgaaagtggcaagttcctcctatgtgcgaaacggacctcccgcccaacctgtacagaatatacaatatttatgaattctgaaaatttatctaggtcaagcaaaatgtacattggaaagctgaggtcgaatctcctcggcacaaagtttgcaatatatgatacccagcccccatgcaatgcagcagaacccgggaaaacaagccgtcggttctactcccggaaggtgtcgccaaaggtctcctccagcacctacaacatagcgcaggtttcatatgagctgaatgtcttgggtactcggggccctaggcggatgaactgtgttatgcactccatccctacctcgtgccttgaggctggtggcactgttcccagccagctggacagcatccttgctcgctctactgatgagtcatttggcagcatttccttctccaagtcatctgttgtggaccggtctatgcgtttcagcagctcaagattctccgacatctcaatgagcagcagccgcaggattggagacacggcatcgggagacaatgatgagtgcaaggagaggccattgattctccggaacaaggccccaaggtggcacgagcagctgcagtgctggtgcctcaatttcaggggcagggtgacagtcgcatctgtgaagaacttccagctcgttgctgccacgcagcccgctgctggagcaccaaccccatcacaggctaccccagtgccgcccgagcacgagaaggtgatcctgcaatttgggaaggtggctaaggacatgttcaccatggactaccgttacccactgtcagccttccaggccttcgcgatctgcctgagcagcttcgacaccaagctggcctgcgaatgaagccaccagtcatggctcaaagtcaaggacgatctgtctgtttcacgaagacggtggccccaaattttgctgggccaccattctgttgtatgttgttgatgccttcttaacttacctaggaagctgcgtttagacattttgcacctgatctacagctgctgctgtgtttctgtcctgatcgcattgttttccatagctttgctctgtggagcggcaacttgatctgccctgcccttaactagccggcaggtttattaatttggttttccatactatggttgtattaactgagaagagactccgacactttcgttgtgcctacctaagttctgtctgcctttgccctctgggatatgcaaatgtgcatcttgtaaaatttctgaattgcttttgtggcaagtcatagtaataaaagaactagcttccattcgattgcctgtttgggtacgtgttcctccaagtgaccactggccactgcaagcggcaacgccggcgaggtttttttcttgtttaaagtgcatgttttttttttgaattattatgtgcatgc

SEQ ID NO: 99376 - DNA, 854 bp, Zea Mays
ccaccaccaccacttgttctttcccttcccttccttcgcctccgcttcctcctcctcctcctgcccctcccccacccccacccgtcgggacgcctccccactttcccctcccccggatccgcatggcgcctctgcagcccgcgccgctcggcctcccgtagccgacgcccggccccgtcccaggctcatctttgcacagagtcattggaggaagtttgatgtttcagcagtactgtgacctttattagatgtctttccgcagcattgtgcgtgatgtaagagatggctttgggagcttgtctcgaagagggtttgaggtgaagtttctgggccaccgccgaggcagatctcacggtgctgtccatgagctgcgtgatccagccccagtgatccagagcagttgctgggctaatttgccccctgaattgcttcgagatgtgattgagaggttggaggccagtgaagccacatggcctaacaggaagagtgtagtctcttgtgcagctgtttgtcggacctggagagaaatctgcaaagagatcgttaagaatccagagttctctggaaaaatcacttttcctgtgtccttaaagcagcctgggcctcgagatgtaaccatccaatgcttcatcaaaagggataaatctactcaaacctactacttgtatctgtgccttagcacagctgtgcttgttgaaagtggcaagttcctcctatgtgcgaaacggacctcccgcccaacctgtacagaatatacaatatttatgaattctgaaaatttatctaggtcaagcaaaatgtacattggaaagctgagtggtgagaactatctcactgagtcaccaggtcgtgag

SEQ ID NO: 99377 - DNA, 1368 bp, Zea Mays
aatattcttggatgcaaacttgaaggtttcccacagacttatctaggcctacctctgtccagcacgaaactacacctatcagcattcacaccccagattgcaaaaactgacaaatatctagcaggttggcaagcctccctcctaacgcccatgggaagagctgtcctggtcaactctgttttggacagccacctcatttatatcatgtctgcaatctctcttccattgggagttgtcgcacaaattgatcgcaggcgacgttcctttctgtggactggggaggacaaagcctctggagcgtgctgcctggttgcatgggaaaaagtttgcaccccaaaggtagtggggggacttggaatcaaagacctcagactgcacaacagatgcctccttgtcaagctaattcataggtttcattcagctcctaactcctcttgggcggcttgggcaagagcaaactgcaacgtggctaccttggagggtgatgtgcacgggatgcactggaacaacctgcgcgcggtgctacccatctaccaggccatcactacttccgtagtcggaaatggccataacacaaacttctggcatgacgcttggtgtggggaagatgatctggcaacacgcctaccagcgctctactctcactgtttggccaagcaatcaagtgtccacgacattgtcacaaatggactatctctagtccctagactttcagatcaggcacagatggaactccatcaagtccaggacatcatcaatgattctgccctcagtcaacagcaagacactcgcgtctgttcgtttgtctctcagagtggaaaattccaaacatccaagctctatgatttcctcaaaaagcaagatagggtgacgaaccctgctgcagccttcatttggagcaataaagcgccaccgagagcccaattcttcgcttggctactcacccaggggaaaattcagtccaaagaaaatctgctgctgaaaaaaattgtggatgaggacacttgcgatgtgtgtggccaggaacgcgaaactgctgatcacattgttctccgctgccactttgccaagaccttctggcttgcgattggctttcacatccccaatgacatgactgtgcaaaatttgcaccagattgaacggccctcaaacctcccgcaaaatgagttcagctcctttgtcatcctatgttgctggcagttgtggaaacgcagaaatggttttgttttcaggcaagaggcagccaccctcaaccaaactctccagctaatttgcgccgaagctgccagttggagtcacaggcatagctctaaagaatccggagtaaaagaagcctggaatatggtgttctcaaatgctagattgtaa

SEQ ID NO: 99378 - DNA, 2081 bp, Zea Mays
ttctttagtgcctctccagcttcagcttcacgtgaagctgacccaaacgccttgttgaaaaacaactcctccttgggaccagtcacctttgggagctggttttgacctggccggccggtggcacgctccccgtacgagcacgcaactacgcaaggccaccccgccggtctctccttccgccgccagatcctccgctccttcgcccacagccgccgcggccgcggccctcctccctggttgttgcactgtagtactggagtggaggtccggtcccacgtttgggcgtggactcgacaagcgccaaaccgagcacccccaaatcctgattctgctcaacactgcgcctgaaatattttctccggtggggctgcaaaggcaaattaggagcgcttccaagttccaatccccgtttgcttgtacagggtataattaaagaggcaacggagtcatgacccttttgagggagtattagtaaccgcatgatcttttcgagggaggcacgatggaaggaaataacctaccctctggaagcttgatgcaaggaacaccttacagtaatgtggacttgcagcatcataaacatatgcaaatgcctgcaccaagctctggaaaccaggctttcaaccactctcaggtgcctggcaatttccccatttgtctgaaccaggttacagattccgaccagctacctgaattccaatttggagagcacggcaaggtcaatcaccaccatcatcctcaccatcacaagcagcatgcaacgaatagcatgagcgatgatgaggagcatggtgtgcatgaggatgccactgatagccagatcggcaagggaaagaagggttccacatggcatcggatgaagtggactgattcgatggttaggcttttgattactgcagcatcctacactggggaagacccaggagctgatttaggaggtggtaggagaagctgtgcaatgatgcagaagaaaggcaagtggaaggccatatcaaaagtcatgggcgagcgaggctgcctcgtgtcgccgcagcagtgtgaggataagttcaatgacctaaataagaggtataaaaggcttacagatatccttggtcggggtactacttgcagagttgtggcgaacccggaacttctggatggcatggctaatctctcagataagatgaaagatgccgcgaggaagatattgagctctaagcacttgttctatgaagagatgtgctcctaccacaacaataattggttcagtttacctgaagatcctgcacttcagcgatcgttgcagcttgctcttaagtgtaaggatgagcatgatgcaaggaagcgagcaagtggagatgctgatgaagatgatcaaagtgcagacactgattatgaagaagagaatgatgatgagcatcccatcacgcatgccaataaggggaccctactcacgcgtaaaagattgcggtacatgccggcggatatggaggatgtaggtttcggcaactcttccagctcacatgactgtagctggagatctgatccccatagcattgcagtggacatcaacaaagcttctccagatggaactaacttggcttcggttcaaaaagacttggctacacagtctgcggagattgagaaacagcgtatggaaattgaagttgaggcattggagcttgcaaaacaacgtctcaagtgggaggcatttagtaagaagaaggacagagagctagagaagatgaggttggaaaatgaacaaatgaagattgagaataaacgtttggagctagaggtaagatataaggagttggagcttgaacacaaaccacaaggccatggcagtcatgcaacatgataatatctttaaaatcgcgaagactgaaatgcaagatagtaagctttgtctcctgttatcactacccagagaaataattatgagtaactcatttctaattctgtcaccaaatccttgatattcataggctgctggagtaggtgctatttggtaccagacagttcagtcatgtttatatttattttgttctctgtagatgtttcagagaaacgataagttccgatgcatgcttagggaa

SEQ ID NO: 99379 - DNA, 2585 bp, Zea Mays
atacgaccttacgtttgttcttggaccgagtgggagtgggaagcggacaacgctaatgcgctatataatgcgctatatatgatcatctataatgcgctaaggcactctgatcctgcaattggttcaccatgcttctccttcaggtcatccttcttggactcctctccctgcacgcgccgtccaactcagccaccgccacggacacggtgtcccctggcaatggcctcgccggcagcagcaggctcgtctccaacaacagcaagttcgcgctgggcttcttcaggatggacagcaagtccttcaactacgccaccaacccatacacttacctcggcatctggttcaacaaggtccccaagctaactccgctctggagcgccaacggcgagagcccggtcatggaccccgcctcaccggagctcgccatcgccggcgacgggaacttggtcatcctggaccaggccaccaggtccgtcatctggtctacccatgccaacaccaccaccaacgacaccgtcgccgtgctccagaacaacggcaacctcgtcctccggagctcctccaactcgtccaccgtcttctggcagagcttcgactacccgaccgacaccttcttcgccggagcaaagattggctgggacaaggtaaccggtctgaaccgccgccttgtttcgaggaagaacctgatagatcaggcccctggcctgtacactggggagatacaaaagaatggggttggtcatctcgtgtggaactcgacagtagaaatcgagtccaccgggctgtggaacggccagtacttcagctcggcgccggagatgataggcaacaccgtcagtatcacaactttcgagtatgtcaacaacgataaagaggtgtacttcacatggaatctgcaggatgagacggcgatcgtgctctcgcagctaggtgtcgatggccaaggcatggtgagtctgtggattgacaaggactgggtggtaatgtacaagcagcctgtactccagtgcgatgcctacgcaacgtgcggaccattcacagtctgtgatgagggtgagaacgagggcccaatctgcaactgcatgaagggtttctccgtaagctcacccagggactgggagctgggagaccggagagacgggtgcacgaggaatactccattgcactgtggaaggagccgcaacacagataagttctacgctccgcaaaatgtcatgttgccccaggacgcaatgaaaatgcaggctgcaacaagtgatgaggatgactgctcacgggcttgcttgggtaactgctcgtgcactggatattcctatggggaaggaggctgctctgtctggcatggcaaattgaccaatgtgaagaagcaacaacctgatggaaatggggaaacactttacctacgccttgctgctaaagaggtgccaggggtgccgaggaagaatagtagaatttttcgctttggtgctgccattattggcgcaagcgctgcagctgttgctgccctgatgatccttggtctgatgatgacttggaggagaaaagggaagctgtttacccgcaccgtgggagatgctcaagttggcattgggatcactacgttcagatatgtcgatttgcagcatgcaaccaagaacttctctgaaaagttagggggaggcagtttcggttccgtattcaaggggtacctaagtgactcacttgccctggcagtgaaaaggctcgatggcgccaatcaaggtgagaagcaattcagagcagaagtgagctcggttggaatcatccagcacatcaatttagtcaaactgatcgggttctgttgccaaggtgatcagaggttactggtttatgaatacatgccaaaccactccctagacgcgcatttattcaaggtcggcagtgatacggtcttggaatggaatctcaggtaccaaatagcgattggagttgccagaggcctggcctacttgcacactggttgtcgggattgcattatacactgcgacatcaagccagagaacatactccttgatgcgtcttttgtaccaaaaattgcagattttggaatggcaaaggtgttggggagagaatttagtgacgcgataactacgatgagaggaactattggatatcttgcgcctgaatggatcagcggagaagctgtcacatctaaagtggacgtttacagctatggatcggtcttatttgaaatagtatcagggaggaggaattcgagccaagaatactccaaggatggtgattattcagcatttttcccagtgcaagttgcacgcaagcttctgagcggagacattggcagcctggtggacgcaagtttgcatggtaatgtaaatcttgaggaagttgaaagagtttgcaaagttgcatgctggtgcattcaagatagcgagtttgatcgaccgaccatgaccgaggtggtgcagtttcttgagggtgtttctgagctccacatgcctccggtgccaagactactcgatgctatcacaggaggagccaccaacaccaaaatctactcaatgctatcagtggaggggtcacctacatcagtgtgacatctgtttagc

SEQ ID NO: 99380 - DNA, 2308 bp, Zea Mays
tctcctaatagatactccctctgtttttttatacatgtcgtttcctagttcaaagatgaactattgggcgtcaagtatttagaaacggaggtagtattatataaaatgtttatgccaaaaaatgtaaaatgtccgtccgccgacatcgccctcaaccatctgccgatatgcgaacctggagagtcgttcggacggacgaggaagaaagacggaagtgaggatcctctcctcggcaacgataggtggggcagctgtctcacggtctcaccctgccgtatggggagctcctcctctttcaacgcgtccccggctccacatggcaccgccctcgtccctagcagccgcgctcaagccggtgctaatccacctcctgcgcggcggctccgacctcgcgtccgtcgccgccacgcacgctaagcttgtcaaggccggcatcgcgacccccctctcctcctccaatcatctcctcgccgcctactgtcgctgcggcgcgattggtcgcgcccgcgacctgttcgacggaatgcgggaccgggacgtcgtctcctggacgacgctcatgtccgggtacgccgctgccgcccggccccgggacgccgtgtccctcctccgcgccatggggtgcagcggcgtgcggcctaacgcggtcaccttctcgacggccgcctgcacgtgcgcgcgcctcgcggacgcagaactcggccggcaggtgcacgcccaagcggagatcgctgggtgcgcacgcgacacagtcgtcgccactgcgctcgtcgacatgtacggcaagtccggcagcgtcgaggacgcgcgcgcggtgttcgacgccatggctgcgccagcgaggaacgctgtgtcgtggggcgctatgctggccgtgtacgtgcagaacgcgctcgggaacgaggcggtcgagctcttcgcggagctcaggacgtgtggcggtggcatggcgcccaaccacttcatgctggcgagcgtggtgagcgcgtgcgcaggcatggcacgtctgggcatcggtaggtgcgtccatggcgctgtccttcggcttgggtatggaaacaatgacgtgatttcggtggctttggtcgacatgtactccaagtgcgggcgctacgagtactcaagaaaggtgtttgacaggatcgagcaaccatccgtcgtcacttacacctccatcattgtcgctgcagcaaagtacggccgctggacgtgcgcgcttactttgttcaacgagatggtagatcaaggtgtgcagccaaatgatgtcactttgctcggtgtcatgcatgcttgcagccattctggccttgttgacactggccttcagctcctccgctccatgcagagcagatacggcgttgctccgtgccccagccactacacatctgcggttgacatgctgggccgggcagggcggctcgaggaggcattcgagctggccaaggaggcgcagcttgaaggcaacgatgccctcttgctgtggaactccttgctgtcagcttgccggacacataagcgcctagacctagcaaccatggctggccagagggtttatgagttcaataaccagcaggatgtagcagctgggctggtagtgatgtcaaatgcatatatttcagccggtcagatcgataatgctgccgctgtgcgatcaagcatgaggctgcgtggcatacggaaggatcccgggtgcagctggattgaagtaaaggataccccccatgtgttctatgctggtgcagtatcatgcgctggtgcgtgggcagataaagttctgatgttgctagatgaattggagagtaagatgagggagagaggttacagggggagattagggagtgctagagtatccgatgcacatgaagatgaggaggaagggaaaggtgtgatggttggtgtgcacagtgagattcttgctttagcgtttggtttgctagttgtcccgaatgggatgaccatcagggtgatgaagaacctgaggatgtgcagtgattgccatgaggtgttcaagctcatcagcgccattgttgagagcgagttcgtggtcagggatctgaacaggttccaccatttcaagctggggtcatgttcttgcaatgactactggtgatccgaaattgtaatctcagtggttctgctgttcatagtagaaaagaacaactttagcagattatcagttattaaaaaaatgttaagaaattatcttgctggagatgttcgagtgacttatttttgggtacaactacggaactaccagacattggtgagtggttgtagcataatctaactctgccctgagtttgctcta

SEQ ID NO: 99381 - DNA, 1372 bp, Zea Mays
cttcctccctgcccatgccgagcgccgtgctctctgctcacctgtgccgttgcccagctcgcggcgctcccggcctgtttggccatggccaccgcgccatggagcctccctgattttcctgaccacgcgctgttcttatccctgcgcgccgaccgtttcttccgtgtgccatggagtttcttctccctggccgattccatcttccccagccgcgcagctcgtcggtgttcatcccctacgccgcgccctgccctctgctcgctgcgtccgtccggagctctctccctggctcggtccagctcgccgtggagcttcctcgtcgccctggctcggatccagcgccctgcctccctctcctatggtggccgagttcctctcctgtgcgcgcgcgtccccagcccctgctctgctcatccatggccgcacgctcctccggcacgcggagctcttccctacttccgttctggccgcgccctggcccctgctcggacggcgctcgaactgccctgctcccagttttctctgcgcgctgctttttcttcctctcagccgaactcctccaccgtacagcgcccagtcgagcgctcctccttccatcagccggaagctttctccagccctggagctcctgcgcgtcccctgatttcccccgccgcgcagctcctggctcgcccctgcgttcgccatggcgattccctctgctggcgcttgaccgctcggccctgccccaacgccgggcatcgcctgctcccctcatcgcgcgtcgtgcgtcttccttttgtcaacccgacgtgggctctgtccgtcagctgagtgcttgatgctcgtgctcagtcatctacagcagtttgcttggtggcggctcgccgtggtcgttgtttgctgctcgtggccgtcgtctccttctcaacatcttcgtgtcgtccagtgtgcttgactttgtcttgtcgtaaaaccacaacgccgtcgagcgtcgctgccatcacaaagttccctgctgtcagtctctgcacccgtcctataccgttgtaaaactctagtgtttgtcgctgatatccgatcgtctccaacctttatcttgctgtcgtcgttcggtcaccccgtctcgatgtcggtctctacgtgatgtctctgaattgtgatcgcacggacaaaagaattcccaagagaagatgtccaaagattggatggtggtgtgcgtgaagttcgtgtggcacctaccaagcgctcggcaaattattgaaatcggaaaatcactatcgatcccgcggattcgagtcagctgttgaaacggtaagctgatgaattattcagaatagttcgatcgttgaataaattaatgtgctagtgtgatgttcattaggtgctcgat

SEQ ID NO: 99382 - DNA, 1250 bp, Zea Mays
aacaagcaagaacagctgtcgatccaattgtcacttgctctccctccaacaagctaattaaggccggtcatccctcttctagctcgtttcattatccatggcggaggagaagcaccaccaccaccacctgttccaccacaagaaggacgaggagcagctcgccgccggcgggtacggcgagtccgccgagtacacggaggccacggtgacggaggtggtgtccacgggcgagaacgagtacgacgagtacaagaaggaggagaaggagcacaagcacaagcagcacctcggcgaggccggcgccatcgccgccggcgccttcgcactctacgagaagcacgaggcgaagaaggacccggagcacgcgcaccgccacaagatcgaggaggaggtcgcggcggcggcggccgtcggctccggcggcttcgccttccacgagcaccacgagaagaagaaggaccacaaggaggccgaggaggccggcggcgagaagaagcaccacttcttcggctgattgatcctcccgtatcgtcgtccctccccgtgtgctacgcgtgcgtgtgagagtgatatcgagcgcccgccgtgttgtgcgcgcgtacgtatgtatgcgctcgtgtgatgcacgaataagcgtggctacgtaatctatcgtatgtatacgtgtgtgtatgcatgtgcttgtgtatgatcgtggtacgaggaccgaaaaaatgtatgcaactctgatttacttacatgtttagttgtttacgtttctccaaaagtattagtacccattatgttatattttactatattatattttattgattattaaactatgtatggatgaaattactatttcaagctggtagctagaccgagataaaactcgtccgtgttgttttaacgggtgtattaattttattccaagttaaatattgtttacgaacctagagagaaaaaaacacgcacatatagtatgaatcatatatgtcggttttacaaaatgtatacattttctaaatatgtgaatcgtatatatatatagtatatgagagtactgcggctaattaaagctacctgtactactaagatcaagaataacacatatctaaactgcaaaaaaaaaagatagaataaaacacctttctaaaaatttacgtactcacaagtttagaaaaggaccacatactcacaagttttttttttaaaaggaccacatacttgcattttataattatctaaaaattcatgttcacatttat

SEQ ID NO: 99383 - DNA, 2358 bp, Zea Mays
tctcaggtgacctcgaaaaaccttcactatgttcattagcacaaaagtgtaaacatcaatgtggtttgcttgaggaaatagtattgccctcaaggaacatgggatctttaccaaatgcagaagaatcaccatttggcctagagtctttgttctggcaggaaagcatacatgaatctgtggaatatggtgcacctgcttctgcaacaactcatactgaaaatggatttggtgaatcaaaaggttgccatgtcaagtctgcactcgaaaatactcatgtgtcagaacctttttcccaccatgatactgaagaaaatatttccaaaattggtggttgcatgcatacatcccagcaagataatggaatggaaggtatagacatttcattttttcccctcttctatagttttttttcttgatttccatgcattcttgcaaacccgtatcctgccatttaaatggtacccataagaactgttccttttttttaggattaccagaagctaaccttgatgaagaatgggttctgttagtattatttacaaacacttaaataacctactttatactattgcttttgaattaatgtttatttattcaaatgatgtgccagatgctatcgagaatcctttaattagtttatcaactcctggttgcaagcatgaaggtgctttgtctgaggaagcagtgcacacaatgaaggattatgctggaacatgctcatcaaatcccagggtacccatgcagttgcatgacgaccttgcattcccaggtcctgaaaaatcaggagatgaatcagtcaatattgaggttaaagtacaccatggttctaatctgtctcagttaggatcaactgatctcttggatgatactgaattgcttcaccagggccataactataaagatcgatccaatgaggatatgctagagcaggctgcttctgaaccctgcacaaatggggatgatatcgtggaggctgcggctgctaccaaatgcttagaaagtggagcgatgctggttccatccgaagagagatcaaatttgaacgataggcagcttacccccaagctggaaagcccagacatcatggaatctggccttaactgtgataaagatgctcgcaatactttggacaatggatctgttgtggctgttgctggtaagagaactccatctggttctggtcactatgaacacaatgtctaccaagtttcaggcatttgtgctacgtctgaagctgcaccagtcggagtggtagaaactggaatagctgtggaaacgtcatccctggtagatgaccaacctaatcctgtgctggatggtgatgaagttgagaagcacagcttaaactgtgaggcagacactggtcggattcttggtactggatctgttacgagcaacacaacccttgtgcccaaggacggtcacaccatttgttgccaggaactggagctaccaaatggcttatcctcgtttctatttcccgaagaatctggaatttgtcagtatgcgagtgtctcaggatcagggccttgcctgcagcacgtaaatgaaagcaccagtacgcaagcgacttacaatattgaaacgctcaatcagcagcatcacgaggagtacgaccaaaccgctcgtggtatcctggctagcagttttcctgaagctgtagggattgaacagtcaggtctggcccctgctgcagaagcaccagtgttggcagtgccagatgggcagcctaacagcaagctggagggcaacgaagtggatgagcacagctgtagctatgatgccgagttcctgaacagagaagcgtctaaccttcacaaagatctgtttagtgaagatagtcatcgaagtcatctaccttctctgagatctcctcaacgatctgcctattttcacaacggaaatgattcgggttcagtagacggactccgcgctaagcggcagagtttcaaagtttccagcagcataaaaggaagctacgtcgccaagactagcgtccctcgtccgaagccaggggacagcctgagccagtctgcgatagcgctgcgcggggtcaggaagaacacgaccgctgttgaagttggtggccatcctgtgagtttgaagccaaacgctgttcgctcggtcgccaaggacccatcatccagcagaggaccacccagggatagcctgagccagtctgcgatagcgctgcctaaacacagaaaggacgccactgctgttaagagcaagactaataataaaccttggctataataaggcagcaggcttacatacatcactactccgatttcatactccactgtacaaacattgtaatttgatggttgtgtggttccggatttattttcagcacgg

SEQ ID NO: 99384 - DNA, 108 bp, Zea Mays
ccttctatcaacttatttcaatggctatcaaaaataatcatctttgattctaactttctcgctagccaagaaaacgtgaatgactctaaaaatacaaataagatataa

SEQ ID NO: 99385 - DNA, 290 bp, Zea Mays
tatatatatatatatatatatatatatatatatatatatatatatatatatatatatatatatatatatatatatatatatatatatatatatatatatatatatatatatatacccccccccccgcccccccccccgcccccgccccccccccccccccccccccccccccccccccccccccccccccccccccccccccccccccccccctccctccctccgccttggtggccccccccccctctctcccccctcaacctccagctctagatctctccacacccccc

SEQ ID NO: 99386 - DNA, 1043 bp, Zea Mays
ggccgcctctcccgcccccgaccgcgccccgccctgcccccgtggagcccgccccggccgccaccgcgatcgcctctctcgcccccggtagcacctgcccccgaggagcccgccccggccgctgccatgaactaacaaatacctatgcttgcgctcagaagtacaagaaggaggagacagccacgtttgcgctctatggttgaagaggtggttgacatttcaaattgggagaaaaaaggtcttcaactttttagtaaattacgctaagtttgtggcaagaaacggaagttacaaagctttagagatgaggagtactacataagttcagtacctcaaaaccatcatttggaagctgggctgtcggtgagggacaatgaaggatttgttgaaaataggttggatgctgctgttcttgatttagttgatgatgaagcttctggtatgcaagcgcagaaaactcgatatcactggatgaaggtgatcagtcaagccatgtttggtagtgaagggcgacgtccagagagtaagaacaaggtgacacagtatggactcgatatgactgagcaacaatatcttgagcattcgattccatggatagctgccaatgatgctgcttggcgtgcgttatgtcattattgggcttcacctccacctatacctacatctccatctaccgaacatcagacccctccagctaccttgccgacgcatgaacaagaggacgggttagactttgtcgaaaccctcttcaatagtggaggtattgaccatcactcttcactgtaacccgatggtgatcggcgaccatgagcttccatgttattgcgttctgatacttgatacttttattatgactatgtatgagatattgtcttttattagtactggatgatgatatgtgtcttattatgactatggatgagacttttgtgatgtaattgatgagactatggatgagacttttgtgatgtaattgatgagactatggatttaaatattgttatgtgattgtgtgtgagatgttttatgtgaaaatatgttgt

SEQ ID NO: 99387 - DNA, 110 bp, Zea Mays
tttcatattagcattacaatatttcatgttaactgtttatatgaaccgaggataatgctgttcctcttcctcaatacgctaacttattttctttaatttactggaacaaa

SEQ ID NO: 99388 - DNA, 1869 bp, Zea Mays
actagatagatgctgtcatgctgaggacgaaggcaagcatgttgggcacagcgccatagtatcaaactatcattttgagccgtttcgcgtaccctaaaatcagtggcaacagcgccatagcatcgtcaactccatcaagccgttaccatcaacaacgattgcttgctgccgactgccaagcggggccggtcaatccagaagttggcagcctccaatcgcagcatccctccgagatcgctgccccgtccccctcccccggcttatcccctatcccctcctcccccgctccttccacacaaacctccatgccccttcttcctctcctccccgtcatggcttccaccttctcccccacttccgccgcgagggccctcctcccgggctccacctcccgcccactcttcctcgccgcttcagcttcctcagctcgctcatcagcgagcgccgaatccaacacccccccttaccgcccccccggtacactcgcagggcgcattcaaccatccaggaagggactggacttccgccgcggccgattcaccgtctgcaatgtcgccgctcccaccgccgccgaacaggaggcgacggcgtcggccgcgaaggagacccagcgccccgtgtacccgttcgcggccatcgtggggcaggacgagatgaagctctgcctgctgctcaacgtcatcgaccccaagatcggcggcgtcatgatcatgggcgacaggggcacggggaagtccaccaccgtccgctccctcgtcgacctgctcccggacatccgcgtcgtcgtcggcgaccccttcaactccgacccggacgaccccgaggtcatgggccccgaggtccgccagcgggtcctgcagggggacaccggcctccccgtcaccaccgccaagatcaccatggtcgacctgcccctcggcgccaccgaggaccgcgtctgcggcaccattgacatcgagaaggcgctcaccgagggcgtcaaggcgttcgagcccggcctgctcgccaaggccaacaggggcatactgtacgtcgacgaggtcaacctgctggacgaccacctcgtcgacgtgctgctggattccgctgcgtcggggtggaacacggtggagagggagggtatctccatatcccaccctgctcgcttcatcctcatcggctctggtaacccggaggaaggggagctcaggccccagctgctggaccggttcgggatgcacgcgcaggttggtaccgtcagggacgccgagctcagggtgaagatcgtggaggagagggctcgtttcgacagggatccgaagacgttccgtgagtcgtatcatgacgagcaggagaagctccagcagcagatatcatctgcacggagtaaccttggcgctgtgcagattgaccatgacctccgtgtcaagatatccaaggtgtgctctgagttgaacgttgatggactcagaggtgacattgtgactaacagggctgccaaggcgctggctgcgttgaaaggaagggacagcgtcaccgtggaggacattgctactgtcattccaaactgcttgaggcatcggctccgcaaggatccgcttgaatccattgactcgggtttacttgtcattgagaagttttatgaagtctttagctagattgttcttgaggtttatcaatttcagagccttcagtatcttcacacatgtttcagttagctagttttatcttccaactttttttttctaatgcctattcatcgaaggcattgaatcttaaagtttcctgtgctcatttcttcatggtctgtcaatggagaatgatacgttgtgagccccgatatgacaacatgttgatttcttaacacttttttctaatagattcgccagc

SEQ ID NO: 99389 - DNA, 2074 bp, Zea Mays
actagatagatgctgtcatgctgaggacgaaggcaagcatgttgggcacagcgccatagtatcaaactatcattttgagccgtttcgcgtaccctaaaatcagtggcaacagcgccatagcatcgtcaactccatcaagccgttaccatcaacaacgattgcttgctgccgactgccaagcggggccggtcaatccagaagttggcagcctccaatcgcagcatccctccgagatcgctgccccgtccccctcccccggcttatcccctatcccctcctcccccgctccttccacacaaacctccatgccccttcttcctctcctccccgtcatggcttccaccttctcccccacttccgccgcgagggccctcctcccgggctccacctcccgcccactcttcctcgccgcttcagcttcctcagggcgcattcaaccatccaggaagggactggacttccgccgcggccgattcaccgtctgcaatgtcgccgctcccaccgccgccgaacaggaggcgacggcgtcggccgcgaaggagacccagcgccccgtgtacccgttcgcggccatcgtggggcaggacgagatgaagctctgcctgctgctcaacgtcatcgaccccaagatcggcggcgtcatgatcatgggcgacaggggcacggggaagtccaccaccgtccgctccctcgtcgacctgctcccggacatccgcgtcgtcgtcggcgaccccttcaactccgacccggacgaccccgaggtcatgggccccgaggtccgccagcgggtcctgcagggggacaccggcctccccgtcaccaccgccaagatcaccatggtcgacctgcccctcggcgccaccgaggaccgcgtctgcggcaccattgacatcgagaaggcgctcaccgagggcgtcaaggcgttcgagcccggcctgctcgccaaggccaacaggggcatactgtacgtcgacgaggtcaacctgctggacgaccacctcgtcgacgtgctgctggattccgctgcgtcggggtggaacacggtggagagggagggtatctccatatcccaccctgctcgcttcatcctcatcggctctggtaacccggaggaaggggagctcaggccccagctgctggaccggttcgggatgcacgcgcaggttggtaccgtcagggacgccgagctcagggtgaagatcgtggaggagagggctcgtttcgacagggatccgaagacgttccgtgagtcgtatcatgacgagcaggagaagctccagcagcagatatcatctgcacggagtaaccttggcgctgtgcagattgaccatgacctccgtgtcaagatatccaaggtgtgctctgagttgaacgttgatggactcagaggtgacattgtgactaacagggctgccaaggcgctggctgcgttgaaaggaagggacagcgtcaccgtggaggacattgctactgtcattccaaactgcttgaggcatcggctccgcaaggatccgcttgaatccattgactcgggtttacttgtcattgagaagttttatgaagtctttagctagattgttcttgaggtaaatgttccttagtcacaatttttggcgggaaccctcttgttctgttactttcataatgttctgctgtttaataatatctggagcttgaattggtatcaattttgtgcatctagcatcataataatgtaggatccattccttccatttggaatgcatgttatgagcatcataatgctctttgcatttcagtcttccttgtaaatcagtgttgtagcatttggctgcattagagcataacttcggaagtatttcctcggtcccaaattaaaattcgttttaccattttactgtatgcatacaataattaatgtatgggttatatatatgtttaggttcataatcattcatatgaatatggacataaaaatctagagctaaaacgactattatttgagacgaagggagtattatgctaaattattatcttgtgcatcagtttgaatctctaggtattttaagccatagtattgaccttgtgcaatctt

SEQ ID NO: 99390 - DNA, 1947 bp, Zea Mays
actagatagatgctgtcatgctgaggacgaaggcaagcatgttgggcacagcgccatagtatcaaactatcattttgagccgtttcgcgtaccctaaaatcagtggcaacagcgccatagcatcgtcaactccatcaagccgttaccatcaacaacgattgcttgctgccgactgccaagcggggccggtcaatccagaagttggcagcctccaatcgcagcatccctccgagatcgctgccccgtccccctcccccggcttatcccctatcccctcctcccccgctccttccacacaaacctccatgccccttcttcctctcctccccgtcatggcttccaccttctcccccacttccgccgcgagggccctcctcccgggctccacctcccgcccactcttcctcgccgcttcagcttcctcaggtaaccgtcatctcacatttccctccccctactcactctgtttcccagctcgctcatcagcgagcgccgaatccaacacccccccttaccgcccccccggtacactcgcagggcgcattcaaccatccaggaagggactggacttccgccgcggccgattcaccgtctgcaatgtcgccgctcccaccgccgccgaacaggaggcgacggcgtcggccgcgaaggagacccagcgccccgtgtacccgttcgcggccatcgtggggcaggacgagatgaagctctgcctgctgctcaacgtcatcgaccccaagatcggcggcgtcatgatcatgggcgacaggggcacggggaagtccaccaccgtccgctccctcgtcgacctgctcccggacatccgcgtcgtcgtcggcgaccccttcaactccgacccggacgaccccgaggtcatgggccccgaggtccgccagcgggtcctgcagggggacaccggcctccccgtcaccaccgccaagatcaccatggtcgacctgcccctcggcgccaccgaggaccgcgtctgcggcaccattgacatcgagaaggcgctcaccgagggcgtcaaggcgttcgagcccggcctgctcgccaaggccaacaggggcatactgtacgtcgacgaggtcaacctgctggacgaccacctcgtcgacgtgctgctggattccgctgcgtcggggtggaacacggtggagagggagggtatctccatatcccaccctgctcgcttcatcctcatcggctctggtaacccggaggaaggggagctcaggccccagctgctggaccggttcgggatgcacgcgcaggttggtaccgtcagggacgccgagctcagggtgaagatcgtggaggagagggctcgtttcgacagggatccgaagacgttccgtgagtcgtatcatgacgagcaggagaagctccagcagcagatatcatctgcacggagtaaccttggcgctgtgcagattgaccatgacctccgtgtcaagatatccaaggtgtgctctgagttgaacgttgatggactcagaggtgacattgtgactaacagggctgccaaggcgctggctgcgttgaaaggaagggacagcgtcaccgtggaggacattgctactgtcattccaaactgcttgaggcatcggctccgcaaggatccgcttgaatccattgactcgggtttacttgtcattgagaagttttatgaagtctttagctagattgttcttgaggtaaatgttccttagtcacaatttttggcgggaaccctcttgttctgttactttcataatgttctgctgtttaataatatctggagcttgaattggtatcaattttgtgcatctagcatcataataatgtaggatccattccttccatttggaatgcatgttatgagcatcataatgctctttgcatttcagtcttccttgtaaatcagtgttgtagcatttggctgcattagagcataacttcggaagt

SEQ ID NO: 99391 - DNA, 460 bp, Zea Mays
atgaagagcgagtacggctatgttcgcaaggttcatgcctcctcccccctcccacccctcccgctcgtattgcttgcgcctacatcccgctgctcagtttcgcacaatcgctggttgtcaccgaatgatagcctcgacaacgccaaggttacagaggccatcggcatcaggctgccggacatcggaagggccataaggggagatattgcgttacctatttttggctttgtgattgggttgacaggaggcattagtggcagggatctgaaggagcatcttggaaggttgcagcagtcgtctgattccaggagggctgctatgaatgaaatgatgagggcggcggaggttgccgcagatgagaacatgtccactatgcatttaatcaatcatcgttgggtgcgagaagttcagaagcagcaactaggtggatcatctgtgtaatggagtctgcattaaaggc

SEQ ID NO: 99392 - DNA, 865 bp, Zea Mays
cgatctagagattcgtcggcatgggggcggcgtacgggacggccaagagtggcgtcggcgtggaacaatgggtgtcatgcgcccagagctcgtcatgaagtccatcgtgcccgtggtcatggctggtgtgctcggtatctacggcctcatcatcgccgtcatcatcagcactgggatcaaccccaaggccaagccatactacctctttgacggctatgcccacctgtcgtccggccttgcctgtggtcttgctgggcttgctgcaggcatggccattggcatcgttggtgatgctggtgtcagggcgaacgctcagcagccaaagctgtttgtgggcatgatcctcatcctcatcttcgctgaagcgctcgccctatacggtctcatcgtcggcatcatcctctcatcccgcgccggccagtctcgtgcggactaggcacgttccacatgtctccgccacctggtcgtaaccgggtcgtgttttgtatcggtgatgagccgacaagctggagcacttaattttttttatgctgtctagttttttgaacttgcgttgagtcgagaaaacaaaatagaacttgggtagccgagggggtgaccttttttcccttgtgccattcttttccctgtcgtggtgggtggtgggctgtggctgatgcttctttctgcacacttttttttgcttgggctcggggcgttggtgtaatttggtgaataagcgagtgcgtccagtgcaatgggagctcaggactcttctgttcaaaatccgccttgtttcgtcgttgtcttgttctgtgttctatatgaatattgtcgtgtgggaaatacatgcgtggctcatgaactagtgcttgtttcttctagc

SEQ ID NO: 99393 - DNA, 302 bp, Zea Mays
agcgccgtggccctctgagccctctctcgtcttcttcccacccccaccggtgacccacgcgttcctcagatcagatcggcaaggccaatccgaaatctcgagctttcgcggccggcgaccacagcaaagaggaggccacagcacgacagcgccccagggttcctactctcgtcgcagcggcagcagtgaggggaagatgtcgtcggtgttcagcggcgatgagaccgcccccttcttcggcttccttggcgccgccgccgctctcgttttctcatgcatgggggcgcgtacgggacaacgaa

SEQ ID NO: 99394 - DNA, 1746 bp, Zea Mays
ctctgaatcggcatctgagagagttgcaggtcgagttgctggtgcctctgatcctcctgtcactgcctggcgtaaagcagcagcgaagaagccgagagttcttcgccttcgccttcgcctgcctgctccatgcttccatccgtatcggcggctggcgcattcactgcaggccggccggagtaggcggcggggcccaggctgtgataatagcaattgattactgctgcttttgcaatcattcgtctcgttggtcagctgcgagcgagcgcgacggacatgacaacatgacatggtgtgcgtgcaggggcgccgctgtccgcgctggacggcgtgctggtgggcgtgaaggacgagatcgactgcctgccgtacccgaccacgggcgggacgcggtggctgggcgcggcgcggcgctgcgaggccgacgccgcgtgcgtcgcgcagctgcgcgcctgcggggccgtcctcgccggcaaggccaacatgcacgagctcggcgccggcaccagcggcatcaacccgcaccatgggtcgacgaggaacccgtacaacgccagcacgatcgccgggggctcctccagcggctccgccgccatcgtgtgcgccggcctctgccccgtcgcgctcggcgtcgacggaggcggctccgtccggatgccggcggcgctgtgcggcgtcgtcgggttcaagcccaccgccgggcgcctctccaacgccggcgtcctcccgctcaactggacggtcgggatgccggggatcctggcggggacggtcgaggacgcgctcatcgcctactcggcgatcgtcgaccagtcccagccgtcctacttgcggccggaactgaatcttcctcagctcggctccacactctccatcggcaacatcaagctcgccagatacggaaagtggttcaatgacagcgccgaggacatcaggagctgctgcgacaaggcgctgcaggcgctgcgcgcgaactacggctggcagaccgtggacgtgaccatcccggaggtggaggagatgcggctggcgcactacgtcaccatcggctccgagtgcacgacgtcgctcgccaacaagaggtccgagatcggctgggacgcgagggtggcgctcagcgtctacggctccttcagcagcagggcgtacctgaacgcgcagcggctccggaaccgccagatgtacttccacaagcagatcttcaaggccgcggacgtcatcgtctcgccgatgaccggtgtgactgcgtacccgctgcaagacgacgcgctcagcaccggggagctcgactacataaacggagccgcgctggtccggtactccatagccggcaacttcctcggcctgccggccatcaccgtcacggtcggctacgacaggggcggcctccccatcggcctccagttcatcggcaggccgtgggccgaggccaccctcctccacgtggccttcgccacgcagcaggcgtgcgccaaggggtacaagaagccgccggtgttctacgacctcctcggcaagcaacaggactgaggtcagcgacgcgccgccgccgccggcggcgagcgagcgaggatccaccgtatatgtatccgtgggggtcgatcggaggagaagagacgtatagcagcaggacaattgttgtcatgtataccttcattctcgaatcattatcgagtatttgtcgttgactactagttcattcttgaactaaaacacggtaaataaaaaataattgaggtcgttcat

SEQ ID NO: 99395 - DNA, 1761 bp, Zea Mays
ctctgaatcggcatctgagagagttgcaggtcgagttgctggtgcctctgatcctcctgtcactgcctggcgtaaagcagcagcgaagaagccgagagttcttcgccttcgccttcgcctgcctgctccatgcttccatccgtatcggcggctggcgcattcactgcaggccggccggagtaggcggcggggcccaggctgtgataatagcaattgattactgctgcttttgcaatcattcgtctcgttggtcagctgcgagcgagcgcgacggacatgacaacatgacatggtgtgcgtgcaggggcgccgctgtccgcgctggacggcgtgctggtgggcgtgaaggacgagatcgactgcctgccgtacccgaccacgggcgggacgcggtggctgggcgcggcgcggcgctgcgaggccgacgccgcgtgcgtcgcgcagctgcgcgcctgcggggccgtcctcgccggcaaggccaacatgcacgagctcggcgccggcaccagcggcatcaacccgcaccatgggtcgacgaggaacccgtacaacgccagcacgatcgccgggggctcctccagcggctccgccgccatcgtgtgcgccggcctctgccccgtcgcgctcggcgtcgacggaggcggctccgtccggatgccggcggcgctgtgcggcgtcgtcgggttcaagcccaccgccgggcgcctctccaacgccggcgtcctcccgctcaactggacggtcgggatgccggggatcctggcggggacggtcgaggacgcgctcatcgcctactcggcgatcgtcgaccagtcccagccgtcctacttgcggccggaactgaatcttcctcagctcggctccacactctccatcggcaacatcaagctcgccagatacggaaagtggttcaatgacagcgccgaggacatcaggagctgctgcgacaaggcgctgcaggcgctgcgcgcgaactacggctggcagaccgtggacgtgaccatcccggaggtggaggagatgcggctggcgcactacgtcaccatcggctccgagtgcacgacgtcgctcgccaagtacctcgacaagctcaagaggtccgagatcggctgggacgcgagggtggcgctcagcgtctacggctccttcagcagcagggcgtacctgaacgcgcagcggctccggaaccgccagatgtacttccacaagcagatcttcaaggccgcggacgtcatcgtctcgccgatgaccggtgtgactgcgtacccgctgcaagacgacgcgctcagcaccggggagctcgactacataaacggagccgcgctggtccggtactccatagccggcaacttcctcggcctgccggccatcaccgtcacggtcggctacgacaggggcggcctccccatcggcctccagttcatcggcaggccgtgggccgaggccaccctcctccacgtggccttcgccacgcagcaggcgtgcgccaaggggtacaagaagccgccggtgttctacgacctcctcggcaagcaacaggactgaggtcagcgacgcgccgccgccgccggcggcgagcgagcgaggatccaccgtatatgtatccgtgggggtcgatcggaggagaagagacgtatagcagcaggacaattgttgtcatgtataccttcattctcgaatcattatcgagtatttgtcgttgactactagttcattcttgaactaaaacacggtaaataaaaaataattgaggtcgttcat

SEQ ID NO: 99396 - DNA, 3691 bp, Zea Mays
cgagttataatttatgctgcaagatttttgagttcaccctagtaatcagcatctctgcctatggtgcacagctgtctccccattccaatgccgagtgttgatctctcagcaaggagggagaaagcagaaggaccggttttgatcttctgagcggttcatggttatggatcgcgcgggttggctctggaggcgcaagtcatcggacaagagccccgggggcagtgacagctctctgtccgtgtcgtcacattccgagcagtgctctgatgatcagggtcaatatcaatcccctgaagccttttcaagaagtaagtatgattacagccaagaaactggagtagcaagatccttgaatggcaagctagcagcaggggtcaatatgaacaattttaatccagagcatggtcaatcatttgaacaacatatatcctccaatgttggagatgaagagatcaaggagaccttggagagtttgaactacaaactttctgctgcactttcgaccatcagagcaaaagaagacttggtgaagcagcatgctaaagtcacagaagaggctgttgcaggttgggaacaagctgaagctgaagttactactctgaaggggctacttgaagcttcttgtcggaagaatgcttctctccaggatcaagtcagccacatggatgaggccctcaaggaatgcgtcaggcaactgcggctggcaagggaagaacaagaggacaaagtccgtgaagtcgtttcgaattctctggtcccgcagtctgaaaaccctgagctccaaaaccatatcgcagagctaaaaaagcggctggaaatgaccagattagaagcgtcatcttccatgatattacagcatgatctacatgaaaggcttcgggcgattgagagagagaacttggaccttaaggccaaacatcaggcaattgagaaagagaatatagatctcaaggccaaactgcttgtacagtccaaggacctgaagatactgatgttggaaagagatctgagcaatcaagtagcagagacagcaagtaaacaacacttggaaagtgttaaaaagattgccagggttgaggcagaatgccgcaggctacagcatctaacgcggaaaacaacactgatcaataattctagatccacacaaaacaattgctgcatggaatcactgactgacagccagtccgaccatggggagcatatggtgggcgttgataacgatctgcaaaattccgattcatgggcattagctttgattgctgagcttgatcagttcaagaatggcaaggatggttcaagaaatattgtgaacaatcctgttgagattgacataatggatgatttccttgagatggaaaggttagctgcattgcccgaatcagatggcacaagctctaactttgaaatggaaacagattctgacaaagctgtcacaagaaacagctccttgaaggtcaaaaatgaagaattgcaaaacaaggtcgcaaatttgcaggaaaagtttgaagcaattgcatgcgagaaaagggagcttgagctggcacttgtggaagttagagatcagcttgagatttcctgcgatgcgctagtggtggcaaagaacaggctggttgaaatgcagatgcagttggactcagcaaatgattccaaactttctgctttggatgatgtggagcgtttagactctgagaggaaggctttggaattgcagctggagtccaaatctgtagaagtcgaggagctacttattgctgtagcttcattggaggaaaatgcagagcagaaagagttggagtcgcagttagaactgatgtccgcacaagctacagaacttcgcctgactgtggcatcactggaagagagaattcaggctgagagagatctttctgtgcagcagaaacaaaacgcagaagccatgttgaatgctaaagaagaactggaagcacagctgtgttcagcaaacactgaaatggggaaactgcgtgacattatcaaagcactagagaatgaagtcaaaaaggagagagcactgtgtgaagaattaacagcacagttacagataaaggttgaagcagctgtcaatgcagttaaagaatcattggaggcacagctgtgttcagcaaatactgaagcagggaagcttagagatgttgttaaagcactccaggatgaggtagaaaaagagaaggcattacgtgaagagcttgcagcaaacctagaagtgaaaacaagagcagcaagaactgctgaggttgttaaagaatccttggaggcacagctgtcttcagcacacgctgaaatgcacaaactggaagagatcacaaaacaactacagaatgaggtagaaaaggagaaggaattctcagcacagttagagatgaaaattgaagtagagagagctcgttctattgagtctgctaaagaatcattagaggaacaactcctgttagtgaactcggaagctgcaaaactgcatgacatggtgtctgcgcttgagcacgatgtggaaaaggagaagtttttttctgcagagctccagatgcagctagaagctctagaggttgtcaaaaaggtattggagtctgaggcggagtctgcacatcaggatgccaaaattctcaagcagaaggtagagtcattggaagcaaaactcgaggagcagatgtcatcagctgacgaattcactgagactttgcagtcagagaggatggttatagagcataaacttaaaacagcagacggggaaatattaaaacttacaaacaaggtgagcttgctccatagggagatcgagcaggagaggttgctgtcagaagagtatgaacagaaatgccaaaagctggaagctcagatgtcaagagatagccgtgacgcaaagctctggcgtcttgcaaattcgaatggagatctgaaggttaagaaggagaaggagctcgctaacgcagctgggaagctcgcagaatgccagaagacaattgcttctctggatcgtcaaatcaaatcactgacagatctcgacagtgtggtgctagagcctgaaaggcttgaatccagcagggacatgccactgccactggacttcagaaatggcgatgctgaatttgctatgtttgcggatgacttgtacgactttgaccttccaaacaacgacacaagcttcttttctccacccccgtcgtcgatccagccctcgtctccaccctctgagatgtcagtatttgcaggggggctctcgactcttagcagttacaggagcaaaagagcaattagaaggtgatgaaaggaaggctgcccaaatgccatgctaacaaacagtccatggatgccgccatatgtgtaggtaggtcgatgtacattacagagactgattgttagatttgtgtgatgaacatccattccagcaagctcggtttttgtagcctgcttgatgaggtcttactggtggtcgtttgctgtaaaatgtaaacatggttatcttgtgtgattctagttacaggaaagcaccgagcaagtgcatatttagtgtccactagttaggtaccccgtactagaatatttaatttatttaaatatgaaggaagcatgtcacttatttctctaaatttacaacaatagttaggccctgtacgttgatacgatttctatatattacataaatatatcttattttaattagatagttgtttaaaca

SEQ ID NO: 99397 - DNA, 417 bp, Zea Mays
atggcgctcggccgcccagctgtttcttcctccttgcgctcggatttcctctgctccatggcgaactcgccccagcccccagctcggatccctgcctctgctcgcgccggtgctcgcccctctgctatctccatgcccgagctcgtcctccaggttgccccatggcgctcggcctcacccccttgccccaacgccatcggctccccgtccagcttcaacctcgccgtcggtctcgtctctgttcaagccgccatcgcgccgtgccagttgttcatctttgatcctcgcctcgacgtcatcttgccgtgcaacgcttgcttggtgctcgacaaaacgcctaaatcaggaccatcgtcgttctcgcgatcatcgagttggtttaggtcggatccgtcggtggcgctcgtgcttagttga

SEQ ID NO: 99398 - DNA, 516 bp, Zea Mays
atggcgttcctctctccctctgtgcacggcgctcgcttctccctggcgcccggccagaatttcttgcggcgcgaagcttgctccctgcgcccgtcccccatggcgctcggccgcccagctgtttcttcctccttgcgctcggatttcctctgctccatggcgaactcgccccagcccccagctcggatccctgcctctgctcgcgccggtgctcgcccctctgctatctccatgcccgagctcgtcctccaggttgccccatggcgctcggcctcacccccttgccccagcgccatcggctccccgtccagcttcaacctcgccgtcggtctcgtctctgttcaagccgccatcgcgccgtgccagttgtccatctttgatcctcgcctcgacgtcatcttgccgtgcaacgcttgcttggtgctcgacaaaacgcctaaatcaggaccatcgtcgttctcgcgatcatcgagttggtttaggtcggatccgtcggtggcgctcgtgcttagttga

SEQ ID NO: 99399 - DNA, 670 bp, Zea Mays
gcaggcagcaagccgaccgcgcctgcaacgaccgcgactcagctcggcgcccaggcggaccgacgccggccacccggccaggcccgcggagccgcagccacgcgcgcccagcaagtcgagcttatctgaatttgatgatcttgtgggccaccctggattcgacaagcaagggacacgcttcaagcggctcatcaaagaccagaataatcataaggacctcgaggagggaattaaccgtctagttctttgctctggaaaggtgtactacgaactggatgaagaaagaaggaagacggagcgcactgatgttgctatatgtagagttgagcagctctgcccattcccctatgacctcatccagtgtgagttgaagagatatccaaggacactgaaaggcggacgtgcggattggcttatagagaaatgtattgaacttggagcttctagtgttacccctgtcctgacagaacaatgtcacacaatagcggaaaatcgggtggacaggctgtaatgccttgtgctggatgcagttaagcaatgtatggagtttgggtatcacctccgttcttggcctgttaaacaatgtacggagtttggggttaaatgattttgtaaagtgtttgcaaatttgttcaaaacatgataatgtgtaggttttgtgaatgatttt

SEQ ID NO: 99400 - DNA, 648 bp, Zea Mays
gcaggcagcaagccgaccgcgcctgcaacgaccgcgactcagctcggcgcccaggcggaccgacgccggccacccggccaggcccgcggagccgcagccacgcgcgcccagcaagtcgagcttatctgaatttgatgatcttgtgggccaccctggattcgacaagcaagggacacgcttcaagcggctcatcaaagaccagaataatcataaggacctcgaggagggaattaaccgtctagttctttgctctggaaagtttcaggtgtactacgaactggatgaagaaagaaggaagacggagcgcactgatgttgctatatgtagagttgagcagctctgcccattcccctatgacctcatccagtggacactgaaaggcggacgtgcggattggcttatagagaaatgtattgaacttggagcttctagtgttacccctgtcctgacagaacaatgtcacacaatagcggaaaatcgggtggacaggctgtaatgccttgtgctggatgcagttaagcaatgtatggagtttgggtatcacctccgttcttggcctgttaaacaatgtacggagtttggggttaaatgattttgtaaagtgtttgcaaatttgttcaaaacatgataatgtgtaggttttgtgaa

SEQ ID NO: 99401 - DNA, 756 bp, Zea Mays
gcaggcagcaagccgaccgcgcctgcaacgaccgcgactcagctcggcgcccaggcggaccgacgccggccacccggccaggcccgcggagccgcagccacgcgcgcccagcaagtcgagcttatctgaatttgatgatcttgtgggccaccctggattcgacaagcaagggacacgcttcaagcggctcatcaaagaccagaataatcataaggacctcgaggagggaattaaccgtctagttctttgctctggaaagtttcaggtgtactacgaactggatgaagaaagaaggaagacggagcgcactgatgttgctatatgtagagttgagcagctctgcccattcccctatgacctcatccagtgtgagttgaagagatatccaagtatgtgtttagaaaaaagtggttgctcgtttttactctgctgcatgatctctaatctgtcaagtgtatagtagaaaatgttttgctagctggaaggttagttgacatacaatctaatggatgagtcctagtaatcaacaaacaagctgatactatgtaaaccaggagaattttttattccatcctgtaatcactttattatttctaatcctcagggacactgaaaggcggacgtgcggattggcttatagagaaatgtattgtatgttacatacattttgggtcttcttattcattgtctacttctaagtctgttttgttttcctatttaggaacttggagcttctagtgttacccctgtcctgac

SEQ ID NO: 99402 - DNA, 229 bp, Zea Mays
caaagctagttcctccagaaggaggcaaacggctcaacacaactagcaatagctccaaataacatgtctagccctcttgaatgagaggaagcccggaaaacaaaattctccccctagatagagaaaatgggaaatatcaaaatctctcccccttgttgacaagtgaactcatcaagcacagacatgggtagaaagaaaaactccccttgacaagagaacctcccctgag

SEQ ID NO: 99403 - DNA, 1680 bp, Zea Mays
gtgaatactacaggaaatatgccttttttagagaagcatgtctactctttatgcatctcgtgttcatctcttcctatgtagaatgttgggtaaaaaaacccgatacccgaaacccgaacccgaaaaacccgaacccgaacccgaacaacccgaacccgaaaaacccgaactacaatttgggtagcaacttccggtacccgaaattatttaggaaatttcgggttaaacaaaccggtacccgaagtacccgaattacccgaacatccatatactcagtgtatttcagaaataagaagtcctcgacacctgccttccacacgcagcagtgcagcacgccacagctagccgccggccgccggtgctttccttccagctcgtcgctcggcgcccgcatgctagctcgctcgacaacccgcatgctgctgcctgcaacacgctacacgcaggaacgcagctagatgcctagctagctcggctgctccacttgcatgctgctcacctgcatgctgctgcctgcgcatcgccgccgaccaactgtccatcagcatgtcgcccagtgcctgcccgtgcatcgccgccaaccgactggagcaggagcacaactatacatgtacaggactgcactgcagggggcaacgggactatagtgaagcacactgaagaacgacatgaacaatgaagaagccaggagcctaggagtacagactgcctcggtaagatgtcgggtatctcggtttaacccgaacccgaacccgaaatttcgggtacccgaaatttcgggtatcaagtaatatcgggttgagttcgggttcaactgctgaatacccaaatttttaaaaacacgaactacccgacccgaattttcgggtatacccgaacgcccagccctacctacgacctgctatacatatacgtaccttgctgaggtgatggaggccctgctaagcggcgggggagatgagcacgattatggagcagactgccgccacaatccaagtcggtgtgaactgcagcgtcgcagtctcgtcagccttcgccattgtctgttcagtcgtcccctgttctagaccctgcttttcttctaaggttggctgaaagcaatctatgaactggggaggagggagctatgagaacgtgtgtgttgacgcctgctttgtggccgcaattgctcgtcgatgagtaggaaaacaaaatcaacaccaagggattggggaagagaaaaataattatccaaaaaatgttcgctcgcgcatagattggggccgttggctcgatctgcgaccgaaaccctaggtattggcgggaggaacctctcgtcctcttcctcgctagaaccaagattgccccccattctggctcaacttcgaatagaaggaaatccctaacacggagaaggcacatttcgaagagtgttcatacctgcagctaggcgagatgatgagagagcagacgaaattcgggttgtcaaacgtgccgaggaggaggtcgcacggtgttggactggggagcagcaaccaatggagatggagtcaggccgcacggatagagaggcagacggcaatcgacattgacggggacctgcgaggcaaattggagaggcggacggtggtgcagcgtgcggtgggatgggtgccggcggcgcgagcgggagaggccaccggtgagcgtggcgggccggcg

SEQ ID NO: 99404 - DNA, 3510 bp, Zea Mays
atggcatcaccactctgcatatccgtattgttgctcatcatgtccacctccactgctgccatcgctgtagctccgtcgtctcgttcaggtcgcccgagcaagcgaaacggtagcagcactgacctcgccgcgctgctggctttcaaggcgcagctctccgaccccgccggcgtcctcggcggcaactggaccgccaccacgtcgttctgcaaatgggtgggcgtgtcgtgcggtggtcgctggcggcagcgcgtggctgccatcgagctgccaggcgtccctctccagggatcgctcagtcctcacctcggtaacctatctttcctctccgtgctcaacctcaccaacgccagcctcgccggcgcaatcccaagcgatatcggcaggctgcgtcgcctcaaggtccttgacctcggccacaacgccctgtccagtggcatcccggccaccataggcaacctcacgaggctccagctccttcacctccagttcaacctcctctctggcccgatcccagcggagctgcggcgcctgcgtgagctccgcgccatgaagatccagagaaactacctcgctggctccataccgagcgatctgttcaacaacacccccctgctgactcacctaaacatgggcaacaacagcctttcagggccgataccacgctgcatcggctcgttgccgctgcagtacctcaacttgcaggtcaacaatctctccgggctggtgccacagagcatcttcaacatgtcttccttgcgtgttctaggcctggccatgaatacgttgtccggggctttagctatgccgggaggaccgagcaacacaagtttcagtctgcctgctgtggagtttttttcggtcggtcgaaaccgattcagcggcccgattccatccaagttggctgcttgccggcacctccaaaggctcttcctgtccgagaattcgttccagggcgtcgtccctgcatggctcggcgagctgacggctgtccaagccatcggcctggacgagaatcacttggatgcagctccaatcccttctgcactcagcaacctcaccatgctacgtgagctagacctccatgcatgcaacctcacaggaaccattccgctagaattcggacagctactccagctttcagtgctgattctttacgacaacctactgactggacatgttcctgcttctctcggtaacctgtctaacatggcgaacctggagctgcaagtaaacatgttggatgggccgttgcctatgacgatcggtgacatgaactcgctgaggttacttgtaatcgtagaaaaccatctgcgcggggatctcggattcctgtctgttctttccaactgcaggatgctttcagttttccaattcagcacgaatcatttcgcagggaccctcgtcccggaccacgttgggaacctctcaagcaatatgcgagtattcgctgcatctgacaacatgatagccggtagtcttccagctactatctcgaacttgactgatcttgagattctagatctcgcaggaaaccagcttcagaacccagtcccagagccaatcatgatgatggagagcatccaatttcttgacctcagcggaaataggctctctggcaccattccctggaatgcagctacgaacttgaagaacgttgagatcatgttccttgacagcaacgagttctccggctccatacctagcggcatcggtaatctctccaacctagagctcctaggactacgtgaaaaccagttcacgtctaccataccagcgagcctgttccatcatgataggctcatcggaatagatctgtctcagaacttgctgagtggcacactgccagttgatataattttgaagcaaatgaacataatggatctgtccgccaacctcttagttggcagcctaccggattcacttggacagcttcagatgatgacctacctgaatatatcactcaattcgttccacggcccgatcccgccctcttttgagaagctgatcagcatgaaaactctagacctctcccataacaatatctccggagccatcccaaaatacctggctaatcttaccgtgctcactagtttgaacctgtccttcaacgagcttcgaggccagattccagaagcaggcgtcgtcttctcaaacatcacgcggcgatccttggaggggaacccagggctatgcggcgctgcacgcttagggtttcctccatgcctaactgaaccacccgctcatcagggctatgctcacattctgaaatatttactccccgcagtcgtcgtcgtcatcacatctgttggagctgtagcttcctgcctatgtgtaatgcgtaacaagaaacgacatcaagcagggaattctactgccacggacgacgacatggctaaccatcagttggtctcctaccacgagctcgctcgtgctaccgaaaacttcagtgatgctaacctgttggggtctggaagctttgggaaggtttttaagggccagctgagcaatggcctggtggttgccgtaaaggtcatacgcatgcatatggagcaagctgctgcaaggtttgacgcagagtgttgtgtgcttcgaatggctcggcatcgcaacctgataaggatactgaacacctgttccaacctggacttcagagcgctggtgctccagtacatgcccaacgggagcttagaggagctcttgcgctccgacggaggaatgcgactagggttcgttgagaggctggacatcgtgctagatgtgtccatggcaatggagtatctgcaccacgagcactgcgaggtggtcctacactgcgacttgaagcctagcaacgtgctgtttgatgaggacatgaccgcgcatgtggcggattttggcattgcgaggatcttgcttgatgatgagaactccatgatctccgcgagcatgcctggaacaattggatacatggcaccagagtatggctctgttggaaaagcttcacggaagagcgacgtgtttagctatgggattatgctccttgaagtcttcactggaaagaaacccacagatgctatgtttgttggtgaactgagcctcaggcattgggtccatcaggcatttcctgaagggcttgtccaggtcgtggatgctcgtattctactcgatgatgcttctgctgctaccagcagcctgaatggatttcttgtggcagtgatggagctgggtttgctctgttcagctgactcgccggaccaaagaacgacgatgaaggatgtggtggtgacgctaaagaaggtcaggaaagattacatcaaaacgatcgcaatgagtgacccgatgggtgatccatacccacataggtatgggtatggggtaaatccatacccaccagtgtatatgggtgatccgatgatgttattttttatcttaacggccgagagcgggaaggggaagaccggaggaaccaaggaagacaacgtggtcggaaacttccctgctctttctctttccaataattttcaataa

SEQ ID NO: 99405 - DNA, 1852 bp, Zea Mays
acggaagggcccggacagttttgcgcacaagccccccattcccattctaccaccgacccgtcccgtcccactgcctgccagcgtctcccccgctccctctcctcgagagatctcgcgctccggcgatcgggcgcggcgggcggagggtcgcgaagtgccctgcccacccccgatgctcttcccgaagcgcatcaactacgtggccccgatgctcgcctccgccgccatcctgctcctcctcctctcgggctacttcgagctcccctccatctccaccccggcgccgctcctcgcgggcgcagcgcgcttccccaccgcgctcgactccgtcggatcgcgcgaccgcgaccccttcacctcgctcctcgaggccttcgcgtcctgggacgccgccgtcggctgcccccgcgtccgcgccaagctcgccgccgcggggctggggctgggcccgggcctgccgctgccgagtgcgagcgccagcgccagcgctaacggcaccgcggaggaccctgcggcggcgtccgtcagcggcggcgccgcgtggcgcggagccgcgaggtgcgaggacctggcagcgcgccacgtcggggtgctcgtcaagggctggacctggatccctgacgcgctcgacggcgtctacacctgccgctgcggggttagctgcgtctggagcaagtctgccgccgccgtcgaccgtcccgacgcgctgctctttgagggcgccacgcctccgccgcagagaatgaaaggtttgcctcttcgtgtttacctggatctggaggccagtaggaagccaactggttttgaggacatttttgtcggttaccatgccagtgatgatgtgcaagtaacatatgctggaaaatcatttcacaccagccgaagttaccatatatcaactgaaaagagaaacgatgcacttatctactggtcatcttcaaggtgtcttcctcatagagataagctcgcaaaagacttcctctcgctggttcctcaccattccttcggaagatgtttgaacaatgtcggcggtcctgacatggcgctatccatgtatccagtctgctccaccaacgataacggcacgccacactggtgggatcacctacactgtgcgatgtcacattacaagttcgttcttgcaatcgagaacaccaagaccgaaagctacgtgaccgagaagctgttctacgctttggaggctgggtcggtgccgatatactttggggcgcccaatgtctgggatttcgtccctcctaattctatcatagacgcctccaaattcagttcactcagaaagctggcatcgtatgtgaagacgctggcaaatgaccccgtagcctacgctgaataccacgcgtggaggcgttgtggtgcgttgggtaacttcggcagggcacgcgagatgagccttgacacgctgccttgccgactctgcgaggtggttagcaagagaggtggtaagggtgcagatgcattgtgagatggatcggtgttttgtatggcttgtataccttgatccggacatgtgaaatagatgtaaatggtacgtcgaacgaagtgctcatgctattccgttcaggaaaaaagtgtctagtgtgttattcatgtcaagatcaagcacacattgtcgaaagaaatagtgcagctattcttttttttacaccatctctcttttatctgttgaatttggagggttgtacagttgttggagcagagagagttcgtgtttttaggtagagaagtatacagatgggatttcttgctgttgctatgatatgaaccatataaccatgtgtgagctccgcacttaaatttgtgtagatgccatggttgtctttttgttctttgc

SEQ ID NO: 99406 - DNA, 1656 bp, Zea Mays
tcccattctaccaccgacccgtcccgtcccactgcctgccagcgtctcccccgctccctctcctcgagagatctcgcgctccggcgatcgggcgcggcgggcggagggtcgcgaagtgccctgcccacccccgatgctcttcccgaagcgcatcaactacgtggccccgatgctcgcctccgccgccatcctgctcctcctcctctcgggctacttcgagctcccctccatctccaccccggcgccgctcctcgcgggcgcagcgcgcttccccaccgcgctcgactccgtcggatcgcgcgaccgcgaccccttcacctcgctcctcgaggccttcgccgtccgtcagcggcggcgccgcgtggcgcggagccgcgaggtgcgaggacctggcagcgcgccacgtcggggtgctcgtcaagggctggacctggatccctgacgcgctcgacggcgtctacacctgccgctgcggggttagctgcgtctggagcaagtctgccgccgccgtcgaccgtcccgacgcgctgctctttgagggcgccacgcctccgccgcagagaatgaaaggtttgcctcttcgtgtttacctggatctggaggccagtaggaagccaactggttttgaggacatttttgtcggttaccatgccagtgatgatgtgcaagtaacatatgctggaaaatcatttcacaccagccgaagttaccatatatcaactgaaaagagaaacgatgcacttatctactggtcatcttcaaggtgtcttcctcatagagataagctcgcaaaagacttcctctcgctggttcctcaccattccttcggaagatgtttgaacaatgtcggcggtcctgacatggcgctatccatgtatccagtctgctccaccaacgataacggcacgccacactggtgggatcacctacactgtgcgatgtcacattacaagttcgttcttgcaatcgagaacaccaagaccgaaagctacgtgaccgagaagctgttctacgctttggaggctgggtcggtgccgatatactttggggcgcccaatgtctgggatttcgtccctcctaattctatcatagacgcctccaaattcagttcactcagaaagctggcatcgtatgtgaagacgctggcaaatgaccccgtagcctacgctgaataccacgcgtggaggcgttgtggtgcgttgggtaacttcggcagggcacgcgagatgagccttgacacgctgccttgccgactctgcgaggtggttagcaagagaggtggtaagggtgcagatgcattgtgagatggatcggtcagtgccctgactcctggcatagaccatcaactcgtactttactgctaacactactgtctgatatagcctttttcttttcttgattctaggtgttttgtatggcttgtataccttgatccggacatgtgaaatagatgtaaatggtacgtcgaacgaagtgctcatgctattccgttcaggaaaaaagtgtctagtgtgttattcatgtcaagatcaagcacacattgtcgaaagaaatagtgcagctattcttttttttacaccatctctcttttatctgttgaatttggagggttgtacagttgttggagcagagagagttcgtgtttttaggtagaga

SEQ ID NO: 99407 - DNA, 1835 bp, Zea Mays
acggaagggcccggacagttttgcgcacaagccccccattcccattctaccaccgacccgtcccgtcccactgcctgccagcgtctcccccgctccctctcctcgagagatctcgcgctccggcgatcgggcgcggcgggcggagggtcgcgaagtgccctgcccacccccgatgctcttcccgaagcgcatcaactacgtggccccgatgctcgcctccgccgccatcctgctcctcctcctctcgggctacttcgagctcccctccatctccaccccggcgccgctcctcgcgggcgcagcgcgcttccccaccgcgctcgactccgtcggatcgcgcgaccgcgaccccttcacctcgctcctcgaggccttcgcgtcctgggacgccgccgtcggctgcccccgcgtccgcgccaagctcgccgccgcggggctggggctgggcccgggcctgccgctgccgagtgcgagcgccagcgccagcgctaacggcaccgcggaggaccctgcggcggcgtccgtcagcggcggcgccgcgtggcgcggagccgcgaggtgcgaggacctggcagcgcgccacgtcggggtgctcgtcaagggctggacctggatccctgacgcgctcgacggcgtctacacctgccgctgcggggttagctgcgtctggagcaagtctgccgccgccgtcgaccgtcccgacgcgctgctctttgagggcgccacgcctccgccgcagagaatgaaaggtttgcctcttcgtgtttacctggatctggaggccagtaggaagccaactggttttgaggacatttttgtcggttaccatgccagtgatgatgtgcaagtaacatatgctggaaaatcatttcacaccagccgaagttaccatatatcaactgaaaagagaaacgatgcacttatctactggtcatcttcaaggtgtcttcctcatagagataagctcgcaaaagacttcctctcgctggttcctcaccattccttcggaagatgtttgaacaatgtcggcggtcctgacatggcgctatccatgtatccagtctgctccaccaacgataacggcacgccacactggtgggatcacctacactgtgcgatgtcacattacaagttcgttcttgcaatcgagaacaccaagaccgaaagctacgtgaccgagaagctgttctacgctttggaggctgggtcggtgccgatatactttggggcgcccaatgtctgggatttcgtccctcctaattctatcatagacgcctccaaattcagttcactcagaaagctggcatcgtatgtgaagacgctggcaaatgaccccgtagcctacgctgaataccacgcgtggaggcgttgtggtgcgttgggtaacttcggcagggcacgcgagatgagccttgacacgctgccttgccgactctgcgaggtggttagcaagagaggtggtaagggtgcagatgcattgtgagatggatcggtcagtgccctgactcctggcatagaccatcaactcgtactttactgctaacactactgtctgatatagcctttttcttttcttgattctaggtgttttgtatggcttgtataccttgatccggacatgtgaaatagatgtaaatggtacgtcgaacgaagtgctcatgctattccgttcaggaaaaaagtgtctagtgtgttattcatgtcaagatcaagcacacattgtcgaaagaaatagtgcagctattcttttttttacaccatctctcttttatctgttgaatttggagggttgtacagttgttggagcagagagagttcgtgtttttaggtagaga

SEQ ID NO: 99408 - DNA, 1661 bp, Zea Mays
acggaagggcccggacagttttgcgcacaagccccccattcccattctaccaccgacccgtcccgtcccactgcctgccagcgtctcccccgctccctctcctcgagagatctcgcgctccggcgatcgggcgcggcgggcggagggtcgcgaagtgccctgcccacccccgatgctcttcccgaagcgcatcaactacgtggccccgatgctcgcctccgccgccatcctgctcctcctcctctcgggctacttcgagctcccctccatctccaccccggcgccgctcctcgcgggcgcagcgcgcttccccaccgcgctcgactccgtcggatcgcgcgaccgcgaccccttcacctcgctcctcgaggccttcgcgtcctgggacgccgccgtcggctgcccccgcgtccgcgccaagctcgccgccgcggggctggggctgggcccgggcctgccgctgccgagtgcgagcgccagcgccagcgctaacggcaccgcggaggaccctgcggcggcgtccgtcagcggcggcgccgcgtggcgcggagccgcgaggtgcgaggacctggcagcgcgccacgtcggggtgctcgtcaagggctggacctggatccctgacgcgctcgacggcgtctacacctgccgctgcggggttagctgcgtctggagcaagtctgccgccgccgtcgaccgtcccgacgcgctgctctttgagggcgccacgcctccgccgcaggatgcacttatctactggtcatcttcaaggtgtcttcctcatagagataagctcgcaaaagacttcctctcgctggttcctcaccattccttcggaagatgtttgaacaatgtcggcggtcctgacatggcgctatccatgtatccagtctgctccaccaacgataacggcacgccacactggtgggatcacctacactgtgcgatgtcacattacaagttcgttcttgcaatcgagaacaccaagaccgaaagctacgtgaccgagaagctgttctacgctttggaggctgggtcggtgccgatatactttggggcgcccaatgtctgggatttcgtccctcctaattctatcatagacgcctccaaattcagttcactcagaaagctggcatcgtatgtgaagacgctggcaaatgaccccgtagcctacgctgaataccacgcgtggaggcgttgtggtgcgttgggtaacttcggcagggcacgcgagatgagccttgacacgctgccttgccgactctgcgaggtggttagcaagagaggtggtaagggtgcagatgcattgtgagatggatcggtcagtgccctgactcctggcatagaccatcaactcgtactttactgctaacactactgtctgatatagcctttttcttttcttgattctaggtgttttgtatggcttgtataccttgatccggacatgtgaaatagatgtaaatggtacgtcgaacgaagtgctcatgctattccgttcaggaaaaaagtgtctagtgtgttattcatgtcaagatcaagcacacattgtcgaaagaaatagtgcagctattcttttttttacaccatctctcttttatctgttgaatttggagggttgtacagttgttggagcagagagagttcgtgtttttaggtagaga

SEQ ID NO: 99409 - DNA, 1921 bp, Zea Mays
acggaagggcccggacagttttgcgcacaagccccccattcccattctaccaccgacccgtcccgtcccactgcctgccagcgtctcccccgctccctctcctcgagagatctcgcgctccggcgatcgggcgcggcgggcggagggtcgcgaagtgccctgcccacccccgatgctcttcccgaagcgcatcaactacgtggccccgatgctcgcctccgccgccatcctgctcctcctcctctcgggctacttcgagctcccctccatctccaccccggcgccgctcctcgcgggcgcagcgcgcttccccaccgcgctcgactccgtcggatcgcgcgaccgcgaccccttcacctcgctcctcgaggccttcgcgtcctgggacgccgccgtcggctgcccccgcgtccgcgccaagctcgccgccgcggggctggggctgggcccgggcctgccgctgccgagtgcgagcgccagcgccagcgctaacggcaccgcggaggaccctgcggcggcgtccgtcagcggcggcgccgcgtggcgcggagccgcgaggtgcgaggacctggcagcgcgccacgtcggggtgctcgtcaagggctggacctggatccctgacgcgctcgacggcgtctacacctgccgctgcggggttagctgcgtctggagcaagtctgccgccgccgtcgaccgtcccgacgcgctgctctttgagggcgccacgcctccgccgcagattttggggtacctcaagagagatcgaattggctatgaattctgatccttgctcagtaatgcttgtgtggtggaacaagagaactgagaatgaaaggtttgcctcttcgtgtttacctggatctggaggccagtaggaagccaactggttttgaggacatttttgtcggttaccatgccagtgatgatgtgcaagtaacatatgctggaaaatcatttcacaccagccgaagttaccatatatcaactgaaaagagaaacgatgcacttatctactggtcatcttcaaggtgtcttcctcatagagataagctcgcaaaagacttcctctcgctggttcctcaccattccttcggaagatgtttgaacaatgtcggcggtcctgacatggcgctatccatgtatccagtctgctccaccaacgataacggcacgccacactggtgggatcacctacactgtgcgatgtcacattacaagttcgttcttgcaatcgagaacaccaagaccgaaagctacgtgaccgagaagctgttctacgctttggaggctgggtcggtgccgatatactttggggcgcccaatgtctgggatttcgtccctcctaattctatcatagacgcctccaaattcagttcactcagaaagctggcatcgtatgtgaagacgctggcaaatgaccccgtagcctacgctgaataccacgcgtggaggcgttgtggtgcgttgggtaacttcggcagggcacgcgagatgagccttgacacgctgccttgccgactctgcgaggtggttagcaagagaggtggtaagggtgcagatgcattgtgagatggatcggtcagtgccctgactcctggcatagaccatcaactcgtactttactgctaacactactgtctgatatagcctttttcttttcttgattctaggtgttttgtatggcttgtataccttgatccggacatgtgaaatagatgtaaatggtacgtcgaacgaagtgctcatgctattccgttcaggaaaaaagtgtctagtgtgttattcatgtcaagatcaagcacacattgtcgaaagaaatagtgcagctattcttttttttacaccatctctcttttatctgttgaatttggagggttgtacagttgttggagcagagagagttcgtgtttttaggtagaga

SEQ ID NO: 99410 - DNA, 1444 bp, Zea Mays
gtgccaatggtagcatcacacggtcataggcatcgtctagtctctgacatggccatgtgacgaccatgtccatggtaagcgggcgacgagcatcagcagggcagcagcctccgaggatggatcaggagcgagccaataatctacgcaattattcacaggccaccgagtaaacaatagtaggacacccgtgtgactgattggttcttggattggggagctccgcctccctctcctcaagtttgaccaaccctcacccacctccctccgtcgtctagtatgcttcttgcctcccgcctgcttcctccgccgccctcctccgccgcggccggttcctcctcatcctctctgagaatgaaaggtttgcctcttcgtgtttacctggatctggaggccagtaggaagccaactggttttgaggacatttttgtcggttaccatgccagtgatgatgtgcaagtaacatatgctggaaaatcatttcacaccagccgaagttaccatatatcaactgaaaagagaaacgatgcacttatctactggtcatcttcaaggtgtcttcctcatagagataagctcgcaaaagacttcctctcgctggttcctcaccattccttcggaagatgtttgaacaatgtcggcggtcctgacatggcgctatccatgtatccagtctgctccaccaacgataacggcacgccacactggtgggatcacctacactgtgcgatgtcacattacaagttcgttcttgcaatcgagaacaccaagaccgaaagctacgtgaccgagaagctgttctacgctttggaggctgggtcggtgccgatatactttggggcgcccaatgtctgggatttcgtccctcctaattctatcatagacgcctccaaattcagttcactcagaaagctggcatcgtatgtgaagacgctggcaaatgaccccgtagcctacgctgaataccacgcgtggaggcgttgtggtgcgttgggtaacttcggcagggcacgcgagatgagccttgacacgctgccttgccgactctgcgaggtggttagcaagagaggtggtaagggtgcagatgcattgtgagatggatcggtcagtgccctgactcctggcatagaccatcaactcgtactttactgctaacactactgtctgatatagcctttttcttttcttgattctaggtgttttgtatggcttgtataccttgatccggacatgtgaaatagatgtaaatggtacgtcgaacgaagtgctcatgctattccgttcaggaaaaaagtgtctagtgtgttattcatgtcaagatcaagcacacattgtcgaaagaaatagtgcagctattcttttttttacaccatctctcttttatctgttgaatttggagggttgtacagttgttggagcagagagagttcgtgtttttaggtagaga

SEQ ID NO: 99411 - DNA, 2062 bp, Zea Mays
ccacgtgatgcctattaccgtgccaatggtagcatcacacggtcataggcatcgtctagtctctgacatggccatgtgacgaccatgtccatggtaagcgggcgacgagcatcagcagggcagcagcctccgaggatggatcaggagcgagccaataatctacgcaattattcacaggccaccgagtaaacaatagtaggacacccgtgtgactgattggttcttggattggggagctccgcctccctctcctcaagtttgaccaaccctcacccacctccctccgtcgtctagtatgcttcttgcctcccgcctgcttcctccgccgccctcctccgccgcggccggttcctcctcatcctctctgatctgcaggttctgacgaaccgaaccgttggggtttcaaatcttcttttgcagactccgatcccaactcaaaacacagagaactctgaaagctaatcggcaatggataaccacatccatagtcagccagctgctaacctctactaccagttcggcatggggactgagcagcaatacccaccaccgttcgcctcaccaccatccaccaacatcccgcacatggactggaacccggccacgatgctagacaacctcaccttcatcgaggagaagatacagcaagtgaaggacgtcatccgcacaatggtggacaacgccgggcaggtgcaggtccagtgccaccaccaagcaggcgagctgctggctcagaagcagaagcagcaggtggtcaacgcggacctgacatgccttatagttcagctcatctccaccgccggcagcctgctcccgtcactgaagaactcgtcgttcctcagccacccccaccctgctggccacgtggacatggctaaccatgttggcccaagctcgagcctagtgcctaatgcgatgaccgtttctgaagactatgaggagctgttcaagggatggaccgatggcggcattgaggtcgacgacgacggcgttcttgtcgaggagcaggaaattaccaaggacggagacagcctctcgtacgagctgctgcagctggaggaggacgagatactggcgccgcacacgcacttttgcaccatctgcgggaaagggttcaagcgggacgcgaacctgcggatgcacatgcgagggcacggcgacgagtacaagagcccggcggcgctggccaagccgccgagggacccgggcgcggagcaggagccggcgaagcggcggtactcgtgcccgttcgcggggtgcaagcggaacaagctgcacaaaagcttccagcccctcaagaccatcctgtgcgtgaagaaccactacaggcggagccactgcgagaagagccacacctgcggccggtgccacgccaagaagttctccatcgtggccgacctgaggacgcacgagaagcactgcggccgccgggacaggtgggtgtgctcctgcgggacgagtttctcgaggaaggacaagctcttcgcgcacgtcgccttgttccaaggtcacacgcccgcgttgtcgtcgccgctggaggaggagccgccgaaggcttgctcggaccagcaccagaccggccgtgctgggagccgtcgggaaccagcgaaagtcccagctggctcagtgggcggcggcagcggcagcagcttcgtgtggggtgcctcgtcctcaggggagaacagtgctctggatatcaaaggttttgttgatggatgcagtggtgacttcctctcgacggcgaactttggctccttcaacctcagcttcgggcctgctgacgggttcacaggagagccttctagtggtggttcgttctcgatgctacctcctgagcactttcagagtgctcagaagaaggggcagaactgaatatggataatctcagacagctttagatgtatgtatctgggcggcttcagatgcaccaccatcatctctggttcatgctcgtttttctccactgtagtgtagaacattgtcacagtttgagattgttgtctccttccttcctatgtacccgcctttatcgctggaagccgactgttgaactttcgcacta

SEQ ID NO: 99412 - DNA, 2009 bp, Zea Mays
ccacgtgatgcctattaccgtgccaatggtagcatcacacggtcataggcatcgtctagtctctgacatggccatgtgacgaccatgtccatggtaagcgggcgacgagcatcagcagggcagcagcctccgaggatggatcaggagcgagccaataatctacgcaattattcacaggccaccgagtaaacaatagtaggacacccgtgtgactgattggttcttggattggggagctccgcctccctctcctcaagtttgaccaaccctcacccacctccctccgtcgtctagtatgcttcttgcctcccgcctgcttcctccgccgccctcctccgccgcggccggttcctcctcatcctctctgactccgatcccaactcaaaacacagagaactctgaaagctaatcggcaatggataaccacatccatagtcagccagctgctaacctctactaccagttcggcatggggactgagcagcaatacccaccaccgttcgcctcaccaccatccaccaacatcccgcacatggactggaacccggccacgatgctagacaacctcaccttcatcgaggagaagatacagcaagtgaaggacgtcatccgcacaatggtggacaacgccgggcaggtgcaggtccagtgccaccaccaagcaggcgagctgctggctcagaagcagaagcagcaggtggtcaacgcggacctgacatgccttatagttcagctcatctccaccgccggcagcctgctcccgtcactgaagaactcgtcgttcctcagccacccccaccctgctggccacgtggacatggctaaccatgttggcccaagctcgagcctagtgcctaatgcgatgaccgtttctgaagactatgaggagctgttcaagggatggaccgatggcggcattgaggtcgacgacgacggcgttcttgtcgaggagcaggaaattaccaaggacggagacagcctctcgtacgagctgctgcagctggaggaggacgagatactggcgccgcacacgcacttttgcaccatctgcgggaaagggttcaagcgggacgcgaacctgcggatgcacatgcgagggcacggcgacgagtacaagagcccggcggcgctggccaagccgccgagggacccgggcgcggagcaggagccggcgaagcggcggtactcgtgcccgttcgcggggtgcaagcggaacaagctgcacaaaagcttccagcccctcaagaccatcctgtgcgtgaagaaccactacaggcggagccactgcgagaagagccacacctgcggccggtgccacgccaagaagttctccatcgtggccgacctgaggacgcacgagaagcactgcggccgccgggacaggtgggtgtgctcctgcgggacgagtttctcgaggaaggacaagctcttcgcgcacgtcgccttgttccaaggtcacacgcccgcgttgtcgtcgccgctggaggaggagccgccgaaggcttgctcggaccagcaccagaccggccgtgctgggagccgtcgggaaccagcgaaagtcccagctggctcagtgggcggcggcagcggcagcagcttcgtgtggggtgcctcgtcctcaggggagaacagtgctctggatatcaaaggttttgttgatggatgcagtggtgacttcctctcgacggcgaactttggctccttcaacctcagcttcgggcctgctgacgggttcacaggagagccttctagtggtggttcgttctcgatgctacctcctgagcactttcagagtgctcagaagaaggggcagaactgaatatggataatctcagacagctttagatgtatgtatctgggcggcttcagatgcaccaccatcatctctggttcatgctcgtttttctccactgtagtgtagaacattgtcacagtttgagattgttgtctccttccttcctatgtacccgcctttatcgctggaagccgactgttgaactttcgcacta

SEQ ID NO: 99413 - DNA, 1745 bp, Zea Mays
gcaggcctcctccttgtttatatatgggagatgctctcaccctctaaggtaaggaaggagaagaagacgagtgtcaagtgaacctgaaacttgcggtgtcactggctggtagcctgagtgtgagtgagtgatcgagctagctgagctccgatcctcgctagctaggataccgccataccacaagtcttcttcacaagtttaggagtgacagcaacaagagatcgatggcctctgccaccgtgctcaagtcctccttccttcccaagaagtccgaatggggcgccaccaggcaggccgccgcgcccaggccgcccaccgtctccatggtcgtccgcgcctccgcctacgccgatgagctcgtgaagaccgcgaaaacgatcgcgtcgccggggcggggcatcctggcgatggacgagtcgaacgcgacgtgcgggaagcggctggcgtccatcgggctggagaacacggaggccaaccggcaggcgtaccgcacgctgctggtcacggcgccgggcctgggccagtacatctccggcgccatcctcttcgaggagacgctgtaccagtccgccgtcgacggccgcaagatcgtggacatcctggcggagcagggcatcgtgccggggatcaaggtggacaagggccttgtcccgctcgccggctccaacaacgagtcgtggtgccagggcctggacggcctggcgtcccgcgaggccgcctactaccagcagggcgcgcggttcgccaagtggcgcaccgtcgtcagcatccctaacggcccctccgagctcgccgtcaaggaggccgcgtgggggctcgcacgctacgccgccatctcacaggacaacgggcttgtgccgatcgtggagccggagatcctgctggacggcgagcacggcatcgagcgcacgttcgaggtggcgcagaaggtgtgggccgaaaccttctacgccatggcggagaacaacgtcatgttcgagggcatcctgctgaagccgtccatggtgacgcccggcgcggaggccaaggacagggccaccccggagcaggtggccgcgtacaccctcaagctcctccaccgccggatccccccctccgtgcccgggatcatgttcctctccggcgggcagtcggaggtggaggcgacgcagaacctcaacgccatgaaccaggggcccaacccgtggcacgtgtccttctcctacgcgcgggcgctgcagaacacctgcctcaagacctggggcggccagccggacaaggtcaaggcggcgcaggacgcgctgctgctgcgcgccaaggccaactccctggcgcagctcggcaagtacacctccgacggcgaggccgccgaggccaaggagggaatgttcgtcaagaactacagctactaattaatcgcccggccatcacccgggataccgccgcccctccgagagatacgtgtgtactgatcatggttaagcacgtactccgatccattcccatcccatgaagccatgataatgatgatatgatccatggaccatgcatggtgctctggtcgatgccgtacgtgtgtccctgatacaatactattttagtactgatgctagtcatcatatatatcgatcgagctcgccactgcgaagtctgagataatgcatgtatgcttgacggcgagatctgaggaaaaataatttctatatatgcatgtttcgagatggctctcccttaattaattattacataccgtgtgttactagctt

SEQ ID NO: 99414 - DNA, 1809 bp, Zea Mays
aaggtaaggaaggagaagaagacgagtgtcaagtgaacctgaaacttgcggtgtcactggctggtagcctgagtgtgagtgagtgatcgagctagctgagctccgatcctcgctagctaggataccgccataccacaagtcttcttcacaagtttaggagtgacagcaacaagagatcgatggcctctgccaccgtgctcaagtcctccttccttcccaagaagtccgaatggggcgccaccaggcaggccgccgcgcccaggccgcccaccgtctccatggtcgtccgcgcctccgcctacgccgatgagctcgtgaagaccgcggtacgtactatacgctccatcgatcgtacttaggttaatctcttcatcttcctcctccggctgtcgaactcaagtgtgcgtgtgtgcatgctgtgtatacgtacgtacgtacgtatgtgtggacagaaaacgatcgcgtcgccggggcggggcatcctggcgatggacgagtcgaacgcgacgtgcgggaagcggctggcgtccatcgggctggagaacacggaggccaaccggcaggcgtaccgcacgctgctggtcacggcgccgggcctgggccagtacatctccggcgccatcctcttcgaggagacgctgtaccagtccgccgtcgacggccgcaagatcgtggacatcctggcggagcagggcatcgtgccggggatcaaggtggacaagggccttgtcccgctcgccggctccaacaacgagtcgtggtgccagggcctggacggcctggcgtcccgcgaggccgcctactaccagcagggcgcgcggttcgccaagtggcgcaccgtcgtcagcatccctaacggcccctccgagctcgccgtcaaggaggccgcgtgggggctcgcacgctacgccgccatctcacaggacaacgggcttgtgccgatcgtggagccggagatcctgctggacggcgagcacggcatcgagcgcacgttcgaggtggcgcagaaggtgtgggccgaaaccttctacgccatggcggagaacaacgtcatgttcgagggcatcctgctgaagccgtccatggtgacgcccggcgcggaggccaaggacagggccaccccggagcaggtggccgcgtacaccctcaagctcctccaccgccggatccccccctccgtgcccgggatcatgttcctctccggcgggcagtcggaggtggaggcgacgcagaacctcaacgccatgaaccaggggcccaacccgtggcacgtgtccttctcctacgcgcgggcgctgcagaacacctgcctcaagacctggggcggccagccggacaaggtcaaggcggcgcaggacgcgctgctgctgcgcgccaaggccaactccctggcgcagctcggcaagtacacctccgacggcgaggccgccgaggccaaggagggaatgttcgtcaagaactacagctactaattaatcgcccggccatcacccgggataccgccgcccctccgagagatacgtgtgtactgatcatggttaagcacgtactccgatccattcccatcccatgaagccatgataatgatgatatgatccatggaccatgcatggtgctctggtcgatgccgtacgtgtgtccctgatacaatactattttagtactgatgctagtcatcatatatatcgatcgagctcgccactgcgaagtctgagataatgcatgtatgcttgacggcgagatctgaggaaaaataatttctatatatgcatgtttcgagatggctctcccttaattaattattacata

SEQ ID NO: 99415 - DNA, 2264 bp, Zea Mays
cttggttcctcctgtgtcctgtcttcttccccttcccgctctccgcctctcgccaaggaggcgaagacgataaccaccgacatgccctagcgatgttcccatttgcagacccaatccaagccccaagcaaccaccaaacctggccgattcatccggaaagtaacatagaaccgcccccggagttgtaaaaggtttccatttctgattggttgtcgagcctggccacgttttgccgaagaaaggcaggacgcccgttcggttacggttcttgatccggtgagggaccgccgccgaaggcaatgcagccggacccgcaaggttcgggcagggggaaggcgggcggcgccaatgcgcacgcgcggctgccgccgccggtgacggcggcgtcggctgggcggccggcgtcggtgctgccgcataagacggacaacgtgcgcgaccactaccgcatcgggaagaagctggggcaggggcagttcggcaccacgtaccagtgcgtgggcaaggcggacggcgccgagtacgcgtgcaagtccatccccaagcgcaagctgctgtgccgcgaggactacgaggacgtgtggcgcgagatccagatcatgcaccatctctccgagcaccccaacgtcgtccgcatccgcggcgcctacgaggacgcgctcttcgtccacctcgtcatggagctctgcgccggcggcgagctcttcgaccgcatcgtcgccaagggccactacacagagcgcgccgccgcgcagctcaccaggacgattgttggggtggtgcaggggtgccactcgctcggcgtcatgcatcgagacctcaagccggagaatttcctcttcgcgagcactgccgaggatgccccgctcaagaccactgattttgggctctccgtgttctacaagcctggtgataaatttgctgacgttgttgggagcccctattatgttgcccctgaggtgcttcaaaaatgttatggcccagaagctgatgtatggagtgctggagtgattttgtacattttgctatgtggtgtacccccattctgggcagagagtgaagcagggatattcaggcagattttgcgaggaaaacttgatttggaatctgaaccatggccaagtatctctgatagtgctaaggatctagtccgtaagatgctaatccgggatcctaggaagagattgactgctcatgaggttctatgccatccatggattgttgatgatgctgttgcacctgataagcctattgattctgctgttttgtcaaggctgaaaaacttttctgcaatgaacaagctcaagaagatggcattgagggtgattgctgaaagtctatctgaggaggagattggtggtttaaaggagatgttcaaaatgatcgatactgacaacagtgggacgataacttatgatgaactgaaggatggtctgaaaaaggtgggctcagatctgatggaacctgaaatccaggctttaatggatgcagctgatattgacaacagcggaaccattgactatggagagttcttagcggctacgttgcacatgaataaactggagagggaggaaagcttggtgtcggcattcgcattcttcgataaggatgggagtggcttcataacaatcgatgagctctcgcaagcatgcggacagttcggcctttctgatgttcatcttgaggacatgatcaaagatgtggaccagaacaatgatggacagattgattatagtgaatttgctgccatgatgagaaagggcaacactggtggagcagggaggcgaaccatgaggaacagcttgcatgtgaatcttggtgaactcttgaagcctgccgagacctagtttttttaccagaggattctgctttccagatgctcccatctgaagtttagcgtgcatcgtcagctttcacggattgattagacttgatcccagtaccagtgccacgaaaaaagcggttatttttttttcagtggtactagtatttagtggaaagagcattctgtggcacccagtgacaaatcctaggtgctgaagctgacatgttatgctactacggagtcccgttgtcttgtcacgattgttgttgatgatttcaggtttgtaccattactgatttttgttgtcagtgtaaaaatgtgctggtgccccataaggtaggcacctaggtctgtgtttgaagcatcgacagatttgtaaacatgttcctatgaacctatttctgattgataatttgtcaaaactcatcatttgtcttca

SEQ ID NO: 99416 - DNA, 626 bp, Zea Mays
aaggaggcgaagacgataaccaccgacatgccctagtgatgttcatcttgaggacatgatcaaagatgtggaccagaacaatgatggacagattgattatagtgaatttgctgccatgatgagaaagggcaacactggtggagcagggaggcgaaccatgaggaacagcttgcatgtgaatcttggtgaactcttgaagcctgccgagacctagtttttttaccagaggattctgctttccagatgctcccatctgaagtttagcgtgcatcgtcagctttcacggattgattagacttgatcccagtaccagtgccacgaaaaaagcggttatttttttttcagtggtactagtatttagtggaaagagcattctgtggcacccagtgacaaatcctaggtgctgaagctgacatgttatgctactacggagtcccgttgtcttgtcacgattgttgttgatgatttcaggtttgtaccattactgatttttgttgtcagtgtaaaaatgtgctggtgccccataaggtaggcacctaggtctgtgtttgaagcatcgacagatttgtaaacatgttcctatgaacctatttctgattgataatttgtcaaaactcatcatttgt

SEQ ID NO: 99417 - DNA, 2548 bp, Zea Mays
cttggttcctcctgtgtcctgtcttcttccccttcccgctctccgcctctcgccaaggaggcgaagacgataaccaccgacatgccctagcgatgttcccatttgcagacccaatccaagccccaagcaaccaccaaacctggccgatgagacttccatcctcgcatggaggaaaaatccaatcttcgcatgtgacctctttttaaatcgccacaagaatcgatcaatcaatccaaaagggaacagaaaaacagagcaaccccattgcttagtgttttcgccttgccgttggttctcttctccgttcctcggcacgcgtaggcctatttaaacctccgctaaagctcctttgtcgcgcccaattcggcagccatttcccagattccccattggcgagggttccccgcgctgagatccgatcttttcagttgttcggtttcaatcggtgtaaattcatccggaaagtaacatagaaccgcccccggagttgtaaaaggtttccatttctgattggttgtcgagcctggccacgttttgccgaagaaaggcaggacgcccgttcggttacggttcttgatccggtgagggaccgccgccgaaggcaatgcagccggacccgcaaggttcgggcagggggaaggcgggcggcgccaatgcgcacgcgcggctgccgccgccggtgacggcggcgtcggctgggcggccggcgtcggtgctgccgcataagacggacaacgtgcgcgaccactaccgcatcgggaagaagctggggcaggggcagttcggcaccacgtaccagtgcgtgggcaaggcggacggcgccgagtacgcgtgcaagtccatccccaagcgcaagctgctgtgccgcgaggactacgaggacgtgtggcgcgagatccagatcatgcaccatctctccgagcaccccaacgtcgtccgcatccgcggcgcctacgaggacgcgctcttcgtccacctcgtcatggagctctgcgccggcggcgagctcttcgaccgcatcgtcgccaagggccactacacagagcgcgccgccgcgcagctcaccaggacgattgttggggtggtgcaggggtgccactcgctcggcgtcatgcatcgagacctcaagccggagaatttcctcttcgcgagcactgccgaggatgccccgctcaagaccactgattttgggctctccgtgttctacaagcctggtgataaatttgctgacgttgttgggagcccctattatgttgcccctgaggtgcttcaaaaatgttatggcccagaagctgatgtatggagtgctggagtgattttgtacattttgctatgtggtgtacccccattctgggcagagagtgaagcagggatattcaggcagattttgcgaggaaaacttgatttggaatctgaaccatggccaagtatctctgatagtgctaaggatctagtccgtaagatgctaatccgggatcctaggaagagattgactgctcatgaggttctatgccatccatggattgttgatgatgctgttgcacctgataagcctattgattctgctgttttgtcaaggctgaaaaacttttctgcaatgaacaagctcaagaagatggcattgagggtgattgctgaaagtctatctgaggaggagattggtggtttaaaggagatgttcaaaatgatcgatactgacaacagtgggacgataacttatgatgaactgaaggatggtctgaaaaaggtgggctcagatctgatggaacctgaaatccaggctttaatggatgcagctgatattgacaacagcggaaccattgactatggagagttcttagcggctacgttgcacatgaataaactggagagggaggaaagcttggtgtcggcattcgcattcttcgataaggatgggagtggcttcataacaatcgatgagctctcgcaagcatgcggacagttcggcctttctgatgttcatcttgaggacatgatcaaagatgtggaccagaacaatgatggacagattgattatagtgaatttgctgccatgatgagaaagggcaacactggtggagcagggaggcgaaccatgaggaacagcttgcatgtgaatcttggtgaactcttgaagcctgccgagacctagtttttttaccagaggattctgctttccagatgctcccatctgaagtttagcgtgcatcgtcagctttcacggattgattagacttgatcccagtaccagtgccacgaaaaaagcggttatttttttttcagtggtactagtatttagtggaaagagcattctgtggcacccagtgacaaatcctaggtgctgaagctgacatgttatgctactacggagtcccgttgtcttgtcacgattgttgttgatgatttcaggtttgtaccattactgatttttgttgtcagtgtaaaaatgtgctggtgccccataaggtaggcacctaggtctgtgtttgaagcatcgacagatttgtaaacatgttcctatgaacctatttctgattgataatttgtc

SEQ ID NO: 99418 - DNA, 120 bp, Zea Mays
ctccacacgagaatcagttttaaaaaatacccgtttggcacggctcctctagatcctcgcttagaatcaggagctggagctgtgccaaacgggcccttagtatcgatccaaacaacttag

SEQ ID NO: 99419 - DNA, 2107 bp, Zea Mays
cgagagagtagcaaaaggccgccgcagccccacccgggcaccctgcgctgtctgtccctctctctctctctcttccccccgcccccgctcctcctttggctggctctggctgcgctcctccctcttcgttcccaaccccacccgcgccccacccaaccccgcgccgcctcccctcccccctcccccaccgtgcgtgccctgcacgtgctcccttctccgccctacctccggccgccgccacaccgggtcacgcggcccctggaagcgaaaggcgccgcctttccttccggcttcctcgctgtaacggaaggttcttcggcgcttcctttgtcagccggccccaggaaggggaagcatctcgggagcatggaccatggcggcgggggaggagggggtggggcgccgtcgagcagcaacagcgccggaggggccgccgccggcggcggcgccaccgctggcggcgcgagcggcggtcgcggtagcgagcaccacccgttctactacgccgggcccgcggcgtccaactccggagtgccacaggcccagcagcagccgtcgccgttcgctggcgcgctcgctatcgcgcccgtgcccgagcagccgcagccgtcgtccgccgacaagaaggcgctcgtgcctgcggcccccgcggcggcggggcccgtagtagccaagcggccgtccaaggaccggcacaccaaggtggacgggcgggggcggcggattcggatgccggcgctgtgcgcggcgcgggtgttccagctgacccgcgagctcggccacaagtccgacggcgagaccatcgagtggctgctgcagcaggcggagccggccatcctggcggctaccggcaccggcaccatcccggccaactactcctcgcttaacatctccatccgctccggcgccgccgcccccgccgcccgcgccgcgccgttcccggcgctcgcgctccacccgcaccaccaccaccaggcggcccccgcgcacgacatgtccgccatgatggctgggtaccatcaccaccttctcccgccgcagccgcagccgcaggaggaccccagcgccggcgacgcctacatgcggaagcgctaccgggaggacctgttcaaggaggacgacgagcgccaggatccgagcgcgcccaaagcgcgcgagcagcaggcggcgactccgccgccgcagccgcagccttccgccacaatgtgggccgccgccgccccgtccggcgggttctggatgctgcccgtgtccgcgagctcggccgccgcggcgcggccggccgaacagcccatgtggtccttcagcggcggcggcggcacgggcaccgtgcaggccccgctccagttcatgtccagggccagctaccccggtggcgctgcaggcggcggaggcggagccatgtccgacaccaaccttggcatgctcgccgcgctgaacgcgtacaaccgtggcggtagcgaggagcagcagcagaccgagggggagcagcagcacggcggcgacggcggggttaacgatgacggagacgaagatggtgacgacagcgctgaagagaacaatggcaacaacagctcacagtaagctgtaagcccgcgacgacaagcttggggtgacgatgatgatgatgagcagggattccgccaccatgatcgcattttcctggtagcgctaaagaatttcggcgtgtcttgttcgctggaggatcgccctgagctgtcgccggactggggttaggatgattggacggaggaaaccaaccgcgggatccaatcatagacgcacaaaaaaaaaggaatggtgcgctagcttttgtgcaggaagcaagcaaagcaagccgagcgaatgcaggagcaacacttctggctagttcattagttctttttttttccttttgaatttgtttgtgttgattttttgtttggattgttctatgaatgattgcgttattgagacgggtgtgatggtgatgatgattagtgggtccaagctagggagggccaaggacatgagtttgagagggttctgtatgtacagctgattgatcgtcttgattttttgctgcattgttgattccattctagttcagtagttctcggtagttgaa

SEQ ID NO: 99420 - DNA, 363 bp, Zea Mays
atgggcggcgcccgcgggccgccgacgtcgtggcgggcggtggccgcggcggctctggcgctgtggctgctcccggcggccctggcgctggccgtcctctggctgccgctgctctgctgcgccgtggccgccgtccgcttcctgagggtcaggaggaagctggtggccagcgggagatcgcgtggcggctgctgcgacggcgacggcgacggcgacggagaccgcgaccgcgtgccggacgagacggcgacggtgcgcgccggcggccggctccggctgctgcaccggtacctcgacgaccaggtggagctcgtcgtcggcgtcggagcccacgaccaccaagaggatcatgaacaagggtag

SEQ ID NO: 99421 - DNA, 249 bp, Zea Mays
taacttctttcctgtaaatgattctggtcgatcagttcccttgctacaacatcttcaggtctatagttctctagcgttgggatcatatcatcgtcattctctctcagtctcttccctgaaaaagaaaattttgtgtatggaaaaatgtgataaaatgtgttagaacaggagatatgtcaagcatcaaccaataagagggaaaagtggagaataagtaataactatcttgacagacttaactgatatgga

SEQ ID NO: 99422 - DNA, 741 bp, Zea Mays
atgatgtgggacttcaccgtcaccgaggaccacaccaacatcccggaccagcagatcgtgttcaaggttactgaagaaaacctggcagcactatttataaattgtggacaggttgtggactgtcacatgtgtggagacccaaactcagtccttcggttcaccttcatagagttcactgatgaggagggtgcaagggctgctctaaatctgtcaggaactatgctcggatattatcctgtcagggttctgccatcaaaaactgccattgcaccagtcaatccaacattcctacccaggtctgatgatgaacgggaaatgtgtgcgaggactatttactgcacaaacattgacaagaaggtcactcaggcagatctaaaattgttctttgagtctatatgtggagaggtctttcggctgaggttgcttggtgactaccatcattctactcgcatcgcttttgtggaatttgtgatgcgttatgttttcagcggtttaaaaatgataagaatacgttgcttgagattcgagtggatcaagtttggttggtcagtgcctccaagtgaagaaacaaaccccgatggtaagagacatttgcttcttaatatttcaggcagaaagtgctaccgctgccctgaactgcagtggcgtgatactgggatccttgccaataagggcgagcccctcgaagactcccgtgcgtccccgtgcgcctcgctagctgatgcactagaggtgtcctag

SEQ ID NO: 99423 - DNA, 238 bp, Zea Mays
gcccctcccccgccctcgccgatgccgccgctcgcgcagaagcggaagggggatgccgcccaagaggaaagacggggcgggcgcggtggtaccggcctggcccgccaggcagagggaggacgaggaggaggttgtctgcttcatctgtttcgacagagaggacgggggcgggaggcgaaggcatggaaggggcgcggggaggagtaaggaagggcggccgaagatggaagggaggcgg

SEQ ID NO: 99424 - DNA, 2369 bp, Zea Mays
aggagccagctgctggctcgtgagtgtcggcgtgtcgggccacaacccgaacgctgaaccaaggctcgggaccgcgacactcgtgtgtccttctcctcagatctcgccggcggcggcatgctcccctcgtccggcagcggctggggccgcggccgcggccgccacctattgctcagcagggccctagctctcgctgcactgctcgcgctcgcctccgcctccgagtccgaccacaagtacaaaactgaagagccagttaagctttgggtgaataaagttggcccttacaataatcctcaagaaacctacaactattacagccttccattttgtcaaccgtctgagaaccccacacataaatggggtggtcttggagaggtccttggtggaaatgagctgattgatagtcagcttgaaataaagttcttaaaaaacgtggagaagggcttcatttgtacacttgagcttgatgctaaaaaggtccagcagtttgctgatgccattgaaagctcatattggttcgaattttttatagatgatctgcctctttggggttttgttggggagtctgacaagaacagtgaaaacaagcattacctttacacacacaagaacatccttgttaaatacaatgataacaggataattcatgtaaatctcacccaagagtctcctaagcttcttgaagatggcaagaaactggaaatgacatattcagtgaagtgggtagcaacagatgtgtcatttgcacgccgttttgaagtgtacctggactatcctttctttgaacaccagattcactggttctccattttcaactctttcatgatggttattttcctaactggtttggtttcgatgatattgatgcggactttgagaaatgattatgccaagtatgctcgtgaagatgatgatctagagtccctggagagagatgttaatgaggaatcaggatggaagcttgtccatggtgacgtatttcggcctccccgaagtttgatgtttctttctgcacttgttggtatcggcacccaattggcagctcttatcctacttgtgattgttttggccattgttggcatgctatacattgggcgaggggctatcatcacaaccttcattgtgtgctatgctcttacatcgtttatttctggatatgttagtggtggtctttactcaaggagcggtggcaaaaactggattaaagcgatggttcttacagcatccctctttccgttcttgtgtttttcaattggtttcgcactgaatacaattgctattttctaccgctcattagcagcaataccatttggcacaatggttgtcatgtttgtactttgggctttcatatcttttccgttggtgcttttgggaactgttgttggtagaaactggagtggtgctcctaacaacccctgccgagtaaagactattccacggcctattcctgagaagaagtggtaccttacaccttctgtcatctcattgatgggtggcctgcttccctttggcagtatcttcattgagatgtacttcgtgttcacatcattctggaactataaggtgtattatgtctatggtttcatgttgctggtcttcgtcatccttctaatagtcaccatctgcgtcaccattgtgggtacttatttcttgctgaacgccgagaactatcactggcaatggacgtcgttttcctctgcagcgtcaaccgctttgtatgtgtatctgtactccatctactactaccatgtgaagacaaagatgtcaggcttcttccagacaagtttctactttggttacacactgatgttctgccttggtctaggcatactttgtggtgctattgggtatctagggtcaaccctttttgtaaggagaatctacagaaatatcaaatgtgattaaatccctgctacttactagcagcagaaagaccatatgtattgtcagtggaagcaaggcctgaaaaaaatggattttgatggtagaccctgaataggtttttgaaactgctgatgacttgaccccgttgttcttatacgcacatttttgtttgcctgcttattcctgtgagatcgtcctcatagtgtatatctgtggtagttgaggattagcctgaaacacctgttttcatcattttttcttcattttaattacttcattcgttaggatgtaatcagtgaatattgatgcggcgcgagtcgaattaggactgttcggacaaatcactgcctatacgagtattgaggggtcacgattataacaccgaagctatgacgagcggccgcccgagcagaatgacaggataaggagaattgtataggatgtctctcgtgatgttaacgaaatattggttttggcatgtc

SEQ ID NO: 99425 - DNA, 956 bp, Zea Mays
atttttgttacgccttgcatatttggtggtacacgggggcacggggcagatctcttgggtcatcctctacgcgagcgggccgcttctcccatccagccgcgcacggcgtcgccggaaccggagaagggagggaggaagggagcgcgagatggacaaggccaataagctcagcgccggagcgggggagaaggcgaccaagagcaggagccacgggtccacggcgctgttcgtcgcggtggactacgcgttcctgctcgccttcgccggcttcctcgcctacctcgtcgggtcgcggatcctcccctccgccgccggctccgcctagaccggcccgcgttcgtggatctctcttctttcttccacgttttttttggagccgatggctgcgggagcaccgggatcttgccgggtggttctcgtctcggaatcgatctcgatctgatgccgctcccgcgatgtaatctggcgacaatttgacgagaagagaactagcggtgtgtttcttggcaactcgcctggtaatgtgacgcatctttccttattctgttgctactagtactatccctgctcgtgtcgtgtgtgctgagagtctgagattgcttgggactttgaatgcggcgtttatgccgcgatctgtgatgtctgcttgctactgacgccaatttaaagtaaacccatcagcttgcttcgtatcagaaccgcgacgcgttcgaccgcgctgatcactgggatgttgtccatcaagcgtctctggatgctcatcctcatggtcgtcgccgagctcggacacgacccacacgctccccgcagcttcagcctcaccacgttaccgccgtcgatctcgcgcaaggcgacgtcgcctccgtctgctatcaggtacgggcgcgcacctcgtccagcaccgactccacgtttccggtagtcaatggcagctggaccaccgtgttcaggccggc

SEQ ID NO: 99426 - DNA, 2505 bp, Zea Mays
cgctcctccattccaacgtctccacccactgctcccaatggcgacgccgttcccgctggaggccgacgagggggaggcgcgggagctcctctacgaggcgtacaacgagctgcacgcgctggcgtccgagctgggcggcgcggcggcggcgccggcggtcgtggtcgtcggccaccagacggacggcaagagcgcgctggtcgaggcgctcatggggttccagttcaaccacgtcggcggtggcaccaagacgcggcgccccgtcgcgctccacctccgcttcaacccgcgctgcgacgagccccagtgccgcctcctctctgcaaccggcgatgccgaagagcatgacgaagccggggttgccgcccgccccatgccgctcgccgacatccaggcatatattgaagctgaaaacttgaggttggagaatgacccttgccaattttcagagaaggaaatcataattaaggtagaatacaagcattcccccaatctcaccattattgacactccaggcctcatccttccagctcctggccgtaaaaacagagttttgcagagccaggcttctgctgttgagagccttgttcgtgctaaaatccagcataaagagaccattatactgtgccttgaagattgtagtgattggagtaatgcaactacacggagagtagtgatgcaggtcgatcctgatcttgcaaggactgttctagtctccacaaaactggacacaaaaataccacaatttgcccgtccctctgatgttgaagtgtttcttcacccaccaaattgtgtgctagatgtttccttattgggagattctccctttttcacatcagtaccttctggtagagttggctcttgccatgaagctgtgttcaggtcaaatggagagtttaagaaggccatcttatcaagagagttggaagatattgcatctattgaagacaagttaggaaggtcacttacaaccatggagaaagatagaattggagtgggtaacttaagattatatttggaagagttgctgcagaagaggtacattaagagtgttccattaatcattccacttcttgagaagcaacatcgaaatacaacaagtaaattgcgtgaaatcagtcatgaactcagtgatctggatgaaaccaaactgaaggagaaagctcagctattccatgacacatttttgaccaagttatctttgctattgaaaggcatggtggtggcacctcctgataaatttggagaaactttagtcaacgagaggattaatggaggaacatttactggaagtgagaatttccagctcccgaacaagatgatgccaaatggtggcatgcgtctttatggtggtgcacaataccatcgggcaatggctgaatttcgtctggtagttggtagtaccaggtgccctccaataactagggatgaaattgtcaatgcttgtggtgttgaggatattcatgatggtacaaactactccaggactgcttgtgtaattgccgtggcaaaagcacgtgacacgtttgagccattccttgatcagttgggttttaggcttttgtacatactgaagaggctgatcccaatctctgtttatctgttggagaaagatggtgagcactttagtagccatgaagtgctcataaggcgtgtccaggaagcattcaagaggtttgttgaatccactgagcaatcatgtcgtcaaaggtgtatggaagatttggagagtaccactcgttatgtcacttggtcccttcacaacaagaaccgtgctggattgagacatttcctcgattcatttgttgcaccggagcaactatcagtaaatacattgaacgagcggttttctgggttgaatgataacaaacaggataaggcaaagggtgactcgaagtcaaaccattctccagacacaaattcgtccactgctatgccagagacaaggctggttgacctattggatagcacactctggaacagacgcctggttccctcatctgaaaggcttgtttatgcgctggttcaccagatttttcatggaatcaaagagcattttcttgtcaccactgaactgaagttcaattgctttctcctcatgccgattgttgacaaactaccagcacttctaagacaagaccttgagtcagctttcgaagaggaacttgatagcatctttgatgtcactcagctgcgccagtcacttgggcagaagaagcgcgagctggagatcgaactgaagcggatcaagcgcttaaaggaaaagtttggagagataaataagaagctcaattctcttcaggttaggcagtaggccaggctcaaaatttagcagtagcttggtagtctaggactccaggtagagtgtttcaatgctgtaataaaataattggtcatctagagtgacttcttgttgtatcctatcagttgtaaatatgaagtattcctatgtcttaacgtatgttgttgctacacgggttttcggagtcttttttcccttgcatg

SEQ ID NO: 99427 - DNA, 2592 bp, Zea Mays
atggacgtcggggagaccgcgctatacgtcgccacggaggccagctgcgaggaggccgtgagcctccttctcctgctctacgaccttgagactgccaccgtctgctcacgccacaatcttgacgccttacatgtcgccgccaagcaagggcacaccgatatcgtcaaggcactgaagaaacgaattggccacaagaatccaaaagttcaccttcttgcactaattttcattgaaaaggactacaaattagcagatactatgatttggggtctacaagtattggccaatcagaaactgccaagaggcgtccacactgctgcattctgccacccgcagccgccccgccccgacgacctctttgataaggctatgaactccttcaaactcgccaagaaccttcctgcctacaatgagaagcatcgactctccgaggctcttacagaaacagttaagtatggcatttgctactcatgttgttcaattctgcattactttgaactgtgcattacaatctatactcgtgattttccttaccagatagtgttaataattgtatacattgctttgttgttttctctcttcaatggctacttgaagcagggatcaactgctgacaattccttttcttacgaggtgtacttaacaaatgaaacaataaagatgatgacattaatgaaaggtttgattagtaagcacgcaacaactgctccctctccggtctccgcaccctccgtccattccttccacacccatggtaatgtaccaaaccccactccgttcctcacccgcggcatcgtcgccaccgaggccgtcggcggcttagccaaagaccgttgcggccccgactccgccgtagcccaccacccggcaaccgctgtgacctacacgaaccaaacccgccgccgcggcatagcgcaccacaccaggctcctcgatggtatagactcgagagcccaacccgacctgagccgatctgaaaggagggttgtcatctggcctcccctggttccggcgcccatggtggtggcagcacctgtccagctaaacctcgacgagcagggacaagaccgcctcttccccctccccgcgcttttgctgatcggccttcagtttctcaagcaacagcatctcaggagctatacccgcagccctcgggaacgccaagtccctgaagttcctgtgagtccgggaatacaatggcgtttggatcacaatcgcctgacggggccgatcccaagggagcttgctgggctgcccaatcttggaattgtagatttctccaacaatgacctttgtggcgcgatcccgacagacggagcattccagaacattccccgtagcagaaagctagagtgtggcatgttttacatctattataacggtctaccatttttgggcccatctataacaaggacttgtcccttggtagttgaggttttcatgcaaccgacttacacatgtaatggaactcagatgattgcaggcctaacaggtgctctgtcggtggcatttagaggaaacaatgcactactttacagaagggaaaatcctctctccttgagatgttcttttcgctccttgaaagcaagaaataaccattcatcaactgtggcacctaaggactactgtgaaacttacatccagtttttgagagataaacagatagttcctgattcagatcctccaagccctaaagatgtggacctattctatcagtttattgataagagtaaaaggctcatggtagtgactggggcaggaatgagcactgaatctgggattcctgattacaggagtcctaatggtgcatacagtacaggttttaaaccactttctcatcaggcctcatcattcttctttcttgctctgttactagcccagaggcggtactgggctaggagctatgctggatggagaaggtttaggagagcacaaccaaatgcagcccattacgctcttgcgtctctagaaaggattggccgtgttcactcaatggttacccaaaatgtggataggttgcatcatcgtgctgggagtaatccacttgagctgcatgggagtgtatatgaggtaatttgtttagaatgtggtacatccatcagccgagaatcattccaggaggaagtgaagaacctaaacctaaagtgggctcaagctatcgatagtttggaagtaggacaaccaggttcaggcaaaagctttggaatgcagcaacgacctgatggtgatgttgagattgatgagaagttctgggagcaagattttgaaattcctagctgccatcaatgtggtggagtgctaaagcctgatgttgtgatgtttggtgataatgttcctcaagagagagctgaaagcgctaaggaggctgcaagaacatgtgatgcacttctagtggtcggttcagcactaatgacaatgtccgcttttcggctggcaaggctggcacacgaagcaaatgctcctatagctgcagttagcatcggggagaccagggctgatagcattttatcactgaaaatcaatgcgagatgtggagagatcttacccagaatacttcagatgggaagtctggtggtgccagacgtaaactga

SEQ ID NO: 99428 - DNA, 2172 bp, Zea Mays
atgaagctcaggacgctttctatcacgaggtgcgcgccgtcgccgctggggtgcgtgggcatgggcggcgggaggaggaggacggtcctcgtggccctgcgccgggacgccgccggcagggagctgctcacctgggcgctcgtcaaggccgccgccgccggcgaccgcgtcgtcgcgctccacgtatccacggtcgccgcagacggtgcgcgcatctctccccgcgacagagaaatggccgcggcggaggaggacaggacgagagccagcgactcgctcgcctccgtgctcggcgcgtaccgggggttctgcgagcgcaaccagatcgacctagagctcaagctctgcgaggggccgtccatcaagaaggccctggtggccgaggccacctcctgcgccgccgcgcacctcgtcctcggcgtcaccaggagctccaggccttccggatcgtccgccaccgccaccgccgtcgcgaggtactgcgccaagagagtgcccccgagctgcatggtcaccgcggtcagcaacggcgccgtcgtgtaccgcagagatccagtgcagcaccaccaccagctgctgctcagcccctacagcgcagtggtcgagacgccgcggcggctgtaccgcaagatcctggacgcgaggacggcggcgggagacaagtcccaggacgacatggcgatcggcgacgtcggccggtcggctcgccggaacatgtcccaggcgatgagcgccctggtctcgccgagagtgacgctggcgccgggtacggtgaggtcgtcgtgccacgggcaggagtcgtcatcgtcacctaaggtgtccgccggctggcctctcctgaagaaagacagcatgcctgcgttgccggagctgtcagaggtatctgtggttgagtgggccatgcagctgccgaccaggtgttgttccgaccagagatccgatgagaaacaggttccggaggagctggcctcgctcagagacaagtactcgtccaagtacacagtgttcaggcacagcgacctagccaagatcaccaatggcttctctccagatcgccttgttgggaaaggcggcgccggccgggtctacagggggtgtaccgaaggaggcaaggagctcgcggtgaaggtcctgaaaccatcggaggacgtggtcaaggatttcgcgtcggaggtcgacgtcctcagctcggtggagcacgagaacgccatgtccctcgtcgggttctgcgtcgacggcggcagggacaggctgatgctcgtgtacgactacatgccgcgaggcagcctggaggaggcgctgcacgggcacggcggcggggtgcaagcacctggcaagggcggtggtggggtagcgctaggctggccggagaggtgcaaggtggcggccggcgtggcgcgcgccctcgagtacctccacggcgacggcggcgaagggcaccgccggcccatgatccaccgggacgtcaagtcgtccaacatcctcgtcgccgccgacttcgagcccaagctgtgtgacttcggcctcgcgatatgggcggacgacgcggcagcgcaggtcaccggcgacgacgtcgcgggaacattcggataccttgctccggagtacttcatgcacggcaaggtgagcgagaagatggacgtgtacgcgttcggcgtcgtgctcctggagctcgtctccgggaggaagccggtgagcgccggcgggcccaggggcaaggggagcctcgtgatgtgggccaactccgtcatacagggcggaaaggtcatggacctcgtcgaccccaacctaccgctaccggcgacgggcggcgacggtggcgaggtcgagcggatggccctcgctgctgcgctgtgcatccggcgagcgcaccagcaccggccgaccatgagcaatgtggtgaagctgctggccggcgacggcgacgccgtcgcatgggcgaagtcgcaggtgggcgtgcccggcgacaacgacatcgacggccggcgccacggctgcggcgccgccacctcgccggaggagaagggcggcgacatccagtcctacatcaacctcgccctgcgcgacatcgtggacgacgacgacaacgacgcctcgtccgtcggcagcgccgtgtcgttggaggagtacctcagggggagatggagccgctcgtccagcttcgagggctga

SEQ ID NO: 99429 - DNA, 2180 bp, Zea Mays
gcccctgcccgtgaccgccccgcaccccccacagccgggggtcgccggtttccgcgactccaaatccgcgtgcgccgcccgccctctaaatctgcctcgccggcagccgggcgggggccaccacgtcacacccagcctctcctctcgcccacgctgccctgacagggtaaagtcagggggtggcgtgtgtgggtgggggggggggacaatcaggtgaataatcatggacagaagagctggggcgatcctagtgttcctgctcgtcgtcctggtctgggatgtggcggcggtcgccgagaccgagcctggcagcgtgcggctagtacaggaggcgccacataggaaggtggtggaggatggggccaaggcggggagggtgccggtgtcgaccgtcgcgtggtccacgcttgccatggccgcggcgacggggttgggagcggtgcccttctttttcatggagctcgaagcgcagtgggctggcctttgcaatgggctggcggccggggtgatgctggccgccagctttgaccttgtgcaggaagggcaggtgtatggcagtgggagctgggttgtgttcggaattctgagtggaggtatatttatttggctttgtaagaagtttcttgagcaatatggagaagtaagcatgttagatataaaaggggcagatgcaagtaaagttattcttgttgttggaataatgactcttcattcttttggagaaggctctggtgtgggtgtttcctttgctggctcaaaagggttctctcagggtcttctagttactatagctatagcagtgcacaacataccagaaggcttagcagtaagcatggttctcgcgtctagaggggtgtccccccaaaaggcaatgatgtggagtatcattacatctttaccacagccaattgttgctgttcctgcattcctctgtgccgatgcattccagaaggtgcttcccttttgtactggtttcgcagcagggtgcatgatatggattgttatagcggaggttcttcctgacgcttttaaggaagcaactccatctcaagtagcttctgctggaacactcgctgttgctttcatggaaacattaagtacggtgcttctgggatttacagatggcaacaatgtggaagacgcatcaggcttcttagtatcacttgtgtttggactcggtccacttatcggtggaattatactcgtcacattctctcttgggttcagcatgccgcaccctcttctcaccggtgtcgcatccggcatagctttccgtctcgcggcatggagacctgtgcagctcctaatgacctcaaaaatgggtctcttcaccaccctcttcctcctcatcggaggttccctggcctaccacgccgccacatcaagcatcctccggttgttcaatcgcaaaaggtcttccgtgaacgtgatcgcgtcatcctccggcctctctctcagtgccctcacagtgcagtcccttcttgcctgtggcgccgtattccttcacgcatatgctgaagggcttgcgctcggtgtcgcggctcgcaaggcctatggcctcggccgctacatggttctcccagcctccctccacggtcttccacgtggcgctgccgcggcgagctgcgtgtatggtgccacagatagctggcgtggagcccttgccgctgccgctttgacagggctcgcagcgccgagcgccgccatcagtgcaatccttgcgaagatcgactatgatgggcttgactactggatggtcatagcgtgcggggctctgatccccagctttggccgcgtcttcaggcgctcactgcggttggacgtgcggaagagcgtcgttggcctgctggtaggtgttgccttcgcctccgtgtgcttgatgtcgactagattcatctgtctgcacactccttactgtaactcggctccagaagccgtcacataactttgttgctgccccgtgctgttgtaaaacacatgtaatactagtgtaatggcgatacaaaaggaggatgtggaagggttacgttgcgtcgaagagatctcttacggcgatacaacaaagggaaatggatgttgaacagaatttgcctttttcttgctgtcacttgtgtaaaattattcccaaacattgcctgaacgatagcccattcagccgttaacctcagtcccatttgatc

SEQ ID NO: 99430 - DNA, 2430 bp, Zea Mays
ggggcccgtgcttgccgtcccgtgaggcccctgcccctgcccgtgaccgccccgcaccccccacagccgggggtcgccggtttccgcgactccaaatccgcgtgcgccgcccgccctctaaatctgcctcgccggcagccgggcgggggccaccacgtcacacccagcctctcctctccgcccgcggcccgcccgcttcttcttcctcgccatcccttcttctagcgcggaggcgcagatccatcgggcttcgggggctcggttccatccctctgccagctgggattggattggagcatcttcccagcaccacccacgcggaagccatgaccattcagttgctccgctgacgactcctctgacgacagcacggctgcgctgacctgcaggcctctcgcccacgctgccctgacagggtaaagtcagggggtggcgtgtgtgggtgggggggggggacaatcaggtgaataatcatggacagaagagctggggcgatcctagtgttcctgctcgtcgtcctggtctgggatgtggcggcggtcgccgagaccgagcctggcagcgtgcggctagtacaggaggcgccacataggaaggtggtggaggatggggccaaggcggggagggtgccggtgtcgaccgtcgcgtggtccacgcttgccatggccgcggcgacggggttgggagcggtgcccttctttttcatggagctcgaagcgcagtgggctggcctttgcaatgggctggcggccggggtgatgctggccgccagctttgaccttgtgcaggaagggcaggtgtatggcagtgggagctgggttgtgttcggaattctgagtggaggtatatttatttggctttgtaagaagtttcttgagcaatatggagaagtaagcatgttagatataaaaggggcagatgcaagtaaagttattcttgttgttggaataatgactcttcattcttttggagaaggctctggtgtgggtgtttcctttgctggctcaaaagggttctctcagggtcttctagttactatagctatagcagtgcacaacataccagaaggcttagcagtaagcatggttctcgcgtctagaggggtgtccccccaaaaggcaatgatgtggagtatcattacatctttaccacagccaattgttgctgttcctgcattcctctgtgccgatgcattccagaaggtgcttcccttttgtactggtttcgcagcagggtgcatgatatggattgttatagcggaggttcttcctgacgcttttaaggaagcaactccatctcaagtagcttctgctggaacactcgctgttgctttcatggaaacattaagtacggtgcttctgggatttacagatggcaacaatgtggaagacgcatcaggcttcttagtatcacttgtgtttggactcggtccacttatcggtggaattatactcgtcacattctctcttgggttcagcatgccgcaccctcttctcaccggtgtcgcatccggcatagctttccgtctcgcggcatggagacctgtgcagctcctaatgacctcaaaaatgggtctcttcaccaccctcttcctcctcatcggaggttccctggcctaccacgccgccacatcaagcatcctccggttgttcaatcgcaaaaggtcttccgtgaacgtgatcgcgtcatcctccggcctctctctcagtgccctcacagtgcagtcccttcttgcctgtggcgccgtattccttcacgcatatgctgaagggcttgcgctcggtgtcgcggctcgcaaggcctatggcctcggccgctacatggttctcccagcctccctccacggtcttccacgtggcgctgccgcggcgagctgcgtgtatggtgccacagatagctggcgtggagcccttgccgctgccgctttgacagggctcgcagcgccgagcgccgccatcagtgcaatccttgcgaagatcgactatgatgggcttgactactggatggtcatagcgtgcggggctctgatccccagctttggccgcgtcttcaggcgctcactgcggttggacgtgcggaagagcgtcgttggcctgctggtaggtgttgccttcgcctccgtgtgcttgatgtcgactagattcatctgtctgcacactccttactgtaactcggctccagaagccgtcacataactttgttgctgccccgtgctgttgtaaaacacatgtaatactagtgtaatggcgatacaaaaggaggatgtggaagggttacgttgcgtcgaagagatctcttacggcgatacaacaaagggaaatggatgttgaacagaatttgcctttttcttgctgtcacttgtgtaaaattattcccaaacattgcctgaacgatagcccattcagccgttaacctcagtcccatttgatc

SEQ ID NO: 99431 - DNA, 2130 bp, Zea Mays
ggccatgacgactccgccggtccgcccctgcccccgctcacggatgctcctctggacgctatatataagccacctcactcccccctctgccatcacacaccaccgccgctcaccaacaaccgagcaggagcagcctaccccatccacccaccccatcctctgcgctgcacggctgctgctggtgctggtccggccggtccggtccggtctcctctgttccagcgagctccctccgatccatcgggtaggacactccccatggcgtcgcacaacggcaccaagcacctggcgccgatggaggtgtcggtggaggccgggaacggcggcggcgccgagtggctggacgacgacgggcggccgcggcgcacgggcacgttctggacggccagcgcgcacatcatcacggccgtcatcggctcgggagtcctgtccctggcctgggccatcgcgcagctggggtgggtggccggccccgccgccatgctgctcttcgccttcgtcacctactacaccgccacgctgctcgccgagtgctaccgcacgggggacccggacacgggcaagcgcaactacacgtacatggacgccgtgcgctccaacctcggcggcgccaaggtcgccttctgcggcgccatccagtacgccaacctcgtcggcgtcgccatcggctacaccatcgcctcctccatcagcatgcaggccgtcagcagggccgggtgcttccacaagcgtgggcacgccgtcccctgcaagagctccagcaacccctacatgatcctcttcggcgccgtccagatcctcttctcccagataccggacttcgaccagatttggtggctctccatcgtcgccgcagtcatgtccttcacctactccgccatcggcttgtccctcggcatcgcacagactgttgcaaacggtgggttcaagggaagcctcaccggcatcagcatcggcgccgacgtcacctccacgcagaaagtgtggcacagcctgcaggccttcggcgacatcgcgttcgcctactccttctccaacatcctcatcgagatccaagacacgatcaaggcgccgccgccgtcggagtcgaaggtgatgcagaaggcgacgcggctgagcgtggcgacgacgaccatcttctacatgctgtgcgggtgcatggggtacgcggcgttcggcgacaaggcgccggacaacctgctgacggggttcggcttcttcgagccattctggctgatcgacgtggccaacgtggccatcgtggtgcacctggtgggcgcgtaccaggtgttctgccagcccatcttcgccttcgtggagcgccgcgccgccgcggcctggcccgacagcgccttcgtctcgcgggagctccgcgtggggcccctcgccctcagcgtgttccgcctcacgtggcggtcggcgttcgtgtgcgtcaccaccgtcgtggccatgctgctccccttcttcggcaacgtggtggggttcctcggcgccgtctccttctggcccctcaccgtctacttccccgtcgagatgtacatcaagcagcgccgcgtgccccgcggcagcaccaagtgggtctgcctccagacgctcagcgtcgcgtgcctggtcgtctccatcgccgccgccgccggctccatcgccgacgtcatcgaggcgctcaaggtttaccacccgttcagcagttaattcttgctgctgtggatgtgctgggtggggcctggcctggcctgggtttggacgtatgtgcatgatgcattcattgcgttgcgttcaactgtggtcaacaagggagggagacagatgcagatgcagtgtgagatgtttgcatggaggcccctatagaaacaagtgaaatgtttaggcgcccttgtgcacatgctggtcgcattccttgcaagaataccaggggtggggccagaatggcatgagctgggtgttcctttctaactcttcttcttcttcttctcctcttcttctttatttacatttttcttttatgtgttttcgtctaattaaggttctggttttgtagttctaccgtgcaactcattgtaccggaaaagaatatatgaacaggaaatcccatatgatctttgccatctttatttttcgcgtctgcgggaa

SEQ ID NO: 99432 - DNA, 1758 bp, Zea Mays
cactgccacacaggcacagcctctcgcgtcacctaggcacctagcaagcaagaagcactcgggagcacttgcttcctgcgctcttccactccgacagtccgacgaggaagaagagattcgattcgagggagggagggagggagctcgttgtctcagttggccatggcacccgcgccgcacaacggactgaacaacaaccacccggtcgcgcccatggatgtgtcggtggaggccgggaacgccggagccgccgagtggctagacgacgacggccggccgcgccgcagtggcacgttctggacggccagcgcgcacatcatcaccgccgtcatcggctcgggagtcctctccctggcgtgggccatcgcgcagctgggctgggtggccggccccgccgccatgctcctcttcgccttcgtcacctactacacggcggcgctgctcgccgagtgctaccgcacgggccacccggagacgggcaagcgcaactacacctacatggacgccgtgcgctccaacctcggcggcgtcaaggtcgtcttctgcggcgtcatacagtacgccaacctcgtcggcgtcgccatcggctacaccatcgcgtcggccatcagcatgaaggccgtcaggagggccgggtgcttccacgcccacgggcatgcggacccctgcaagagctccagcaccccgtacatggtcctgttcggcggtgtccagattctcttctcgcagataccggacttcgatcagatttggtggctctccattgtcgccgccgtcatgtccttcacttactcttccatcggactctccctcggcatcgcacagaccgtctccaatggtgggttcaagggcagcctcactggcatcagtattggcgccggcgtcacctccacgcagaagatctggcacacgctccaggcgttcggcgacatcgcgttcgcctactccttctccaacatcctcatcgagatccaagatacgatcaaggcgccgccaccgtcggagtcgaaggtgatgcagaaggcgacgcggctgagcgtggcgaccacgacagtattctacatgctgtgcgggtgcatggggtacgcggcgttcggcgacaacgcgccggacaacctcctcaccggcttcggcttctacgagcccttctggctgctcgacgtcgccaacgtggccatcgtcgtgcacctggtcggcgcctaccaggtgttctgccagcccatcttcgccttcgtggagcgccgcgccgccgcggcctggccggacagcgccttcgtctcccgggagctccgcgtgggtcccttctccctcagcgtgttccgcctgacgtggcggtccgcgttcgtgtgcgtcaccaccgtcgtcgccatgctgctgccgttcttcggcgacgtggtggggctcctcggcgccgtctccttctggccgctcaccgtctacttccccgtcgaaatgtacatcaagcagctccgcgtgccccgcggcagcaccaagtggatctgcctccagacgctcagcgtcagctgtctccttgtctccgtcgccgctgcagcaggatccattgccgatgtcatcgccgccctcaaggtctacaagccgttcagcggttagcttcgcaggcagaaggtgggagggatatatgcaaaaacgattgcggatactgtactgctccattagttggcaggatctagcaattaggtcttatacttttttgagatgagatgatgaattaggtataatctgctatacttttttgcc

SEQ ID NO: 99433 - DNA, 170 bp, Zea Mays
ctttaaaactatttgtgttgtacttgaagcatcttctacaccgcagaatagctttgaagagttacagtctcatataaaacaggtaattttgtactaattgttttctttattttcccaaaggtgtgccacttccattagtatttttccagtgcagacgattgaaaactact

SEQ ID NO: 99434 - DNA, 873 bp, Zea Mays
ccagaacacttttgtgcctgggctgattgatcttgctatcaagaacaactgcctgatcggtggtgacgacttcaagagtgggcagaccaagatgaaatcagtcctagttgaattcctagttggtgctggaataaagcccacctcgattgtgagctacaaccacttgggaaacaacgacgacatgaacctgtctgcccctcaaacattcaggtccaaggagatctccaagagcaacgtggtggatgacatggtctcaagcaatgccattctctatgggcccgacgagcatcccgatcatgttattgtcatcaagtatgtgccgtacgtgggagacagtaagagggctatggacgagtacacatcagagatcttcatgggtggcaagaacaccatcgtgctgcacaacacctgtgaggactcgctcctcgccgcaccgatcatccttgatctgttgctcctggctgagctcagcaccaggatccagctaaaacctgagggaacggacaagttccactccttccacccggtggccaccatccttagctacctcaccaaggcaccactggttctgcccggcacactggtggtgaatgctctggcaaagcagagggcgatgctggagaacatcatgagggcctgtgttggcctggccctagagaacaacatgatcctggagtacaagtgagtgaagtggcgtggcctgcagctagatatgcaggaggttgcacgaagggaactagagaggcgagattagctgtgggattgtgttggcttctcgtgttttcttttgcgttttttcctggtcatcgttgtcgcgctgttgtattttatttgttggacccgtaactatcagggctctcctattctctatga

SEQ ID NO: 99435 - DNA, 1036 bp, Zea Mays
cggcattattattgcctttccggccaccactttgcactgctgtgtttccagtccagctgatgatatacacgatgcttcttcagacagaccaccaccaccagtaatgccgaccgcgaggcgcacgcgcatcccggcgttcggggagtggaaccaccaccaccacagcaacggcggcggcgcgtgggcgccggcggtcatgaccccgtccttcgacttcggccacgcaataacaacgccgcacaaagcgccgcagacgcaggggaggcggcgaggcgccgccgacggtgtcgtccacgcggccaagctggctgcggctgcggcggcggcggagcctcaccaaggccacacgcagaccacgaggcggagcaaggtggccgactccggagcctacgcgcaggccgcggcggcggcgaggaggtcctgcttcgcgctggccaagcccgtcgacgacgacctgtacggagtccctcccgacatgctctacggaaagccgccgccgccgggagcgaggaaggatgatggctggcggaggatcctgcggctgctggggtgctcgtgcttgagttgagcccgtcgtaatgaccgccggacacagccgagcattattgtcacggacaacaaggctgctggctaatcagggcgcgggctttttggcttccatcctcctgtacgtactacaagatgtctcaacttttggcgcctgctgtgatcgattgatgacgggccggcaggcaagacgtgactgacgtgccggccttgcgttgcgtgggtctgtgcgtaggtgtgacgttcgtgttgtgactgtgttcgctgctgaccgcctgtcctttgtgactgcttcaagctagtagattctaggatttagaggttctttatttatgtgtgtgcgttctcgtttgtcgctcaccctcaccgcctgtaaaaccccacctaaaatggtcgtgctatccgacaaataggcttttcacatcgtactactatttagcatcggacagtactgacacaagtatatataataagaccctgttcatgtacc

SEQ ID NO: 99436 - DNA, 1042 bp, Zea Mays
gctacttgtttcctcttcccagtattgtgattccttccattcgtgaacagaattcccctccctctctagatctccccctgctaacgaagacagaccaccaccaccagtaatgccgaccgcgaggcgcacgcgcatcccggcgttcggggagtggaaccaccaccaccacagcaacggcggcggcgcgtgggcgccggcggtcatgaccccgtccttcgacttcggccacgcaataacaacgccgcacaaagcgccgcagacgcaggggaggcggcgaggcgccgccgacggtgtcgtccacgcggccaagctggctgcggctgcggcggcggcggagcctcaccaaggccacacgcagaccacgaggcggagcaaggtggccgactccggagcctacgcgcaggccgcggcggcggcgaggaggtcctgcttcgcgctggccaagcccgtcgacgacgacctgtacggagtccctcccgacatgctctacggaaagccgccgccgccgggagcgaggaaggatgatggctggcggaggatcctgcggctgctggggtgctcgtgcttgagttgagcccgtcgtaatgaccgccggacacagccgagcattattgtcacggacaacaaggctgctggctaatcagggcgcgggctttttggcttccatcctcctgtacgtactacaagatgtctcaacttttggcgcctgctgtgatcgattgatgacgggccggcaggcaagacgtgactgacgtgccggccttgcgttgcgtgggtctgtgcgtaggtgtgacgttcgtgttgtgactgtgttcgctgctgaccgcctgtcctttgtgactgcttcaagctagtagattctaggatttagaggttctttatttatgtgtgtgcgttctcgtttgtcgctcaccctcaccgcctgtaaaaccccacctaaaatggtcgtgctatccgacaaataggcttttcacatcgtactactatttagcatcggacagtactgacacaagtatatataataagaccctgttcatgtacc

SEQ ID NO: 99437 - DNA, 1681 bp, Zea Mays
gctacttgtttcctcttcccagtattgtgattccttccattcgtgaacagaattcccctccctctctagatctccccctgctaacgaaggtcagtcatgagccctattcgcgctgctgctgctgcacgtaggcggccggcattattattgcctttccggccaccactttgcactgctgtgtttccagtccagctgatgatatacacgatgcttcttcagacagaccaccaccaccagtaatgccgaccgcgaggcgcacgcgcatcccggcgttcggggagtggaaccaccaccaccacagcaacggcggcggcgcgtgggcgccggcggtcatgaccccgtccttcgacttcggccacgcaataacaacgccgcacaaagcgccgcagacggtatgtacgtacgtacgcgcgcgcgttatccaatccaaagcccacaacgatgcgtcggcttgctgcttatcgacgagacgaatgggtagtaatgctcgtcgcgtcgcgcgtgcgtgcgtgcagcaggggaggcggcgaggcgccgccgacggtgtcgtccacgcggccaagctggctgcggctgcggcggcggcggagcctcaccaaggccacacgcagaccacgaggcggagcaaggtggccgactccggagcctacgcgcaggccgcggcggcggcgaggaggtcctgcttcgcgctggccaagcccgtcgacgacgacctgtacggagtccctcccgacatgctctacggaaagccgccgccgccgggagcgagggtacgtagtacgtacgcacttacgctcattactagccatgatttatttgctgtccattttgcatcgggaaaaaacgaaaaaaaatgcatgctaccttaatgtaaaatcccattaattaaagagtttattcagagagctttacgtgctcttagcgatcgaacgagccattcaatcccaaatatccattatttagaacacataaaacccaatcccaaatgtccattatttagaatacctaaaacccacgttaaccgcatggagtgcaaaattttgtcaccaggatttgcagtcatatatgataggtatgtacagtgaagagacactaaaacgattctctaggcactagaatacatgacgaatttgtagagcaagaagtgaaacgtctattgctagagatgttccaccaatttttttttacaaatgtactctttaaacacttcaaaagactctatagtattaaacatcaatgtgcatgcagtgttcttcattactcgtaccggggccttaacgttcacgtgatgattttaacgtccacgaccgcattgcagaaggatgatggctggcggaggatcctgcggctgctggggtgctcgtgcttgagttgagcccgtcgtaatgaccgccggacacagccgagcattattgtcacggacaacaaggctgctggctaatcagggcgcgggctttttggcttccatcctcctgtacgtactacaagatgtctcaacttttggcgcctgctgtgatcgattgatgacgggccggcaggcaagacgtgactgacgtgccggccttgcgttgcgtgggtctgtgcgtaggtgtgacgttcgtgttgtgactgtgttcgctgctgaccgcctgtcctttgtgactgcttcaagctagtagattctaggatttagaggttcttt

SEQ ID NO: 99438 - DNA, 573 bp, Zea Mays
atgggaccgccgcagaggcagcggccggagcaggcgcggccggcgggcagcgcgtgcgtgtgggtggtggtcgtggtcctgctcctcgccgtgctggccggcggcgggtgcctggcgctctacgtgacgctgccgccgtccgaggtgccgcagtggctgccggccgccgggctggcgctcgtcgcgctgccgtgggcgttctggatcgccacgtgcgcgtaccgctgctgccgctcggcggacgcggcggcggcggctccagcggtggccaacgtggtggagcggcggccgtcgtcgtcgagggcggcgggcgccgccttggcagcggcgcccgtgccgggcagcaagagcctcaagagcgcgcgcagcacgaggcacgccaacggcggcgggtcgcccgcctccgggtcccccaccgccagcagcgccgcccgccgggtgcgattcggagacaccacggtgctcggggaggacctcgccgcgccggagtcggatgacgacggcggctcgtcgtcggtgcactcgaacgagagcgaggcgcctctcgcctacaacatgctatcctcctcgtga

SEQ ID NO: 99439 - DNA, 3544 bp, Zea Mays
cccaaaccttttcacccctcgtcgtcctcggctaatccgccgcgcctccgatactcccaaggcagcgctctcctcgtgctgcgaaagcagcagcagcaagcgagtagtcaccaccatctcaaatcttcccctccacgctccctttcccttcctctacctcccctaccccgccgccccgcaatggccggcctcctccacctccagtccacgcttctaccctcggcatccgctctccgccgccgcgcgggcgcgccggtgccctgttcgtcccgccgccgatgccgggtcgaggccaagatccgggagatcttcatgccggcgctcagctccaccatgaccgagggcaagattgtctcctggacggccgccgagggcgaccgcctctccaagggcgaccccgtcgtcgtcgtcgagtccgacaaggctgacatggacgtcgagaccttccacgacggcttcctcgccgccgtcctcgtgcccgcgggcgagtcagcgcccgtcggctccgccatcgcgctgcttgccgagtccgaggaggagatcccggtcgcgcagtcacaggcggcctccttctcctccagctccccctcgcctccgcctccgcaagaaactgctcaagaagcatccccttcgccgccgccacctcctccctcggcgccggtggcagtctctgctcccgcgctaccttcgccagcaacacaaggcgggggacgtgttgttgcttcaccctacgccaagaagctcgccaaggacctcggcgttgatcttttctctgtcacggggtcaggccccggcgggcgaattgtagccaaggatgtcgaggctgcccttgctgcgcccaagaaggccgcaccagtgactgctgcacggccggatgtgccattggggtcgacagtaccattcacgacaatgcagggtgctgtcagcaagaacatggtggagagtcttgctgtcccgaccttcagggttgggtacaccatcacgactgatgccctcgatcagctctacaaaaaaattaagtcaaagggggttacaatgacagcactgttggctaaggcgacggcaatggctctggttcagcatcctgtggtgaactgcagctgcagggatggaaagagcttcacatacaacaaaagtataaacattgctgtggcagtggccatagatggtgggttgattacaccggttcttcaagatgctgataagcttgacatttattcattgtcaaggaaatggaaggagttggttgataaggcgcgagcaaagcagctgcagccccatgagtacaactctggcacctttactctttcgaatcttggtatgtttggagttgataggttcgatgcaatactgccacctggaactggcgcaatcatggccgtcggtgcatcagaaccgacagttgttggtacaaaagacggtagaatcgggatcaagagccaaatgcaggtaaatgttaccgctgatcatcgggttatttatggagctgaccttgccgcttttctgcaaacacttgctaagataattgaggatcccaaggatcttacattttaaaagttcctgagtgattgtttttccttgagccaatcacaattgggtgcttctcacccatagtagatttgtagtatgtcttaatgtgaattagttgatttaagctatcatcaatgtcagcatcaggtaactttacctgctggttggttatcttaccatcattggtttgtttttcaataaattcttttcttttatctttcttcttcattcagataggtgggtaaggatgtgtgtattcatcattttacctgagttttcatggacatttgattttgtttagcttaacaatgtaccatgaccttgggtacaaggaatgaaatgcaccttgtacttgtaccaccctgtggttgatttcacatgcctgtcaaacagaaatacggttgatgcccttgcaagtgtgtcaacgtgaaatcttcagggagatctgtaaaaaacgggccacacatctgtttgttttacatgtgaaggagacggaccatgattcgtcccaaccactcccatgatgccaaggctgtagagtatcggatatcctggcctgttgtacattcctgggacagctcaagatcgcgtcctccattttttccgcagaaagcattcctgtttcagctcgttgtactcttcgtcttctctacttgaaggatcctattaggtggcatgtcctgcgtcttgcttgctggaatgggccatcctgatatcctgtccgccattgtagtggaagcgaagcaagccacaataataaaacccctccagcagctcttgttcttgccgcctctgtcgtggccttcagcagcagcggcatggcgtcggaccgtggagaggtcgacacctcccgtgccttccggtccgtcaaggaggcggtcgctgtgttcggagagcgcatccttgtcagggaagcccagttgagggcaaacggtggtgcgcatggcggctgtcgtgttggcaaggagttcaactccagggtgaatgctgtcgccattgccgcctctgacgtgaagctgcctaaccggagcgacggcgtcatggaaagccacagcaactccaagccaagtgttgtcaatgtcacctgcaatgccaaggaagagcacagtagttgcagcagcaagcctgctgctccaagcctaccgccggtgcccgtgccaaggccgccggttgcagaagacgtgccgatgtacctggtcccctcctcgccgccgttcttcgcgtcgtcgccttcgctggccaacgacgacggcgacgacgacgagcaagagcgcaaggcagccgacctcgtcgtgattagcgccatcaggaggctggaggacgaggcggccaggacgaggcaggaggtggcgcggctcaagaggaggctggccgagatggagctgtccatggcgaccctgaacgcgaagctccaccgcgcgctctccaaggtggcgcacatggaggcggacaacgcggcggcggcgcgcgccagcatcggccgcgacatggcgctggcggtctcggccgagcgcccgcgccgcgcccccaccagcaggccgcagctgggccacctgctgaggctgggcgtgggcgagcaggccgacagggaggcgcaggcgcttgtgtccggctccggctccggcggcggctgggcggtggcgccagcgaggaggaaggcgcagaagcagaagcccatcgtgccgctggttgttccgctcgttaatggcgtgctcttctccaagaagaggaggacgaaggacaaggagagcgtgtacatgaaggagctttacagcttgcttaggctgagttgatcaaatttaaggctgccatgctaaatctgtggatgtacttgtgcacaatcgttcataatcatgtgcacggacgttatctacctacacactaatttttactatttgtttctatagtttctgtgactacatgtggatcgtgcagtgcgaggctgcaatttgtacattaataatgtaaatctagcattagtgcttatttttttaatgttgaaatcaacaactta

SEQ ID NO: 99440 - DNA, 1617 bp, Zea Mays
ctcaaatcttcccctccacgctccctttcccttcctctacctcccctaccccgccgccccgcaatggccggcctcctccacctccagtccacgcttctaccctcggcatccgctctccgccatcgcgctgcttgccgagtccgaggaggagatcccggtcgcgcagtcacaggcggcctccttctcctccagctccccctcgcctccgcctccgcaagaaactgctcaagaagcatccccttcgccgccgccacctcctccctcggcgccggtggcagtctctgctcccgcgctaccttcgccagcaacacaaggcgggggacgtgttgttgcttcaccctacgccaagaagctcgccaaggacctcggcgttgatcttttctctgtcacggggtcaggccccggcgggcgaattgtagccaaggatgtcgaggctgcccttgctgcgcccaagaaggccgcaccagtgactgctgcacggccggatgtgccattggggtcgacagtaccattcacgacaatgcagggtgctgtcagcaagaacatggtggagagtcttgctgtcccgaccttcagggttgggtacaccatcacgactgatgccctcgatcagctctacaaaaaaattaagtcaaagggggttacaatgacagcactgttggctaaggcgacggcaatggctctggttcagcatcctgtggtgaactgcagctgcagggatggaaagagcttcacatacaacaaaagtataaacattgctgtggcagtggccatagatggtgggttgattacaccggttcttcaagatgctgataagcttgacatttattcattgtcaaggaaatggaaggagttggttgataaggcgcgagcaaagcagctgcagccccatgagtacaactctggcacctttactctttcgaatcttggtatgtttggagttgataggttcgatgcaatactgccacctggaactggcgcaatcatggccgtcggtgcatcagaaccgacagttgttggtacaaaagacggtagaatcgggatcaagagccaaatgcaggtaaatgttaccgctgatcatcgggttatttatggagctgaccttgccgcttttctgcaaacacttgctaagataattgaggatcccaaggatcttacattttaaaagttcctgagtgattgtttttccttgagccaatcacaattgggtgcttctcacccatagtagatttgtagtatgtcttaatgtgaattagttgatttaagctatcatcaatgtcagcatcaggtaactttacctgctggttggttatcttaccatcattggtttgtttttcaataaattcttttcttttatctttcttcttcattcagataggtgggtaaggatgtgtgtattcatcattttacctgagttttcatggacatttgattttgtttagcttaacaatgtaccatgaccttgggtacaaggaatgaaatgcaccttgtacttgtaccaccctgtggttgatttcacatgcctgtcaaacagaaatacggttgatgcccttgcaagtgtgtcaacgtgaaatcttcagggagatctgtaaaaaacgggccacacatctgtttgtt

SEQ ID NO: 99441 - DNA, 1316 bp, Zea Mays
ttcttcttcttccttcccttcctactcgagccggtggaggtcagcggggattgaggaggaggaggggaagaggcgaggcaggaaatcaagcgggaatccaagaaccgtaaggatgaccgtggtggagaggagatgaaggattaccagctggagaatctgtaccacaaataatcagtggtcgcctcataactatgaacagcatccacacctctgcagttgacttcgtgaaggcaatagaagcagtctccaaccatcagaacatctttttgaagaccagattctgcacctactacaaggctgtaatgcctaatggctcaacatactctgtaaaaaaacttaattctagtgacaagattttccaaattgggagccaggagaagttttctcatgaaattgaggttctagggaaactgaccaattcgaatgtcatggttccattggcctacatcttgactgcagattgtgcctacctaatctatgagcatgcatacaatggcactgtatctgatttgctacatggtggaaaatcagaagttatagactggccgtcacgatatagcgttgctttgggggtggcccaagggctgacatttcttcatgggtgcactcagccggttttgcttcttgatctgtcaacaaggaccatccacttgaagtcaaaaaatgagcctcagattggagatatcgagctttacaagattattgacccttccaggagtacgggaagcttttcaaccattgctggaacagttggttatattccaccagaatatgcatacactatgaggctgacgatggctggcaacgtctatagctttggagtcattttgcttgagctgctgacaggaaaaaaatcggtcagtaatggcactgagttagccaagtgggctctcagtctttcaggcaggcctgatgaaagggagcagatccttgacaccagggtctcaggaacttcaattgctgttcatagccagatgctgtcggtcctgaacatcgctctctcttgtgttgcattctctccggacgctcggccaaagatgcgcaacgtcttgaggatgctcttcaatgcaaagtgaatcagaagcagcctgcaatcagatcatagataaattttgggtgcagttccagcctcgcgtagtttatggatgtcagtgataagtatacaggctgcccttatatagttccataggagatagaaccctagcttatagtagatcattatatgttttatgaattgtgtaattaggtatctgctttgcagtgagtggctatatggtttataagctgtcaaatgtagaggtgcttataagcaaagt

SEQ ID NO: 99442 - DNA, 4197 bp, Zea Mays
atggcggcatacctgacgacgtttgagaggaagagggcgaggaccttggcgacggagccgggtagtaggttgacaatgtacttggcgcagagactagagacggcgcgaaggagagctcgccctcccctccgtcgcgggcaccacaggcaaactgctgcagtgacgacttcctggcgatggcttcctctgtcgctcggagccgcagccgccgcgcgctcggcgcatgtcctcggccgggctggtgtgaggaggtccaggatggtggccgggttccgtcgcacgatcttgttcccaatgcccaggtccccgctgccgccaacgagaggcgcggggccgagcggcgccaacaagtatggcgcctaccgcgcgcggttggcaagcctgccgtgccggttccacctgctagtgctccagcttgacgacgatgtcgccgacctgcgggagctggtaggccgcctggcgtcgaaggcctccgcggaggccatggccgaggcttatgaagactattcttcggaaagggctgaactattgttcaaaacctgccaagttgtcctaaaattctatccttgcgggccccatggtccagcctttgatggaggtttttcaggctttcagctcccaatagcttcccttttccttttcgtcgctcactggctgtctcgctctcacacagaagcagcaggcggtgttgtacgtcatcggtcagtcaacgctggaccaacccaaacccaagagaaggggcaccagaaacacctcaacaaaatcgtgagcagccttggggtctccctgaagtctgaaccacactcaacaaaacccatggtagtttcagaacaaacaaacaaacatggaagccatgggcgagcacacccagcgctcaaaatcctagagagggggaggaacatctcttcttcttcttccttcccttcctactcgagccggtggaggtcagcggggattgaggaggaggaggggaagaggcgaggcaggaaatcaagcgggaatccaagaaccgtaaggatgaccgtggtggagaggaggtacggtccctgtaccagccatggttccttcctcctacggctgctgctgctgccgttcttcttcttcctctgcttcatcgatgtgccgccggccggcgccgccgccaccacacagtcgcctccactagacaacacgcaaaaggctatcatgaacgatgttgcgagtctggtgaactccggatccgccaacaccaggtggaacaccgcggagtcgaatccgtgcaactgggaaggaatcacctgcacaagtaacacttcttcctcggccgtgactcggatcgccttgtcaaactatggcctcgccaactcctccatctttgctcccctctgccgtcttggcactctgcggtaccttgacctttccagaaattttttagcagatttgtccgccccgttcttcgcctcttcttcttcttcttgctccatgaaggaagggctgcagtcacttaacctgagcaccaaccggctggctagcccgctcggtgagttggccggcttcccccagctacaagttcttgacctgtccttcaattcctttgccagcagaaatctgagtgcggaattgggttatttccccaagttaaggagcttcaacactagttccaatgacttgaatggtgatgttcctaccagtatggtcggctctttggaggagctggtattgtctagtaataatttgagtggtccaattcctctgcgtttgtttgaatatgaaaatcttactctgctagatctcagccagaataatctgaccggtgctattccagataacttcacgagtctctccaagcttgagactttgctcctttctggcaacaaattgattggggaaataccatcgagtctgtctaatgtgacaacactgtctaggtttgcagctaaccagaacggtttaactggacccatccatagctggattaccaagcatatagggatgttggatttgagttacaacaagctgaatgggacaatcccctcagacttcctctcgcatcaggggttgcagagtgttgatcttaccagcaacttgcttaacggagccattcctgccaccttgtctcaaagcctctaccgcttgaggcttggtgggaaccagcttggtgagaacatcccagggtcagtttgtgataccatgggcttgacttatcttgagttggatgacaaccaattgacaggagttataccttcagagcttagcaaatgcaagaacttgacactgttgaatctggcatcaaatcgtttgcatggtttagtgcccagtattaccggtgaacttgacaaactggtagttctgaagcttcaaaataacaccctcactggacaggttccaagtacattttctgaattaaagagcctaatcacattgaatctcagtaagaattcactcagtggagcgataccaagcggaattttcgagttgccaaagctttcgaacttgtatttgcagggtaaccagtttagcggttttattccgttctccatcagttcatcaaaggatctaatcgagctcaacctgggtgataatgctctgactggtaacatcccaaccatgccaaccactgtgaccacatctcttctgaatcttagtcataaccttcttgacgggtctattccttcaaacatcaactctttaggtgaactagagattcttgatctttctcacaatgccctgtctggtgctgtgccatcttcactatggagcctgcaaagcctgacactgctggacctttcctataataatctgtctgggtctattcctagattcggtccaagtcaaactgtagatattgtcggaaatcctggtcttgtaattgtaaatggtacaggaaacaataatgacactcctactactggtaagaaaaagaggcactatttggtcgtcatcatcttcaccattgccggtactcttgttggattatgtgtgcttgctcttattattgtgatgtcattatcaaagagagtgtatcgtgttgaagatgaaggattaccagctggagaatctgtaccacaaataatcagtggtcgcctcataactatgaacagcatccacacctctgcagttgacttcgtgaaggcaatagaagcagtctccaaccatcagaacatctttttgaagaccagattctgcacctactacaaggctgtaatgcctaatggctcaacatactctgtaaaaaaacttaattctagtgacaagattttccaaattgggagccaggagaagttttctcatgaaattgaggttctagggaaactgaccaattcgaatgtcatggttccattggcctacatcttgactgcagattgtgcctacctaatctatgagcatgcatacaatggcactgtatctgatttgctacatggtggaaaatcagaagttatagactggccgtcacgatatagcgttgctttgggggtggcccaagggctgacatttcttcatgggtgcactcagccggttttgcttcttgatctgtcaacaaggaccatccacttgaagtcaaaaaatgagcctcagattggagatatcgagctttacaagattattgacccttccaggagtacgggaagcttttcaaccattgctggaacagttggttatattccaccagaatatgcatacactatgaggctgacgatggctggcaacgtctatagctttggagtcattttgcttgagctgctgacaggaaaaaaatcggtcagtaatggcactgagttagccaagtgggctctcagtctttcaggcaggcctgatgaaagggagcagatccttgacaccagggtctcaggaacttcaattgctgttcatagccagatgctgtcggtcctgaacatcgctctctcttgtgttgcattctctccggacgctcggccaaagatgcgcaacgtcttgaggatgctcttcaatgcaaagtgaatcagaagcagcctgcaatcagatcatagataaattttgggtgcagttccagcctcgcgtagtttatggatgtcagtgataagtatacaggctgcccttatatagttccataggagatagaaccctagcttatagtagatcattatatgttttatgaattgtgtaattaggtatctgctttgcagtgagtggctatatggtttataagctgtcaaatgtagaggtgcttataagcaaagt

SEQ ID NO: 99443 - DNA, 126 bp, Zea Mays
atggcgaagaacgacgctgccaggatcgccaagaagcgcagaaccagggacgaggaggcgccttcattttcggtgggggggctcctctccaattgtgtctgtggtctcaagtcgcccttcgtgtag

SEQ ID NO: 99444 - DNA, 1893 bp, Zea Mays
atggcgcacaggaggtactgtccctgcactctcagctgcttcttagtgctgctagtgccacacctcttcctgtcctcgtctcaccaggagtcggtggccgccatggatgtgccgtctccgtcttccctaccaccggacaagcagcaggtggccatcatgatgaatctctcaagcgctgtgggtagcagttgggcctcgggcacagacatgtgtaactggactggagtcgcctgctcacgctctacgtccggttcttacatggtcgtgaccaacatcactttgtccggctacggcatgtccgacgcctccgtcttctcccccttatgccttcttgacaccttgctgtccctcgatctctcgatgaatttcttcaccgatctaggggacgaattatccgccgcttcttgccgcatgatgaaggaagggctggtgtcgctcaatctgagccacaaccatctcgacggttctatcccttcagatcttggatcctcaaaagacctagcgatccttgatctttcctacaacaacctgtccggtgcggttccaccttcgctatggaccctccagaacttgacgcagctggtgctttcttacaacaatctctccgggctcgttcctagcagcaggctccgccaaaatctgcatgtcgatatagctgggaatccttaccttgtagtaactgggactgggacaggaggcaagaaccacgctcgtaagataacggcacacatcgttgtggtcgccatctctgctgccgccagtgctcttgtcggactatgcttcgtgctcctctgtgtcagtgctatgatcccgtctccaaacagaacgtaccacgtcgacaacgtggtggtaccaccttgggaggacgacgactctcagaccaccaatggcggcctcacagcgctgtgctgctgctggcgcacctctttccaagccctcaacttcgaggctgccgacatactccggggactgagagaagagaacctcgtcggcagcggcggctcagggcacgtctaccgcgtcccgtacaagagccggcacgacaggcgcgtggtcggggtggtggccgtgaagcagatcccggtcttcgggacgacgtcgccggacgagctgttcgagtcggaggcgcgcatcctgtgcagcgtccggcacaacaacatcgtcaagctgctgtgctgcctctcatgcccggagtcgaagctcctcgtgtacgactacatggacaacggcagcctggacaggtggctgcacgaagactacgtcctccgcgcccggcacccgacggcgagggcgcggcccgtgcggcgcgtgccgcttgactggccgacgaggctcgtggcggctgtcggggcggcgcaggggctgtgctacatgcaccaccactgctcgccccccatcatccaccgggacgtcaagaccagcaacatcctgctggacgcggagttccggggcaaggtggcggactttgggctggctaggatgctgatgcaggcgggggagcccaacaccatgacctgggtggtcggatcgttcggctacatggctcccgagtatgcttacaccaggagggtgaacgagaaggtggatgtcttcggcttcggcgtggtgctcttggagctcacgaccgacaggaacgccaacgacggcggcgaccatggttccctggcggattgggcggggcatcagtaccggtcaggggcgagcatcgctaccgacatctgcgtcgggtacgcggggtacgctgacgagatcgagaccgtgttcaggctgggcgtgaaatgcacggcgagctcgccgtcctcgcgccctactatggcggaggcgctgcagattttgctcagatgcagcgagcagacgctaaggaaaagcaggctggagtgtggcacggagtag

SEQ ID NO: 99445 - DNA, 494 bp, Zea Mays
taatcttacagagtagatatatcgtatattaaatacaaactaaactaggccattattcacagctcgatccatcaacatgccctggctccactccaccctacctaccgtctcctactctcctccaacacacagcaggtcgaccagtcgtcgtccggccgtcagtactcagcagcatacatgccgccggtgatggagccgaacacaatgtcttccagatcgaacgtgtcgtcgtaccccaagtgcgccacgcccgagaggccgccgccgccgaaccagtgctgctgctgctgctgcagctggaggccagacgtcacgtcgccctggtccgggccgggcgtggcggtccgcaccgcctcggccgtggcagcggagctccccgccggggtgaggctgctaagcacctcctccagctccagctcctgctcccgctcgccgccgccgccgccgccctccagctgcctcgggggctccgcaggcagcacggcgcccttgtg

SEQ ID NO: 99446 - DNA, 1551 bp, Zea Mays
ggaaaaaatttaggaaatgtgaacattctcatccagccgtaccgtatacggcatccccgcctctgccaccaccggtccagtccctgatggacacgccgccgccctctctgccgccgtccgccctcctctggccggacctcctcgcgggcgcggcgtcctccacctgccgcctcgtcgccgcgcattcccgtcacttcctggccctatcctctctcctccttctcccgctcgccctcctcctactcgccctcccctgcccgttgttctctgcctccgcctcctccgccgcctcccctcccgtgcatctccgggtcccgcaggatccgtcgaggtacccactacccatcccgctgccgctgctcgcccttgccgcggcgctcctttacctcgccgccttcgccgccgccgcggccagcgcgcacgcagggttcttcggtcgccccgtccggctcctcgcctcgctccgctcagtgccagcctcactcctccgcctcatcctgaccgccatcctggcctccccgctcgcactccttccgctcctcccgctccccgctgcgctcggcgccgcgctgctcgtcctcggcttcatccttttgtccccgttctggtccctcgctggcgccgctgccgtggtcgaatcggccacaggcttcacgccgctccggcggagctgccagctcctctctaccgcccgcctcgcagcgctctcctcgttcctggtattcgccgccgggattggggtcacgctctggggcttcggcggtgtggctgccgagaggtacgacgctggggctgggtgggctgggatggcgcctgtggtggtcaaggcggtggctggcacagcgctgctggccgtgatgatgctgtacgggatggtggccaacgttgtgctctacatgcactgccgcgcgatgcacggagagctcacaggggagatctacaatgagttcgccaacatgtatgtcttcctgccctatgacgatggaaaagatcgccatgttgtctcagtggtcacggtgtggccatgattggtttcagtggaagcaatcaaggttttggtctggtgtgcgtttcagttctgtgcataagtgtgtgtaattgtgatggaatgttcagaacatgtagactactattagtgtaaggaatccatgcgatggaatgttcagaacatgtaggctactattagtgcaagaaatccatgcttttggttttgtactacaataaaaaaaggatttgagtatcatatactccctccttttttatttgacgtttttagttcaaaaatgaactatccggattccggcgtcaaatatttaagaatggagttagtaccactgaagatgggaattgaatgtaaactgggcatctgttgtgtcataggtttcattcagcgctgcggtattaagaatacatcagaggttagaaaagtaattgtcctgcatatcataatactgtacttaggattgcttacaacaaaacttagaatgcatttggctccagttgcaaactgtcctgttgaaatagtagatataagagtaatcaactaaggtg

SEQ ID NO: 99447 - DNA, 2467 bp, Zea Mays
cctccagctccccgaaactttttgcatctcctccaccaccaccgccccctccccttcgccccgacgaacacggcaccacgagccccgcacctcacacagatttagcctacctctcccaccgcggctacattcctcaccccaccctgtcggtacgcgttccggtcgtccccatcacccctctggcctctgcgtgttgatttcttcgtttgtgcttggctgcataaacttttaaaaaaatgaaggcaaatatgggcacaaaagctcgtccactatctgttgacgcagacaaaggagagattggcgaaatagatacaagggctccttttgaatctgttaaagctgcagtgagtttatttggtgaagtcaaggtttcatctgacatatcagctgcaagaaagcctaaggttcctcaagcagagagggttttagccaaggagacagagctgcacttagcccagaaagagttgaataaatacaaggaacagctgaataatgctgagacaacgaaagtgcaggctctctctgagctagagaaagctaaaaaaactgtcgaggagctaacaaccaagctggatgtggttaacaagtccaaacagttggccattcaggcaacagaggatgcaaagactcgaaccaagcagcttgaaggtggcagcacaaatgaatgtctaggaacagatggtcctctgaggcaggaactcgaaagtgcaagggagcagcatgctatcgctttggcagaacttgatgcagcaaaacaggagcttagaaagctcaagaaggattttgaaacatctttggatatgaggttgtgtgctgcccagcaggaagacgaatcactccatacaactgaagccaacaaagaaaaagctaaccaacttcttggtgagattgcggaaattcaagaatcgcttatgcatgttaaggcagctacggtgcaagcacacgaagaagaggcacaaatccttgctgagaaggatgttgctagggccacgtataaacaagctttggaagaaacacagaagaaattgttgtctttgaggaatgattttgaccctgctgcttatgatagtctgaaagaaaaactagaacaaaccaattctgaggttgcatctatgcaaaaaaagatagaagatgctcgggctcaggatttagagtctgttgctgttgtcagcacagagttggatgatgctaaggaaatgttgcaaaaagtagcagaggaggaaagttctcttcgaagtttggtggaatcactgaaagtggaattggaagctgtaaaacaggagcacaaccagctcaaagagaaagacacagaaactgaatccattgtcggagatttacatgtcaagcttcagaaatgtaaatctgtgctggaggctgctgtggctgctgaatcaaaagctacgtcagcttctgatgacctgatgctggcccttcagcaactgtccgcggagtcaaacaatgcattgcaagaagctgagataatgcagaagagtgcggcggagctaagagaggaagccaaaaaggctcgggctgaactagcagaagccgaacaaaagttgcagttgacgttaaaggaagcagaagaggctaaagcagctgaagcaatggcccttgaccggatcaagcagctctcggacagagcaagtgccgctagagcatcaacttcagagtccggagcaaatatcgcaatttcaaaagaggagttcgaatctctaagccgaaaggtcgaggagtcagagaagttgagtgagatgaaagtcgctgctgccatggctcaagtggaagccatcagagccagcgagaacgaggcgatcaagaaactagaagctgctcgcaaggagatggaggacatggagttggcaacagaagaggccctaaagagggcagagatggccgaggcagccaaaaaggccgtggaaggtgagctcaagagatggcacgagaaagaacagaagaaaaccgcagaggccgcacagccttctgcgggggcagaagaactgggaagtgctgcgtcgccccctgtacgtcagacttctgccggaaaagcttccgagaagaacgaggggcatcagaggagcagtaaagcgctgctgaagaggagcttcatgctgccaaacatcgccagcatgttccataagaagaaaagccatccttccagttctccctcgcaccttcctggggaaaaatctgtgtgatctatccgaatccgaagctcctgtttgcgaactgaaatttccaaacttgaacgcttgcttttacactatattctgtataaaaatccgtctactcccttgcgccttgtagtaaatttcggacataattttaagattgcttgtaccccatatttttctgcactttcaggacttccggatgagtgcattgtacttcagcaacaacagtatctaagtcatgttcttgcaagcttccagaatagtggaagcatcacacatgctgcgaattgcattca

SEQ ID NO: 99448 - DNA, 490 bp, Zea Mays
ctcccaccgcggctacattcctcaccccaccctgtcggctgcataaacttttaaaaaaatgaaggcaaatatgggcacgagaaagaacagaagaaaaccgcagaggccgcacagccttctgcgggggcagaagaactgggaagtgctgcgtcgccccctgtacgtcagacttctgccggaaaagcttccgagaagaacgaggggcatcagaggagcagtaaagcgctgctgaagaggagcttcatgctgccaaacatcgccagcatgttccataagaagaaaagccatccttccagttctccctcgcaccttcctggggaaaaatctgtgtgatctatccgaatccgaagctcctgtttgcgaactgaaatttccaaacttgaacgcttgcttttacactatattctgtataaaaatccgtctactcccttgcgccttgtagtaaatttcggacataattttaagattgcttgtaccccatatttttctg

SEQ ID NO: 99449 - DNA, 3272 bp, Zea Mays
gagcgcaacgccgccaatcattccttcctctgccttcctctctccctccccctcccggcgccatctcgacgctcggccccccgcgggcgggatccgtcgccacagatccgctgcctgacctgaccgcccctcatgctcgggtagcgcttttcagtttcccccgttccccgtgggccactcgacccgccgacggagcggaagggcggccccggccgtgaccgcggcgcgactcgcgaccctcccagtcccagaagcggcgtgcggcgaccgggaccggctgctggtggtgaattcgcgccggcgaactgaattcaagcggcgaatcccctcctctggtcctgtctcgagccctcggcgtccgcgcctcctccgtctcgccgccgttctcgacgcccgccgatccaacaccgggtctgcccaacagcccaagtgtttcactagtgatggcagaagtccaggatggtcattatgattcaatgtcacaggccactgatagcttgcgtgttgaacctatatatgagtcgttcctatgcccgcttaccaaacaggttatgcgggatcctgtttctattgacagtggtgttacgtttgaacgcaatgccattttgaattatttcaatgaatgtcttagcagtggaaggaggcttgtctgccctgtaactaagatggagctcagcaacactgagttaaatccaagcatagctctgaggaacactattgatgaatggatgaatcgcaacgaggcggccaaacttgacgtcgctcgtaagtcattgacttctgacagcacagaaagtgatatcctacaagcactccagtatgttgatgagatatgtcagagaagtcgatctaacaggcaggttgtgagaagagatgggttgataatcatgattgctgacttgttgaagaatagcagtacgaaagtacgccaagcggcactagggactctttgctccattgcaaaagatgacaatgaaaataaggttgagattgccgctggagacaatattcgcacaattgtaaagttcttaaatcatgggcagactcaggaaaaggagcaagcggtgtcactgttgtttgaactttcagaaaataaggctctttcagaaagaattggcagtgtttctggagctattcttatacttgttggtttgtcaagcagtaaagtagaaaacttgctcattgttgacagagctgagaagacattggaaaatttagagagctgtgaaaaaaatgttagacagatggctgaaaatggacgattgcaacccctcctgaggctgcttcttgatggttcacctggcatgcaattacctatggctgcataccttggagagcttgttctaagcaatgatgttaaggtacttgtggcacaaaaggctggctccacactagtcaatatcatgaaaaaagggaatagagaggccagagaagcagctttgaaggcattgaaccaaatttcatcttatgatgttagtgcaaagatattaattgaagccggtattcttccgcctctcatcacagacctctttactgttggcagtaatcagcttccaatgagattgaaggaggtctcagcgaccattcttgcaaatgttgtggcatcgggtgcacgttttgagtccattccacttgatcataataggcagaccttggtgtctgaagacattgtacacaatctgcttcatctcataagcaacactggacctgcaattgagtgtaagttgctccaggttttcgttggtctaactgactcttcgacatctgtacaaaatatagttgatgctatcaaaagttcaggtgctattgtcagtttaattcagtttgttgaagcacctcaaagggaagtacgcatgaattccatcaagctcttgaataacatatcaccttatatgggtcaagaacttgctgatgcttttcgtggaaacttcagtcaactaagcagcttggtcaaggtaattgtcgataacaatggtatttctgaagagcaagcagctgctgctggccttgtagctgatcttcccatgggggactcagtcctcaccagacgtcttcttcaagatggggcattcgcagcaatcatttcaaaagttttaagaatccgacaaggggagattcgtggggggcgttttgttaacccattcctcgaaggtctggttagaatagtctcccggatcacatttgtcttggatgatgatccggatatcattgctgttgctcgtgattacaatcttgcttcactcttcactgatctgcttcagatgaatgggcttgacgtagtccagattgtctctgctgtttcactagagaaactctcgcagcagtcaaaacatcttacgaagatactgcctgctcccagcccagggctgtgcttttcaatatttccatgcctcagccagaagactgtagcaactggggtctgtagagttcactgtgggatttgttccgcaagggagagcttctgtctcttggaggggaaggcagtggagaagttagttgcctgcttggataataataacgagaaagtagtcgaagctgctctagcagcgctgtccactttactggaggatggagtggacattgaacaaggtgtcatggtgctgtgtgatgcagaaggaatcaacccgatactcgcggtattgtgcgagaacagaaacgaggcactgcgccagagagcggtgtgggcagtggagagaatcctgaggacggacgaaatagcgtatgagatatctggaaaccagaatgttggtacagccttggtggaggcattcaggcatggcgactctaggacaagacaagttgcagagcgagcattgaagcatgtagataagttgcccaatttctctgggatattttctaagatgggagcacaatgaccacgttccatggaagtactcgtgttctatttgacatgaggcaggcgcagatgaacacttgtgttcccagcaggccttcattggttttgctgactcgcactccagctagatgttgtagcgatctgattggtggaagaagaattaagtattgcacgtgttgtatagtgtgtatttgtacctgtagacttgtctgtactttcgagattggtcagattcatagaataggttgctatccctgttgtgtggagacaatacataatgcataaccgccagcactgggtggaaaaaaaagggaagaaatgtgaagtcgttgcgtcagatatgacatggttttctggtgtatgtcttaatgtctacagaggcaaagtgcaaaggactgtttggttcgctgtctaa

SEQ ID NO: 99450 - DNA, 1129 bp, Zea Mays
gcgcgcgagattgaccaaaaattcacccatctgtagctgctccccgaacccctacccacaccgctgccgccaccgctgccgacgtaatcgcacggccgctccccgacccacacctcgcacaatgtgcgccccgccgccgccgcctcccctctagatcctcaatgcaccgctaggtcccgtccacagccgctcactgccgccacctctaacgcgcctaggaccatcgccacctccacatctagcttctggagtcgagatccatggtcgactccactggaggagcccggatctggcctaccgggcacggtctcgagctttaggcatctcagcaggcagcggtgtactccgtcatcgcccaatggagcaaccaaccaagcaagaactctatccatgctcgtgtcgaggcgttgtctctactctctactccatcccgcgtctgcgcgtcgtcctctacggatccgtccaccgctgcgccagcacgatgtgaatcgagacacgcctccgcctatgcgtccaagacacgcctctgcatctgcgtccgtgcactggctacgcggcatcgattacggagtggagtctacctactcgcaattctctacatatgaggacttgaggatttagagcaagacctaaagtatacccttgaagggacacactttatgattccatggtttgaatgaccaatcatttatgatgtccgtgctcgactgaatctcgtggagagtacttctgggagcctagaccttcagatgggtgttctggacaatgaaagcttgtaccttaaaacaggaggatacaagaagctggagtggttgtctgaaggcttttgaactgcttgaagcattagtgtagctttggtgcttttgtgactgatcagctctggagcagctagagtgatgtagttgtgggcttttgaacaatacctagagtgatatgaaacattagtgatgtagttgtgggcttttgaactgcttcacgctggagtgatgtcgctgtggtgcttttgtgactgatcatctctggagcttttgtgaatgatctagctagctatctgtaaatgatctagttgtgaatgatattataattgtgatgcttttgtgaatatataattgtggtgtttttgtgttta

SEQ ID NO: 99451 - DNA, 627 bp, Zea Mays
aactgttattgcctgaactttttattttgaaacggagtggtcttattgcctgaacctgatattttgagctctgaaatatgtgattgactgtagaattatttcaagaacagactgtattgtagtaacctttttctcctggagtataattatctgtattcgaatgctcctttttatatgatgatgaattgttctacagtatctttatttgcaaatgtagcaacaatatactaatttgatgtacttttttctagggtgttctggacaatgaaagcttgtaccttaaaacaggaggatacaagaagctggagtggttgtctgaaggcttttgaactgcttgaagcattagtgtagctttggtgcttttgtgactgatcagctctggagcagctagagtgatgtagttgtgggcttttgaacaatacctagagtgatatgaaacattagtgatgtagttgtgggcttttgaactgcttcacgctggagtgatgtcgctgtggtgcttttgtgactgatcatctctggagcttttgtgaatgatctagctagctatctgtaaatgatctagttgtgaatgatattataattgtgatgcttttgtgaatatataattgtggtgtttttgtgttt

SEQ ID NO: 99452 - DNA, 1167 bp, Zea Mays
gcgcgcgagattgaccaaaaattcacccatctgtagctgctccccgaacccctacccacaccgctgccgccaccgctgccgacgtaatcgcacggccgctccccgacccacacctcgcacaatgtgcgccccgccgccgccgcctcccctctagatcctcaatgcaccgctaggtcccgtccacagccgctcactgccgccacctctaacgcgcctaggaccatcgccacctccacatctagcttctggagtcgagatccatggtcgactccactggaggagcccggatctggcctaccgggcacggtctcgagctttaggcatctcagcaggcagcggtgtactccgtcatcgcccaatggagcaaccaaccaagcaagaactctatccatgctcgtgtcgaggcgttgtctctactctctactccatcccgcgtctgcgcgtcgtcctctacggatccgtccaccgctgcgccagcacgatgtgaatcgagacacgcctccgcctatgcgtccaagacacgcctctgcatctgcgtccgtgcactggctacgcggcatcgattacggagtggaggaacatagtttgattgatattttgtttgattatggatagtctacctactcgcaattctctacatatgaggacttgaggatttagagcaagacctaaagtatacccttgaagggacacactttatgattccatggtttgaatgaccaatcatttatgatgtccgtgctcgactgaatctcgtggagagtacttctgggagcctagaccttcagatgggtgttctggacaatgaaagcttgtaccttaaaacaggaggatacaagaagctggagtggttgtctgaaggcttttgaactgcttgaagcattagtgtagctttggtgcttttgtgactgatcagctctggagcagctagagtgatgtagttgtgggcttttgaacaatacctagagtgatatgaaacattagtgatgtagttgtgggcttttgaactgcttcacgctggagtgatgtcgctgtggtgcttttgtgactgatcatctctggagcttttgtgaatgatctagctagctatctgtaaatgatctagttgtgaatgatattataattgtgatgcttttgtgaatatataattgtggtgtttttgtgttt

SEQ ID NO: 99453 - DNA, 1010 bp, Zea Mays
gcgcgcgagattgaccaaaaattcacccatctgtagctgctccccgaacccctacccacaccgctgccgccaccgctgccgacgtaatcgcacggccgctccccgacccacacctcgcacaatgtgcgccccgccgccgccgcctcccctctagatcctcaatgcaccgctaggtcccgtccacagccgctcactgccgccacctctaacgcgcctaggaccatcgccacctccacatctagcttctggagtcgagatccatggtcgactccactggaggagcccggatctggcctaccgggcacggtctcgagctttaggcatctcagcaggcagcggtgtactccgtcatcgcccaatggagcaaccaaccaagcaagaactctatccatgctcgtgtcgaggcgttgtctctactctctactccatcccgcgtctgcgcgtcgtcctctacggatccgtccaccgctgcgccagcacgatgtgaatcgagacacgcctccgcctatgcgtccaagacacgcctctgcatctgcgtccgtgcactggctacgcggcatcgattacggagtggagtctacctactcgcaattctctacatatgaggacttgaggatttagagcaagacctaaaggtgttctggacaatgaaagcttgtaccttaaaacaggaggatacaagaagctggagtggttgtctgaaggcttttgaactgcttgaagcattagtgtagctttggtgcttttgtgactgatcagctctggagcagctagagtgatgtagttgtgggcttttgaacaatacctagagtgatatgaaacattagtgatgtagttgtgggcttttgaactgcttcacgctggagtgatgtcgctgtggtgcttttgtgactgatcatctctggagcttttgtgaatgatctagctagctatctgtaaatgatctagttgtgaatgatattataattgtgatgcttttgtgaatatataattgtggtgtttttgtgttt

SEQ ID NO: 99454 - DNA, 1304 bp, Zea Mays
cgcgacggagcaaaaaatggaccccagcgtagcggagccggcagccaagcagaaaaatacgagtatcgcacgcgcaaggcgattccgtccccattctccacccaatagggagctagagctacgagacggggaaaggggggacgggaataggcgtcgtcggccatgtcgtcgtcgtggaactcggtgggtctggcgatcctgtaccaggtgctgggctgggtcgccttcgccgcgtggtccttcagcttctacccgcaggtcctcctcaactacaagcgcaagagtgttgtgggcctgaatttcgattttctggtgttgaacttgacaaagcactcgtcctacctcatatacaatgctgctctcttcttcagcccattcatccagcaacagtatcatgacaaatatggtgataaagagatgattcctgttgctgcaaatgatgttgctttttcactgcatgctgtagcattgacagcctttaccgtttttcaagtattcatatatgagcgaggaacacagaaagtctccaaagtttgcatatcaatttctgctattgtctggatcgccgctcttgtttgcctcattattgcttggccaaaaagtgactggctttggcttattgatgtattcaattcaatacaagttggcatgacagcaatcaagtacatccctcaggccatcatgaacttcaggcggaagagcacaattggttggagcgttggcaatatattacttgatctcacaggaggggtgctgaatttttgtcagatgggtgtgcagtctatagatcaacatactttggtgaatttctatggaaacattgggaaaacccttctttcattggagacggttttctttgatgtcctgttcattatccaacactacgtgttgtaccctgtcaagaaggacgagaatggtaaggcaatcatttctgaaagggtagccccccttatcaggccttcggacaagcctgaagaagataacgtatgatctagctgtagttatattgcgcgcattgcattcacgcgctgtttgcacacaggccacacacgcatgcgaattatttgttcaaaaggaattgctggcgcgtcttgattatattactgcttataacttttactacttggtgcactggtgagagatgtctcatataccaggttgcggtttcaagtggccccgtttttactatcgtgatttgtgaaggttattagatatcatctcggccaacatttacgatcaatgctcatgtaaatatttggttgcattacatttctatggtttcatatttgcttttttttcttata

SEQ ID NO: 99455 - DNA, 1259 bp, Zea Mays
gcaaaaaatggaccccagcgtagcggagccggcagccaagcagaaaaatacgagtatcgcacgcgcaaggcgattccgtccccattctccacccaatagggagctagagctacgagacggggaaaggggggacgggaataggcgtcgtcggccatgtcgtcgtcgtggaactcggtgggtctggcgatcctgtaccaggtgctgggctgggtcgccttcgccgcgtggtccttcagcttctacccgcaggtcctcctcaactacaagcgcaagagtgttgtgggcctgaatttcgattttctggtgttgaacttgacaaagcactcgtcctacctcatatacaatgctgctctcttcttcagcccattcatccagcaacagtatcatgacaaatatggtgataaagagatgattcctgttgctgcaaatgatgttgctttttcactgcatgctgtagcattgacagcctttaccgtttttcaagtattcatatatgagcgaggaacacagaaagtctccaaagtttgcatatcaatttctgctattgtctggatcgccgctcttgtttgcctcattattgcttggccaaaaagtgactggctttggcttattgatgtattcaattcaatacaagttggcatgacagcaatcaagtacatccctcaggcggaagagcacaattggttggagcgttggcaatatattacttgatctcacaggaggggtgctgaatttttgtcagatgggtgtgcagtctatagatcaacatactttggtgaatttctatggaaacattgggaaaacccttctttcattggagacggttttctttgatgtcctgttcattatccaacactacgtgttgtaccctgtcaagaaggacgagaatggtaaggcaatcatttctgaaagggtagccccccttatcaggccttcggacaagcctgaagaagataacgtatgatctagctgtagttatattgcgcgcattgcattcacgcgctgtttgcacacaggccacacacgcatgcgaattatttgttcaaaaggaattgctggcgcgtcttgattatattactgcttataacttttactacttggtgcactggtgagagatgtctcatataccaggttgcggtttcaagtggccccgtttttactatcgtgatttgtgaaggttattagatatcatctcggccaacatttacgatcaatgctcatgtaaatatttggttgcattacatttctatggtttcata

SEQ ID NO: 99456 - DNA, 1375 bp, Zea Mays
taatcaaaaccctgttaatggaaggttcataaattgatttttttatttatttatctaaaacctctgttcgactgtcacctgattgctccctactaacttttgaggttctgaagggttctaaagataaaagaaaggaaacctttgcagaaggcaacactcaggaggaatgcaagtattattcaacacctggaggatgcaaattcggtaaaacttgcaaatacctccaccgtgagggaaatggagggaaaacagaggttgaaaaagctgagctaaactttctaggtcttccactgcgaccaggtgaaaaggagtgcccatactatatgcgcactgggagctgcaaatttgcgactaactgcaagtttcaccacccagatcctactaatgcatcttcaaaagaaccagggttggaacatgagaatggcgatgtaccactgcaaaatgtccaaggatcctctcagcctagccttcagatgtggcctgaccagagagcattgaatgaacagcatgttccttttcttgctccagcaccgtcatacagtggagggatggttccacctcaaggaatgtatccatcttctgattggagtgggtatcatcaggtacctttgaatccatattaccctcccggtgttcctttcccgcattttccagctgcccatatgaatcacccgatgtacaaggctgcagatataccaggacatcaaccaccaccatctgatgagtatcccgagagacctggccaacctgaatgccagcatttcgttaagagcggtttctgtaaatacaggatgaaatgcagatatcaccatccaaggtcgcgccagtctgcaccaccaccagcaggtcttagccccatcggcttgcctatcaaacctgtgagttcatatcccatcgttttacattcccggttaaggcctggcgaaccgtttcaaaaatatgattctggccaagtttattgtatttttgctctgttgttttgttgcaggatcaacctgtgtgcacttactatggacgctatggcttctgcaagtatgggccagcctgcatgttcaaccaccccttcaacttcgggcctcccgtgccggcagcaggaccacccctccctgggcagtaccctacgcatggaaacttcgcctagcaggcacgtgacgagcgattttctgagtcgccacgattgcttgtaataacctcctccacctgtaaagtagcgtagacaaaagctgtacgtggttggcagtagacatccagcatgtaggcgcaacgaagttgcatggagatgggtacgttacagttggtattgcaaactttacgctgtacaagttacagtccatacataagctgccatcgcatttaaaatcctggttgctgagta

SEQ ID NO: 99457 - DNA, 1265 bp, Zea Mays
taatcaaaaccctgttaatggaaggttcataaattgatttttttatttatttatctaaaacctctgttcgactgtcacctgattgctccctactaacttttgaggttctgaagggttctaaagataaaagaaaggaaacctttgcagaaggcaacactcaggaggaatgcaagtattattcaacacctggaggatgcaaattcggtaaaacttgcaaatacctccaccgtgagggaaatggagggaaaacagaggttgaaaaagctgagctaaactttctaggtcttccactgcgaccaggtgaaaaggagtgcccatactatatgcgcactgggagctgcaaatttgcgactaactgcaagtttcaccacccagatcctactaatgcatcttcaaaagaaccagggttggaacatgagaatggcgatgtaccactgcaaaatgtccaaggatcctctcagcctagccttcagatgtggcctgaccagagagcattgaatgaacagcatgttccttttcttgctccagcaccgtcatacagtggagggatggttccacctcaaggaatgtatccatcttctgattggagtgggtatcatcaggtacctttgaatccatattaccctcccggtgttcctttcccgcattttccagctgcccatatgaatcacccgatgtacaaggctgcagatataccaggacatcaaccaccaccatctgatgagtatcccgagagacctggccaacctgaatgccagcatttcgttaagagcggtttctgtaaatacaggatgaaatgcagatatcaccatccaaggtcgcgccagtctgcaccaccaccagcaggtcttagccccatcggcttgcctatcaaacctgatcaacctgtgtgcacttactatggacgctatggcttctgcaagtatgggccagcctgcatgttcaaccaccccttcaacttcgggcctcccgtgccggcagcaggaccacccctccctgggcagtaccctacgcatggaaacttcgcctagcaggcacgtgacgagcgattttctgagtcgccacgattgcttgtaataacctcctccacctgtaaagtagcgtagacaaaagctgtacgtggttggcagtagacatccagcatgtaggcgcaacgaagttgcatggagatgggtacgttacagttggtattgcaaactttacgctgtacaagttacagtccatacataagctgccatcgcatttaaaatcctggttgctgagta

SEQ ID NO: 99458 - DNA, 1920 bp, Zea Mays
ctctttctgtaggttttctccccacttcgctttgcttccccacctgctctctctcactcgtccccatcaccgtcgccatcactacccctctcctctctctcatcggctccaatggcggacgccgacgccaagtcccagccgcccgacgccgcggcatccccggatgcctcgatctcctccccctcctccctaggcggcggcggcggcgacgcggccgacgcggacgcgatcgagaagcagctcgccggcctgggcatcgccgtcgccggtgggttccccgagccatcgggatgggacgatggccccgtaccagtccccatcccggccgatgtccttgtcggcggtgatgagggtgccggcgagaagccgcgggcgccggcgccggcgccgactggggcggtggatgtgaaggtgcggttcccgcgccggcccggggagccggactgcagctactacctcaagttcggcacctgccgcttcgggatgaagtgcaagttcaaccaccctgcgaggaagaagaagactagtagggtgagaggcgtcgggagcaacggcagcgggagcaacagcagcagcaataaagcatcttctcctgatgatgatcaggctcctaaagaagaatacgaaggtcttgttccggacatttcggattccatggttattgatatgaaaagggggaaactagagccaaaggaaaaggtttgtgaagaacctgaaaaggcaattcattttacgaagttagacgagacaaatatcgcaacccaaaagggttctaaagataaaagaaaggaaacctttgcagaaggcaacactcaggaggaatgcaagtattattcaacacctggaggatgcaaattcggtaaaacttgcaaatacctccaccgtgagggaaatggagggaaaacagaggttgaaaaagctgagctaaactttctaggtcttccactgcgaccaggtgaaaaggagtgcccatactatatgcgcactgggagctgcaaatttgcgactaactgcaagtttcaccacccagatcctactaatgcatcttcaaaagaaccagggttggaacatgagaatggcgatgtaccactgcaaaatgtccaaggatcctctcagcctagccttcagatgtggcctgaccagagagcattgaatgaacagcatgttccttttcttgctccagcaccgtcatacagtggagggatggttccacctcaaggaatgtatccatcttctgattggagtgggtatcatcaggtacctttgaatccatattaccctcccggtgttcctttcccgcattttccagctgcccatatgaatcacccgatgtacaaggctgcagatataccaggacatcaaccaccaccatctgatgagtatcccgagagacctggccaacctgaatgccagcatttcgttaagagcggtttctgtaaatacaggatgaaatgcagatatcaccatccaaggtcgcgccagtctgcaccaccaccagcaggtcttagccccatcggcttgcctatcaaacctgatcaacctgtgtgcacttactatggacgctatggcttctgcaagtatgggccagcctgcatgttcaaccaccccttcaacttcgggcctcccgtgccggcagcaggaccacccctccctgggcagtaccctacgcatggaaacttcgcctagcaggcacgtgacgagcgattttctgagtcgccacgattgcttgtaataacctcctccacctgtaaagtagcgtagacaaaagctgtacgtggttggcagtagacatccagcatgtaggcgcaacgaagttgcatggagatgggtacgttacagttggtattgcaaactttacgctgtacaagttacagtccatacataagctgccatcgcatttaaaatcctggttgctgagta

SEQ ID NO: 99459 - DNA, 1979 bp, Zea Mays
ctctttctgtaggttttctccccacttcgctttgcttccccacctgctctctctcactcgtccccatcaccgtcgccatcactacccctctcctctctctcatcggctccaatggcggacgccgacgccaagtcccagccgcccgacgccgcggcatccccggatgcctcgatctcctccccctcctccctaggcggcggcggcggcgacgcggccgacgcggacgcgatcgagaagcagctcgccggcctgggcatcgccgtcgccggtgggttccccgagccatcgggatgggacgatggccccgtaccagtccccatcccggccgatgtccttgtcggcggtgatgagggtgccggcgagaagccgcgggcgccggcgccggcgccgactggggcggtggatgtgaaggtgcggttcccgcgccggcccggggagccggactgcagctactacctcaagttcggcacctgccgcttcgggatgaagtgcaagttcaaccaccctgcgaggaagaagaagactagtagggtgagaggcgtcgggagcaacggcagcgggagcaacagcagcagcaataaagcatcttctcctgatgatgatcaggctcctaaagaagaatacgaaggtcttgttccggacatttcggattccatgggctttgatgacaaggggagcttatctagttcagaaaatcataggaatatgtcatatgaagttattgatatgaaaagggggaaactagagccaaaggaaaaggtttgtgaagaacctgaaaaggcaattcattttacgaagttagacgagacaaatatcgcaacccaaaagggttctaaagataaaagaaaggaaacctttgcagaaggcaacactcaggaggaatgcaagtattattcaacacctggaggatgcaaattcggtaaaacttgcaaatacctccaccgtgagggaaatggagggaaaacagaggttgaaaaagctgagctaaactttctaggtcttccactgcgaccaggtgaaaaggagtgcccatactatatgcgcactgggagctgcaaatttgcgactaactgcaagtttcaccacccagatcctactaatgcatcttcaaaagaaccagggttggaacatgagaatggcgatgtaccactgcaaaatgtccaaggatcctctcagcctagccttcagatgtggcctgaccagagagcattgaatgaacagcatgttccttttcttgctccagcaccgtcatacagtggagggatggttccacctcaaggaatgtatccatcttctgattggagtgggtatcatcaggtacctttgaatccatattaccctcccggtgttcctttcccgcattttccagctgcccatatgaatcacccgatgtacaaggctgcagatataccaggacatcaaccaccaccatctgatgagtatcccgagagacctggccaacctgaatgccagcatttcgttaagagcggtttctgtaaatacaggatgaaatgcagatatcaccatccaaggtcgcgccagtctgcaccaccaccagcaggtcttagccccatcggcttgcctatcaaacctgatcaacctgtgtgcacttactatggacgctatggcttctgcaagtatgggccagcctgcatgttcaaccaccccttcaacttcgggcctcccgtgccggcagcaggaccacccctccctgggcagtaccctacgcatggaaacttcgcctagcaggcacgtgacgagcgattttctgagtcgccacgattgcttgtaataacctcctccacctgtaaagtagcgtagacaaaagctgtacgtggttggcagtagacatccagcatgtaggcgcaacgaagttgcatggagatgggtacgttacagttggtattgcaaactttacgctgtacaagttacagtccatacataagctgccatcgcatttaaaatcctggttgctgagt

SEQ ID NO: 99460 - DNA, 1917 bp, Zea Mays
ctctttctgtaggttttctccccacttcgctttgcttccccacctgctctctctcactcgtccccatcaccgtcgccatcactacccctctcctctctctcatcggctccaatggcggacgccgacgccaagtcccagccgcccgacgccgcggcatccccggatgcctcgatctcctccccctcctccctaggcggcggcggcggcgacgcggccgacgcggacgcgatcgagaagcagctcgccggcctgggcatcgccgtcgccggtgggttccccgagccatcgggatgggacgatggccccgtaccagtccccatcccggccgatgtccttgtcggcggtgatgagggtgccggcgagaagccgcgggcgccggcgccggcgccgactggggcggtggatgtgaaggtgcggttcccgcgccggcccggggagccggactgcagctactacctcaagttcggcacctgccgcttcgggatgaagtgcaagttcaaccaccctgcgaggaagaagaagactagtagggtgagaggcgtcgggagcaacggcagcgggagcaacagcagcagcaataaagcatcttctcctgatgatgatcaggctcctaaagaagaatacgaaggtcttgttccggacatttcggattccatggttattgatatgaaaagggggaaactagagccaaaggaaaaggtttgtgaagaacctgaaaaggcaattcattttacgaagttagacgagacaaatatcgcaacccaaaaggttctgaagggttctaaagataaaagaaaggaaacctttgcagaaggcaacactcaggaggaatgcaagtattattcaacacctggaggatgcaaattcggtaaaacttgcaaatacctccaccgtgagggaaatggagggaaaacagaggttgaaaaagctgagctaaactttctaggtcttccactgcgaccaggtgaaaaggagtgcccatactatatgcgcactgggagctgcaaatttgcgactaactgcaagtttcaccacccagatcctactaatgcatcttcaaaagaaccagggttggaacatgagaatggcgatgtaccactgcaaaatgtccaaggatcctctcagcctagccttcagatgtggcctgaccagagagcattgaatgaacagcatgttccttttcttgctccagcaccgtcatacagtggagggatggttccacctcaaggaatgtatccatcttctgattggagtgggtatcatcaggtacctttgaatccatattaccctcccggtgttcctttcccgcattttccagctgcccatatgaatcacccgatgtacaaggctgcagatataccaggacatcaaccaccaccatctgatgagtatcccgagagacctggccaacctgaatgccagcatttcgttaagagcggtttctgtaaatacaggatgaaatgcagatatcaccatccaaggtcgcgccagtctgcaccaccaccagcaggtcttagccccatcggcttgcctatcaaacctgatcaacctgtgtgcacttactatggacgctatggcttctgcaagtatgggccagcctgcatgttcaaccaccccttcaacttcgggcctcccgtgccggcagcaggaccacccctccctgggcagtaccctacgcatggaaacttcgcctagcaggcacgtgacgagcgattttctgagtcgccacgattgcttgtaataacctcctccacctgtaaagtagcgtagacaaaagctgtacgtggttggcagtagacatccagcatgtaggcgcaacgaagttgcatggagatgggtacgttacagttggtattgcaaactttacgctgtacaagttacagtccatacataagctgccatcgcatttaaaatcct

SEQ ID NO: 99461 - DNA, 879 bp, Zea Mays
ctctttctgtaggttttctccccacttcgctttgcttccccacctgctctctctcactcgtccccatcaccgtcgccatcactacccctctcctctctctcatcggctccaatggcggacgccgacgccaagtcccagccgcccgacgccgcggcatccccggatgcctcgatctcctccccctcctccctaggcggcggcggcggcgacgcggccgacgcggacgcgatcgagaagcagctcgccggcctgggcatcgccgtcgccggtgggttccccgagccatcgggatgggacgatggccccgtaccagtccccatcccggccgatgtccttgtcggcggtgatgagggtgccggcgagaagccgcgggcgccggcgccggcgccgactggggcggtggatgtgaaggtgcggttcccgcgccggcccggggagccggactgcagctactacctcaagttcggcacctgccgcttcgggatgaagtgcaagttcaaccaccctgcgaggaagaagaagactagtagggtgagaggcgtcgggagcaacggcagcgggagcaacagcagcagcaataaagcatcttctcctgatgatgatcaggctcctaaagaagaatacgaaggtcttgttccggacatttcggattccatgggctttgatgacaaggggagcttatctagttcagaaaatcataggaatatgtcatatgaagtcagtattttcttttatgttataatgattaggttcttgatctctgtgagccgttctttaccagcattattgcactgtacatgctaatgaaccagtgaaatgcctattgctttgctttcattactaactttaaaagatcatacttcttccacatttgttgaa

SEQ ID NO: 99462 - DNA, 1079 bp, Zea Mays
cgaagaccataggcttcagataatatgacatagtattattagctctgaattcacataaagtagatcagctctgaatcctaacgttaaagatttcactccagcatgcttaagttacgttcataatgtggaaaagtatcatttgtattcatgaaggttcttaatttagaaatcgatgcatctttattgatatgaacagtagacatttaattacagaagcccacacactcttgtacagtgataaaaatgaagaggttgtggattcaatattggcaagatcatcttcttaactgatggattatttttcatgagaagagggatgaaatactgggtttagtttaattgaatatagtttcaggtttcttagagacttgcaacatcggttaagcttgacttttgttcttgaacctgcatatcttttgttaatgaatgtagtgatgctttatttcacattttcttcattccctcatctaagaatgttaccgtaatgtaaatgactttgtatataatctttttcaggatagtttagtctatattacaaaaaagatgggacttcaaatttaaattttgaattggaacttgactccttaagtatcgatgtcgtcattgaaaaggcaaagtatgtacaaaagaaaacttgattcttcagtctcccagacacaaaagttgtttgaagataagttcattcaaggatttgaaggaggtgattcgtcagtacaagaaatttgtatcctccttttcttgacagaatctatgacataataacatctcaggcatgcatggcaatgaggcacaatcaggattgagaacggatgggctacaagctattgttggtgcctggtatcagagaatacagaaactctctttctctttatgtatgtgatacatagatgttcctttgattagtctatagtagtaaaagaaaatatattgtcgatgcttcggtgcttgcttaaaatatttgtggtggtttcatgcactcttattttcagtatgctctacctaccaatatgaaattggcattgtttgcacttaacagtaaagttgaacagtcttatatttgaatgggggtatctttgttg

SEQ ID NO: 99463 - DNA, 2632 bp, Zea Mays
ctacttctgcagattaatgaccgctatgaatttcctcttcaacttgaccttgatagagacaatggaaaatatcttgctccagatgcagatcgaagtattagaaacctctatacacttcataggtaatttatttatcataaactgttccaattctttgaatggtatatatgtacaaatttgatgatgagcgggttacaaaagaagacactaaaaaggcacttgaagagcagtatgggggtgaggaagagttgcctcaaataaaccctggtttcaataacacgccatttaaattcacaaagtattcgaatgcctacatgcttgtctatatacgtgagagtgacaaagagaaaataatgtgtaatgtcgatgagaaggacatcgctgagcatttgcggataaggttgaagaaagaacaagaagagaaagaacacaagaagaaggagaaggctgaagctcatctctacactatcataaagatcgctcgagacgaggacttaaaggagcaaatcggtaagaatatatattttgatctggtggaccatgaaaaagttcacagtttccgcattcagaagcagttgccttttacttcattcaaggaggaagttgcaaaggaatttggcatccctgtacagtttcagcgcttctggttgtgggctaagaggcagaaccatacataccggcccaatcgtccattgacaccccatgaggaagcacaatcagtcgggcagcttagggaagtctcaaataaggcacacaatgctgagctgaagctgtttctggaagttgaacttggaccggagttatgtccaattcgtccacctgagaagagcaaagaagacatacttcttttcttcaagctttataatgctgagaaggaagagcttcattttgttggtaggctttttgtgaaggctctgggaaagccatctgaaatattgacaaaactgaatgcaatggctggattttctccaaatgaagaaattgagctgtacgaggaaattaagtttgagccaaatgtgatgtgcgaacatattgacaagaaacttactttccgctctagtcagcttgaagacggagacattatctgtttccaaaaggctcctgttccagatggtgatgcacaagtgcgctatccagatgttccttcattcttggagtatgttcacaataggcaggttgtgcactttcggtgtctggacaaaccaaaggatgatgatttttctttggaattgtcgaagcttcatacatatgatgatgttgttgagagagttgcacatcaacttgggttggatgatccatcaaagatacggcttacgtctcacaattgttattctcagcaacctaaaccacagcctattagatataggggggtagcacatctactggatatgcttgttcattataatcagacttctgatatcttgtattatgaggttctggacattccactgccagatttgcagcgtttgaaaacgcttaaagttgcattccaccatgcaacaaaagacgaggttgtcgttcatagcataagacttccaagaaatagcaccatcagtgatgtgattactgatttgaaaaccaaggttgaactatctaatcctgacgctgagctccgcttgcttgaagtattttaccacaagatttataagatctttccacctcatgagaagatagagaacataaatgatcagtactggacattacgagctgaggagatcccagaggaagagaagaatcttggcccacatgatcgattgattcatgtttaccatttcatgaaagaccctaaccagaatcaacaaattcaaaattttggagatccttttttgatggttattcgggaaggtgagactgctgcagaggtaatggagcgcatccagagaaaacttagagttcctgatgatgagttctccaagtggaagcttgcattcatatccatgaaccggccagagtacctccaggacactgacgttgtatcagcacgttttcagcggagagatgtatatggtgcttgggaacaataccttggcttggagcacactgatacaacatcgaaacggtcttacacatccaatcagaatcggcacacctatgagaagcccgtaaaaatttataattgagaaaccttcatcaaagttcaatccattgtcaaaggcgtcgacagcagcatgcccaaggtgatacgacgcttcaaacagaaaaatctggtatagtatttgcctgtgctaaggcctgcaaggcgcaagcccaccaggccaccaatgctgcttccaaccttcattgttccaagcaaccaagcatgtgtttggtttttcttcgtcgtgtcgagtatgacggcccctgacagggtaggtgtttgcttagtttgtagagcaaagctagcacataagaaaaaatattttggtaggggtggggggcatgtatacaggattgtagccgatactgattgctgaatttgcgtctcttgcagctgtgggaacaatggcagagattgtataatgggtttggtataattcttcgtgctgttgagaaacgtacgaggataacccgatcagatagtagagttttgagacctgtcaaacagaaccttttgaaactaacctacccgttataccagaagggccgtttgcaa

SEQ ID NO: 99464 - DNA, 509 bp, Zea Mays
ataagtgtatttctacaaactactacttgcgtgagcaaccattattgaaaactaaaatttaattttgtaacagattaaacctcaactacacattaatcatacgtgtgagattggaaacttcaagaacacagacttaataatcatgcatggaggaaatatggcacacatgggacaacatttcaggattcatgtcaaatcagtgcaagaagtcagaacaatccaatgttaaacttatctataaaattaagcggtttgacattacatcaaacacaaggcatgcagggacagtgaggtctcaccggggtttgacgacaccgcaaccaggctgtccaaaaaaaccacggagccgacgacatgctgctcgaccactaccaaggcgttgttgccagcttcaagtgaggagaggcaccgagctggtccctagcgagcagcaaaagggagctgaagcatccatggctggagggtagggggatggagggttggcgtccagaacatggggggagctgcag

SEQ ID NO: 99465 - DNA, 239 bp, Zea Mays
gttctaggaggatcatcatcctgattgtttgggatgccagtattgttgactccaatcaggcgcaacatgtcgtcgggttctatagactccagtgtttgttgttctaaggagcacttgatttccaaaaatcagtaccaatcagcaagtagataacctaagcacaacattttgagagagacggttcattttcattcagcctcagctgttcttgtttccttttctactgattctatccacgt

SEQ ID NO: 99466 - DNA, 777 bp, Zea Mays
aggatttgctgctcacgccatcataaaatctttctgcaacgatgaaccgacgatggtgaagagcatcttcggtcgtttccttctgcacgtctaccccggggaaacgttgcccactgagatgtggcttgacagccagaaggtgcactaccaaacgaagcttgtggttggagatgcttgtgccacaaaccaaacatgttcatatcatggctgttttggccatatgttgggccatctggaaatcaaggaatagaatgtgctttgagaatattctaattaaatcacctaatgaaattatctgtcatgcgagcgctttgatgattttgtggacaggtttgagcaaaagggagctgcagcctgcagggcttgattcaagaaggtgcaaacctgctggtcaaggcagcgagcgttaagttggatgctcgcgttgtcgatcaagtggaagaggagaacgatgatacggagaattaaaagtttggtatagtgatcagctttctggtggaagcctgacgaggattgtctacttctggatcttggccgtgtagctttgttctgcttctcttgtgatgttcttgtccgagtataaggtctacaatgacataatgcttgtaccatctttttctgtggtattctcatgcagtgtatgtgacttgaaactttgttaggacatagtttgtgaaagggaaatggacccaacatttcctatagtcgattttggtatttgacgtccatcacaaatgattatgaacagaagctatgtacttgtctggattttgtata

SEQ ID NO: 99467 - DNA, 1158 bp, Zea Mays
atgacgttgctatcgttggtggaggcatggtgggcttgcctgtcgcttgtgcattgtgtaggaacaccgccgaaggggacgacggcatgggcgccgccgccgaagccgagcgacgacagcagcagggcaaagcagcgagagatgggaggtcagatgaagattagtgcaatgtgggaggaaggtggcaacaaagcaccggcttcaactgccaaggtcgtgcaatatgaagcttctgatgttggtgtggatgatgcattaggcatttggaaaatagatgacgtcgacaatagcttccacacacagccatttcggatcaattgtggctatcacctgcgggtggtcgatgtgaacatgcaagtggaagttggtagtgtcagtgagaggtattcaagttggaattggaattataggttacagtccactaaaagagggttttttgtgcagtggagcacctcgtggccagcacaagctggccttcttcgactccggcgacgccgccagcccccatcacccgtccccaaactcatcttcctagagagtacgctggtgcagaccttaggccctaaaaggcgcgtgcgcgtcgcgaccctggacgaggcgttgcagatcccgcaggagttggcagcgttcgtgacttgctatggtcaaagcctccatgtcctggttgggtacattggctggaattatggatcagttatagaggatatcttgactggatttaagatgcactgccatggttggcggtctatttactgcatctcgaaggaggaattaaccgagatcagtttcacagtgtaccacatttgcaggctgcactttgtgctcaagttcttccgagacgtcaagcatgtgcgagaacaaggagctatagatgatcgtgacactttcctccatgcagtgcgagatctcctatgttttcactcaactcaaagagtcgggggaaattttatgcatgaacaggcattgttatataggccatttggggattacaatcctttgcattcagacccagatattgcacagcttgctgggtatgcctcatcagaatgctattctatcattgtatttatagtcatatttgacatcgaggaagtatttggggtagatgttggactgagaagcctctcagtttcaagctttcagcctcttctttcttag

SEQ ID NO: 99468 - DNA, 2117 bp, Zea Mays
gcgtgccacctccccgcggccgcggatgcgcatgtcccgtcccccgccaccgccatggccgacgtcggcgagcctcctccctcgctctgccccttatgcggccaccccgctgccttctccgtttcaccgtcgacgtctgcggcggccagcgtgtcccccgcaaggccgccgctgaagcgaaggaccccacccgaggcgccacctgcggtcgtgagggtggagatcggggatgaggccgcggcgctgcgcgaggcattggcgcggcagcaagcggcgctcgccgacgtccaggcggagctcgacgcggaacgcggggccgcggccggcgccgccagcgaggccatgaccatgatcctccgcctgcagcgcgagaaggccgaggccatgatggaggcacgccagttccgccgctacgccgaggagaagatggctcacgacgccgccgagctcgcggccctcgaggaggcgctctcgaagcgtgaggccgggatgcgggcgctccagggccagacgccccgtcacgcctgcgccgcgccgtcggggggctccaccccacgacgcccctctgtggccacgccgcgtcacccaccctcctcgctgtcccccgcggcgtcgtccggaggagggtactacccgcctctgcggtgcagcatcgaccacccgcccaccgcgtccgaagcagacgcgctcgagacaccgcgcgaccagctcaaccacctcgcccaccgtgtccacctcctcgagcgcggcgcgaccccgatggccgccaccaacaccacgcccatcatccgtgtcgcgccggggtctgccttcccgcaccatgcacgggcctactcggatgacagccttgacttgtacgatggtggcgactgcttcccggatgacgattgcggcgccagcgaccgggtatacaccgtggacgccattcatggggcacccctggcggttcctgagggctcctacgccggtagcacgcccatggggagcgactgctacggcggcgctccgtgggcagaagacgaggaggtgcgccgcctcagcgtgcggatgcaggcgttggaggcagaccgtgagtccatgaggcaagccatcatgtccatgggagccgagaaggcgcaggtgatgctgctcaaggagatcgcgcagaagctctgcaaagacgcgacaccaccggttccagcggcagcagtggcgcagcacggcttttacaaagggggcaacacgcagccggccatgaccatcactgtgcgaccaccacggcacccagctttgcttatgcaaaggaaactggtgaagaagaagccatcactccttgctgtagtggtcaagtgggttacatcaatcatgtggtggcgaaggaaatcatctcgcgtaaagttccctattgggcagtgcggcaacaacgtggggctgcttctgctgctcgacaaggctcctagggcaggccacgggcaccagaggcctcccaagaggatctaactaccaaatgagtcatctgtttgtgaagcaaacacatgactgggcttccgcattgttggtcttgcgttcttcttttcaccgtgtctgtgtaggatataccacctgagcgttgtacgttgtgtgttcatgggacttcaatcaccagaagttgactcagatcttagaatcgatcatggaattgacgttcatggcacttcaccgctgaatattgttgttgggtgtggggctggacaaaatactcatggctcgataactcgctcgactcggctcgttagtagctcggctcgactcggctcgttttgattctgtagcgagccaagctagcattctagctcggttctctaatgagccagctcggattagctcgtgagctagctcgcgagccaaacgagccaagccacaacacaagtttgtctagtcgttagtgtcgtcccatctcttatagtcttgttttctcgtagctatgatctgtgatatggacatgtgtgaatgtgccatatgcttaaatgtttgtattattgtatggctacatacctacattgcatatttaatatttgattattggttatggttttgtgaactttgtttctagcagcatatgatgttagtgttgtgcaatgaaatgttacatgtttgtg

SEQ ID NO: 99469 - DNA, 2112 bp, Zea Mays
gcgtgccacctccccgcggccgcggatgcgcatgtcccgtcccccgccaccgccatggccgacgtcggcgagcctcctccctcgctctgccccttatgcggccaccccgctgccttctccgtttcaccgtcgacgtctgcggcggccagcgtgtcccccgcaaggccgccgctgaagcgaaggaccccacccgaggcgccacctgcggtcgtgagggtggagatcggggatgaggccgcggcgctgcgcgaggcattggcgcggcagcaagcggcgctcgccgacgtccaggcggagctcgacgcggaacgcggggccgcggccggcgccgccagcgaggccatgaccatgatcctccgcctgcagcgcgagaaggccgaggccatgatggaggcacgccagttccgccgctacgccgaggagaagatggctcacgacgccgccgagctcgcggccctcgaggaggcgctctcgaagcgtgaggccgggatgcgggcgctccagggccagacgccccgtcacgcctgcgccgcgccgtcggggggctccaccccacgacgcccctctgtggccacgccgcgtcacccaccctcctcgctgtcccccgcggcgtcgtccggaggagggtactacccgcctctgcggtgcagcatcgaccacccgcccaccgcgtccgaagcagacgcgctcgagacaccgcgcgaccagctcaaccacctcgcccaccgtgtccacctcctcgagcgcggcgcgaccccgatggccgccaccaacaccacgcccatcatccgtgtcgcgccggggtctgccttcccgcaccatgcacgggcctactcggatgacagccttgacttgtacgatggtggcgactgcttcccggatgacgattgcggcgccagcgaccgggtatacaccgtggacgccattcatggggcacccctggcggttcctgagggctcctacgccggtagcacgcccatggggagcgactgctacggcggcgctccgtgggcagaagacgaggaggtgcgccgcctcagcgtgcggatgcaggcgttggaggcagaccgtgagtccatgaggcaagccatcatgtccatgggagccgagaaggcgcaggtgatgctgctcaaggagatcgcgcagaagctctgcaaagacgcgacaccaccggttccagcggcagcagtggcgcagcacggcttttacaaagggggcaacacgcagccggccatgaccatcactgtgcgaccaccacggcacccagctttgcttatgcaaaggaaactggtgaagaagaagccatcactccttgctgtagtggtcaagtgggttacatcaatcatgtggtggcgaaggaaatcatctcgcgtaaagttccctattgggcagtgcggcaacaacgtggggctgcttctgctgctcgacaaggctcctagggcaggccacgggcaccagaggcctcccaagaggatctaactaccaaatgagtcatctgtttgtgaagcaaacacatgactgggcttccgcattgttggtcttgcgttcttcttttcaccgtgtctggatataccacctgagcgttgtacgttgtgtgttcatgggacttcaatcaccagaagttgactcagatcttagaatcgatcatggaattgacgttcatggcacttcaccgctgaatattgttgttgggtgtggggctggacaaaatactcatggctcgataactcgctcgactcggctcgttagtagctcggctcgactcggctcgttttgattctgtagcgagccaagctagcattctagctcggttctctaatgagccagctcggattagctcgtgagctagctcgcgagccaaacgagccaagccacaacacaagtttgtctagtcgttagtgtcgtcccatctcttatagtcttgttttctcgtagctatgatctgtgatatggacatgtgtgaatgtgccatatgcttaaatgtttgtattattgtatggctacatacctacattgcatatttaatatttgattattggttatggttttgtgaactttgtttctagcagcatatgatgttagtgttgtgcaatgaaatgttacatgtttgtg

SEQ ID NO: 99470 - DNA, 1803 bp, Zea Mays
cgcggatgcgcatgtcccgtcccccgccaccgccatggccgacgtcggcgagcctcctccctcgctctgccccttatgcggccaccccgctgccttctccgtttcaccgtcgacgtctgcggcggccagcgtgtcccccgcaaggccgccgctgaagcgaaggaccccacccgaggcgccacctgcggtcgtgagggtggagatcggggatgaggccgcggcgctgcgcgaggcattggcgcggcagcaagcggcgctcgccgacgtccaggcggagctcgacgcggaacgcggggccgcggccggcgccgccagcgaggccatgaccatgatcctccgcctgcagcgcgagaaggccgaggccatgatggaggcacgccagttccgccgctacgccgaggagaagatggctcacgacgccgccgagctcgcggccctcgaggaggcgctctcgaagcgtgaggccgggatgcgggcgctccagggccagacgccccgtcacgcctgcgccgcgccgtcggggggctccaccccacgacgcccctctgtggccacgccgcgtcacccaccctcctcgctgtcccccgcggcgtcgtccggaggagggtactacccgcctctgcggtgcagcatcgaccacccgcccaccgcgtccgaagcagacgcgctcgagacaccgcgcgaccagctcaaccacctcgcccaccgtgtccacctcctcgagcgcggcgcgaccccgatggccgccaccaacaccacgcccatcatccgtgtcgcgccggggtctgccttcccgcaccatgcacgggcctactcggatgacagccttgacttgtacgatggtggcgactgcttcccggatgacgattgcggcgccagcgaccgggtatacaccgtggacgccattcatggggcacccctggcggttcctgagggctcctacgccggtagcacgcccatggggagcgactgctacggcggcgctccgtgggcagaagacgaggaggtgcgccgcctcagcgtgcggatgcaggcgttggaggcagaccgtgagtccatgaggcaagccatcatgtccatgggagccgagaaggcgcaggtgatgctgctcaaggagatcgcgcagaagctctgcaaagacgcgacaccaccggttccagcggcagcagtggcgcagcacggcttttacaaagggggcaacacgcagccggccatgaccatcactgtgcgaccaccacggcacccagctttgcttatgcaaaggaaactggtgaagaagaagccatcactccttgctgtagtggtcaagtgggttacatcaatcatgtggtggcgaaggaaatcatctcgcgtaaagttccctattgggcagtgcggcaacaacgtggggctgcttctgctgctcgacaaggctcctagggcaggccacgggcaccagaggcctcccaagaggatctaactaccaaatgagtcatctgtttgtgaagcaaacacatgactgggcttccgcattgttggtcttgcgttcttcttttcaccgtgtctggtgatgtagctttcacatatggaaaccatttttttctcagttacttctcgtgtgccaacaacatttcgttgcatcttgctcgctcagacattgcttgcatcatatgagtctaaccagattgtttgtacagtgtaggatataccacctgagcgttgtacgttgtgtgttcatgggacttcaatcaccagaagttgactcagatcttagaatcgatcatggaattgacgttcatggcacttcaccgctgaatattgttg

SEQ ID NO: 99471 - DNA, 156 bp, Zea Mays
atgcccaacatctttcatgacaataatatcatcgtcgagaagtggaacgaacttcttgaagccacccttgtgaatgaaatcttgtatgccaggattatggtatgtcaaatccaaatctccaatgatgaacttaacaggtacatttatcttagctaa

SEQ ID NO: 99472 - DNA, 1332 bp, Zea Mays
accagagctccactagcgtctagcggtccccgatccggcgtttgcgtcggcacgcttggcggtggcgcgcaaaagcagtgcggttgggccacgccacgctcactggcaggggcgaggggacacgtaccgtaccgtacgtactgctggatcgggaggaagcgctatggccgccgggagggagagggaccgggagctgctcctcccggtggtgggcggggagcatgtcgccggcaacgaggacgactcggatccgaccacccctgtcatcgccgggccgccgccgccaacgacgtccgcgcgcgtgctccacctccaccaccatcccacgggcatcgaggcattttcacgagtgatacggagctgggcgtggaagaagttcatgtctggatgcgtcatcctgctcccgatcgccatcaccttctacacgacatggtggttcatccgcttcgtcgacggcttcttctcgcccatctacgtccatctcgggatacacctcttcggcctcgggtttgtcacctccatcaccttcatcttcctcgtcggcgtgttcatgtcgtcgtggctgggcgcctcgctcctcggcctcggcgagttcttcatcaagaggatgccgctcgtgcgccacatctactcggcttccaagcagatcagcgccgcgatatcgccagaccagagctcaagagccttcaaggaggtggtgatcatccggcaccccaggatcggcgagtacgcgctgggcttcatcacgtcgacggtggcgctgcgaggcgccggcgtccgcggcgaccaggacctcgcctgcgtctacgtgcccaccaacaacctctacctcggcgacatcttcctcatgagccgcgccgacgtcatcgtcccggacctctccgtccgggaggccatcgaaatcatcctctcgggcggcatgtcggtgccaaagatcatatcggcggtggagggggctgtcggcctcggcgactatgaccgggcagtgaaggactcctagctcacgcttctttcttctctttatcacaatcttaggttgctcttcgaggttctgcatgttctagattgcaggttttaggcaacgttctccacttttcatcagttataggaaaatatattttggtatctagcaaacttgtgctaagtttgctatataaattctttcatgcgagttctggtatgaactgacaaagcattgtttcgataggtaaacagtttaagtttacatttatacttacgacctgtatgtttagttcaagaattgtaacgtaaataacaacagtaatgattcatgctcgagtgacagcggtaacaaatttaaatagatcaata

SEQ ID NO: 99473 - DNA, 1814 bp, Zea Mays
atggtcctgtgtgtttgttagtgacgctgcattttgcaaaaggtgacacctgctcttcttcaccaaccccaaattcttcttcgtgttcatcgttcacctcatccttcccttcccttctctccccggctccaccagcagccgctcatcgaaaccttcccccactatccaccagcatcaagcagagatttcttccgccttctccagagctcgcatgcttccgtttcgtcctccgcgttcgcttccctagagcagagcaggtaggtagtcagtggccagcaatgatccgcgagttcctggccgtggcggcacgcgcggcgctggagtgggcgctggcgtcgctgctgctcgccaacggcgccgcgttctgcctcatcgccgccgccgccgcgcgcctccgcctcggcccgccgtgcatcgtctgcgcccgcgtccaccgtctgctctgctcctcctcctcctctgctgctgccagcgccaccggcgtggcacgcgacgctctccgcctcctcctctgcgacgcccacctcgccgccgtcgctccggatcgctgcgacggggatggtggtgtctcggagacggatgctgcgatggcggacgatgatccgaacacgttttcaggcatggagactcaccgcgacgtctccatcggcagcgagatatgcgagcaggaggaagacggcatcaaacaccacgccggcgaccgcatcgcaagaaccaccagcgccggcgacggttgcggcccgctcgtatctctcttcgagctggcgccgatcgtgtcgtcgcgaccacgggaggacgacgattccatagaccagctggcgaggacgatgccacagtcgctgaccctgaccgtggacggtgacgagagcctgacactcggggagctggtcaccgcgttcagggcacagaggagggaactggacgcgctgcgcgccgagctcgccgccgagcggcggctgaaggcggaggtcgaggagtaccagcgtcagctggaggagcagggcgagctcgaccgggaggctgcgcggctggccatgcagctcgtgtacgagagcgaggcggagaagcacggcctgcagcggcggcagctcgacgcgtgcggggccagggcgcagctgcagctgcagctgcagctctgccagtccgaccccgcggccgtggaggacgccggcggaggctgcagtggcgatggcaacaactaccagtcgctcgtggacttcttgccggggtcggtgcactcctcctcgccggacctggccaacctccttagactctacactgaatctggccatgccggccgtcgtccgggtccggggcacggttacgacgtgccggccattgcggtgggtgaggaggcagaggagggggaagaggccgtcgctgtcaccgtcactgtcacagctgccactgaatccatcgggcgtgttgatgctacatctgccgccactgtttctgaatctttacaagaaagctccaatactttccacgtcgaaacgacagcaacggaagccgcttaatttgccggtcatcacctcgggtctgtcgcccatggtggaaacatgcacgaaaacacggtggtagtagtagtagaatgctttctcttgtacatcgatttgtttttgtgaatattgcaaaatcggtttgtagaatccaatgtcatgttgaggcggccgttgatgcgccagagccctgctttggagctccgacgagaccctattgtacttgtacccatgatgaccttcttcccccttggccgtgactcaggcggcgcaagcggagcgaacgccatggccagactgtgaggcctgcagatg

SEQ ID NO: 99474 - DNA, 395 bp, Zea Mays
cggctggcggccgccgctcacggagtcacgagcatgacttcacggatcgcatcgcagcaagctgcaggcgtgaatggtggcactacagctcatgggtgaagaagacaatggacggtgaccttcttcctcctccacttagcctccttctcttgtagcttggagtatctgaatcccaatgtacatgtgttcgtcccacatcaaagggacatcgaagaactcgaccgcaggccactggaccgcgggagcgtcaaagatctcacgcggcggccatcggatctcgagcacagcaagggcatcaacagccaagggccttctcatcttcgtaccttgtcagatccatcgattgttgcgacatctcgtcacactactgaagcagtcaggcctggccaaaggcg

SEQ ID NO: 99475 - DNA, 1739 bp, Zea Mays
cccttgtaaccattttttaaaaaaaattattaggttgtttttgctgtccaaatctcaaaggaatgagaaatcagatagttgtgtctgacatactttggattttggtcctgcaaccaagcacagcaaatgaaaaaaaagaaggaacggtcttcattgttacctgcaaaatttggaatatattcaagcatacttcagcatgcaagggtccttcaaaacaatttgtcaaaatacacataggtcagttcgcctctgataagcaggcgaagggttcggcgggtcgggcttcagcacgacaacccgctgccaggcaatgaccccatccgcccccggcgcctgagagcgcgctaactggtcggcgtcctcgtcttcgtcctcctcggcgaagaactcgatggtcttggtcttgaacgtgagcgcgaacttgtggagcatggctacgcccgccgccgcgtgctcggcgcacactttgtctccgccgccgagcggggcggggtgtcggcgacgcgaattgcaggagtgcagaggtggggacggaggtgagtggtgggtgtgggtggttcggggcggtgggacggcggcgccgcagctggcggagaggaggtggagcacgagcgtgtccgcgcgctgcgcgagatcaagaaccagatcatcgggaaccgcaccaagaagctcctctacctccgcctgggcgccgtgtcgtcggttgtggtggcgctggcggagcccggagcctcgccggcggcgctcgtgcaggcggcggccgcggcggggagcttcgcgtgcacaccgaacactacctaatttcctgttcttccagaatccaagagccaccattctttttgattttctatttgatttcttaggctaatatgattgttaacaacgtaacattatgacatcatatgaatttttagacataggaaattgggaatgtgcttggtcttagccttagcatctctatattaatgcagtaatttacatgttttatcacattttgactgacttgtactcgtttaatgaaaacagatcagacctctctggaggcattacttccagaacacacagggtcttatctttgttatggatagcaatgaccgtgaccgtgttgttgaagccagagatgagctgcacaggatgctgaacgaggatgagctacgtgatgctgtgctgcttgttttcgccaacaagcaagatcttcctaatgccatgaatgctgctgagatcactgacaagcttggattacactccctgcgccagcgacactggtacatccagagcacttgtgccacaactggcgagggtctgtacgagggcctggactggctgtccagcaacattgcgagcaaggcttgaatatcaaatgcgaactgactaggagctccggatgtatcatggaaacttaggacagaatcgcctctgcaacctgttaggtgtcttctaccggcacaatatattttttgtttggaatatgtaatgatgttacggttcaacgtttattctaccctactatactgttggatgttctttgggcctgtttcattttgcacaaggattggagttccaatatcatgctacattttaaattcgtaccccatcgcaaattttaggatgtataccaaattataggatattccgacattttttggagagtccgagcatcttgagttggatcaaatttatatcataaaacatttatgatactaaaaagtatcgttatttttttattagttatattttta

SEQ ID NO: 99476 - DNA, 3138 bp, Zea Mays
cgcgaggcggccgaaactgacacactccctctccgctctctctctctctctcgcagccatgctcacacacacacgcaggcagcagtcacgctgtgggaggggcagagaagcgagcgacacaggaaactgacgtcgcttttgacggcctgctacataaatcccctcgcctgcctcccttcccatctccttccccgcaaaaatcgcccgggtgccaggtgcgcggcgcagggaggtcgcgacggattccgggcaagtgcatgtgagatccgatggtggcggctgcagcggcggccggcggcggcgccgacgcgggatgcggaggcggaggcggaggcggagggaaggacgcgctgttcgtggagctgtggaaggcctgcgcggggccgctgtccagcgtgccgctactcggggagaaggtctactacttcccgcagggccacatcgagcaggtggaggcatcgacaaaccatcttgccgagcatcagggcacgcccctctacaacctgccatggaagataccctgcaagctcatgaacatggagctgaaggctgagccggatactgatgaggtgtacgcccaactcaccctgctccctgataagaagcaagatgagaatacatctgcaagagtggagaatgaggaggcagaggaggaggtggtgcctcatgtgccaccagccacaagtgaggggcttcgcatccattccttctgcaagacattgactgcctcagacacaagcacacatggtggtttctcagtgttgcgccggcatgcagatgagtgcctcccaccactggatatgagtcaacatcccccaaatcaagaattggtggccaaggacctgcatggggttgagtggcggttccgtcacatctttcgaggtcagccacggagacacctccttcagagtggttggagtgtttttgttagtgccaagcgtcttgttgcgggggatgcattcatatttctcagaggtgagaatggggagttacgtgttggagttcggcgtgcactgaggcaccaaaccactatcccatcttcagtcatatcaagccacagtatgcatcttggtgttcttgcaacagcatggcatgcagtgaacactgggagtatgttcactgtctactacaaaccaaggactagtccagctgaatttgtggtttcacgagctaggtactgtgaatcactgaaacgaaattattcaatagggatgaggtttaggatgagatttgaaggtgaagaagcggcagagcaaagattcactggcacaatagttggaatatgtgtttctgatccatctggctgggctgactcgaaatggcgttcccttaaggtgagatgggatgaagcttcttctgttcctcgtcctgaaagagtttctccttggcaaatagaacctgctgttagcccatctcctgtgaaccctcttccagtcagattcaagaggtctcgttcaagtgttaacgcctcaccatctgatgtgtctactgtaaacagagaagttgcttctaaagtcatggtagagtcgcaacagaataatctcccaagggccttgcacaatcaaggaaggacacaattgacaggtcgataccgtgatagcactgatgtgaagactgctcaggatcttaccatgtggtcttcaggaactgagcaacagagaaacaatattgctgcccagacaaaacgatgtctggagggttggacgcaatctagaactccagaaggttacaatcaactgttctcggcatttcaaccactgaaggatgcacataatccacttcgtccttttcctaataaaatatctgggactcgctcaagtacctgggtcacagccgatgcccgttatccagctcaacaagccaatcacaacatgttacatggcacattgtcttttatgcctcatagcagtggttttaggatgattcaacagaataatctagtgacacctgaagctgcaaattttactgggaaatcagctttcacttcacttcagggccatgtcactgatcagtgctccacaggctggtttggatctattgagtcaaattcccacacagaccatgcatcgtcaagtttgatcaggtcccagcctttggttattggaaatgatgttcagaaaaccaaaggcacttcattcaaactatttgggattcctcttggcagtccagaaaaatctgaacctctggtatccccaccaagtgtcgcatatgacgggaaacttcaaacttctccaacagacaacaatgagccttgttcagaagctacccagaatatccagaacaaagtgcaaagtagttcaaccagaagctgcaagaaggtccataagcaaggcagcgccctcgggagatcgatcgatctaacaaagttcgcttgctacgatgagctgattgccgaactagaccagatgtttgacttcgatggtgagctgaagagtccttgcaggaactggttggtcgtctacactgacaacgaaggcgacatgatgctggtcggcgacgacccctggaatgagttctgtgacatggtccacaagatcttcatctacacaagggaggaagtggagaggatgaacccaggcgccctaaacgcgaggctcgaagactgcctgtctgactcgctgggaagagggctggcttccaaagagccccggagcggcccctcgacttcggctgtcgattctgagaaccgcgctaacttgtccagtcagtgagcccttttgaaagtggtgaagcagacaaaaggccacgtgtcagagtgaccggaagaacgagaaaggggtgtgtttcagtggtgtgtagtaggtaggtaattttgtgtgtatgcctccgggtaaaagccccgcggtacccagtttgtagatggtgcttctcctggtgctagtttcccgtcgtaagctggatttttttggggggtgtgtgccctgctctgtgtgctgacccgcctgggggtaagttgtagcagagcaggagaaagcaggcaagaaaccgctggtgcgcctgcttggccaatccttttccttgcggagcgctgtaaatagccttggatctgaagcgtagtaatgtattgtcatggtactcgaagtcatgctccagtttgtgttgggtatgacctgcaactgtcggttcgatgggtgcgga

SEQ ID NO: 99477 - DNA, 3202 bp, Zea Mays
cgcgaggcggccgaaactgacacactccctctccgctctctctctctctctcgcagccatgctcacacacacacgcaggcagcagtcacgctgtgggaggggcagagaagcgagcgacacaggaaactgacgtcgcttttgacggcctgctacataaatcccctcgcctgcctcccttcccatctccttccccgcaaaaatcgcccgggtgccaggtgcgcggcgcagggaggtcgcgacggattccgggcaagtgcatgtgagatccgatggtggcggctgcagcggcggccggcggcggcgccgacgcgggatgcggaggcggaggcggaggcggagggaaggacgcgctgttcgtggagctgtggaaggcctgcgcggggccgctgtccagcgtgccgctactcggggagaaggtctactacttcccgcagggccacatcgagcaggtggaggcatcgacaaaccatcttgccgagcatcagggcacgcccctctacaacctgccatggaagataccctgcaagctcatgaacatggagctgaaggctgagccggatactgatgaggtgtacgcccaactcaccctgctccctgataagaagcaagatgagaatacatctgcaagagtggagaatgaggaggcagaggaggaggtggtgcctcatgtgccaccagccacaagtgaggggcttcgcatccattccttctgcaagacattgactgcctcagacacaagcacacatggtggtttctcagtgttgcgccggcatgcagatgagtgcctcccaccactggatatgagtcaacatcccccaaatcaagaattggtggccaaggacctgcatggggttgagtggcggttccgtcacatctttcgaggtcagccacggagacacctccttcagagtggttggagtgtttttgttagtgccaagcgtcttgttgcgggggatgcattcatatttctcagaggtgagaatggggagttacgtgttggagttcggcgtgcactgaggcaccaaaccactatcccatcttcagtcatatcaagccacagtatgcatcttggtgttcttgcaacagcatggcatgcagtgaacactgggagtatgttcactgtctactacaaaccaaggactagtccagctgaatttgtggtttcacgagctaggtactgtgaatcactgaaacgaaattattcaatagggatgaggtttaggatgagatttgaaggtgaagaagcggcagagcaaagattcactggcacaatagttggaatatgtgtttctgatccatctggctgggctgactcgaaatggcgttcccttaaggtgagatgggatgaagcttcttctgttcctcgtcctgaaagagtttctccttggcaaatagaacctgctgttagcccatctcctgtgaaccctcttccagtcagattcaagaggtctcgttcaagtgttaacgcctcaccatctgatgtgtctactgtaaacagagaagttgcttctaaagtcatggtagagtcgcaacagaataatctcccaagggccttgcacaatcaaggaaggacacaattgacaggtcgataccgtgatagcactgatgtgaagactgctcaggatcttaccatgtggtcttcaggaactgagcaacagagaaacaatattgctgcccagacaaaacgatgtctggagggttggacgcaatctagaactccagaaggttacaatcaactgttctcggcatttcaaccactgaaggatgcacataatccacttcgtccttttcctaataaaatatctgggactcgctcaagtacctgggtcacagccgatgcccgttatccagctcaacaagccaatcacaacatgttacatggcacattgtcttttatgcctcatagcagtggttttaggatgattcaacagaataatctagtgacacctgaagctgcaaattttactgggaaatcagctttcacttcacttcagggccatgtcactgatcagtgctccacaggctggtttggatctattgagtcaaattcccacacagaccatgcatcgtcaagtttgatcaggtcccagcctttggttattggaaatgatgttcagaaaaccaaaggcacttcattcaaactatttgggattcctcttggcagtccagaaaaatctgaacctctggtatccccaccaagtgtcgcatatgacgggaaacttcaaacttctccaacagacaacaatgagccttgttcagaagctacccagaatatccagaacaaagtgcaaagtagttcaaccagaagctgcaagaaggtccataagcaaggcagcgccctcgggagatcgatcgatctaacaaagttcgcttgctacgatgagctgattgccgaactagaccagatgtttgacttcgatggtgagctgaagagtccttgcaggaactggttggtcgtctacactgacaacgaaggcgacatgatgctggtcggcgacgacccctggaatgagttctgtgacatggtccacaagatcttcatctacacaagggaggaagtggagaggatgaacccaggcgccctaaacgcgaggctcgaagactgcctgtctgactcgctgggaagagggctggcttccaaagagccccggagcggcccctcgacttcggctgtcgattctgagaaccgcgctaacttgtccagtcagtgaggcagcttcagcagcaatgtctagccttggctgcacggaagaactactgaccctaagctaatcttgtgtgtgtttcacttcttgcagcccttttgaaagtggtgaagcagacaaaaggccacgtgtcagagtgaccggaagaacgagaaaggggtgtgtttcagtggtgtgtagtaggtaggtaattttgtgtgtatgcctccgggtaaaagccccgcggtacccagtttgtagatggtgcttctcctggtgctagtttcccgtcgtaagctggatttttttggggggtgtgtgccctgctctgtgtgctgacccgcctgggggtaagttgtagcagagcaggagaaagcaggcaagaaaccgctggtgcgcctgcttggccaatccttttccttgcggagcgctgtaaatagccttggatctgaagcgtagtaatgtattgtcatggtactcgaagtcatgctccagtttgtgttgggtatgacctgcaa

SEQ ID NO: 99478 - DNA, 3100 bp, Zea Mays
cgcgaggcggccgaaactgacacactccctctccgctctctctctctctctcgcagccatgctcacacacacacgcaggcagcagtcacgctgtgggaggggcagagaagcgagcgacacaggaaactgacgtcgcttttgacggcctgctacataaatcccctcgcctgcctcccttcccatctccttccccgcaaaaatcgcccgggtgccaggtgcgcggcgcagggaggtcgcgacggattccgggcaagtgcatgtgagatccgatggtggcggctgcagcggcggccggcggcggcgccgacgcgggatgcggaggcggaggcggaggcggagggaaggacgcgctgttcgtggagctgtggaaggcctgcgcggggccgctgtccagcgtgccgctactcggggagaaggtctactacttcccgcagggccacatcgagcaggtggaggcatcgacaaaccatcttgccgagcatcagggcacgcccctctacaacctgccatggaagataccctgcaagctcatgaacatggagctgaaggctgagccggatactgatgaggtgtacgcccaactcaccctgctccctgataagaagcaagatgagaatacatctgcaagagtggagaatgaggaggcagaggaggaggtggtgcctcatgtgccaccagccacaagtgaggggcttcgcatccattccttctgcaagacattgactgcctcagacacaagcacacatggtggtttctcagtgttgcgccggcatgcagatgagtgcctcccaccactggatatgagtcaacatcccccaaatcaagaattggtggccaaggacctgcatggggttgagtggcggttccgtcacatctttcgaggtcagccacggagacacctccttcagagtggttggagtgtttttgttagtgccaagcgtcttgttgcgggggatgcattcatatttctcagaggtgagaatggggagttacgtgttggagttcggcgtgcactgaggcaccaaaccactatcccatcttcagtcatatcaagccacagtatgcatcttggtgttcttgcaacagcatggcatgcagtgaacactgggagtatgttcactgtctactacaaaccaaggactagtccagctgaatttgtggtttcacgagctaggtactgtgaatcactgaaacgaaattattcaatagggatgaggtttaggatgagatttgaaggtgaagaagcggcagagcaaagattcactggcacaatagttggaatatgtgtttctgatccatctggctgggctgactcgaaatggcgttcccttaaggtgagatgggatgaagcttcttctgttcctcgtcctgaaagagtttctccttggcaaatagaacctgctgttagcccatctcctgtgaaccctcttccagtcagattcaagaggtctcgttcaagtgttaacgcctcaccatctgatgtgtctactgtaaacagagaagttgcttctaaagtcatggtagagtcgcaacagaataatctcccaagggccttgcacaatcaaggaaggacacaattgacaggtcgataccgtgatagcactgatgtgaagactgctcaggatcttaccatgtggtcttcaggaactgagcaacagagaaacaatattgctgcccagacaaaacgatgtctggagggttggacgcaatctagaactccagaaggttacaatcaactgttctcggcatttcaaccactgaaggatgcacataatccacttcgtccttttcctaataaaatatctgggactcgctcaagtacctgggtcacagccgatgcccgttatccagctcaacaagccaatcacaacatgttacatggcacattgtcttttatgcctcatagcagtggttttaggatgattcaacagaataatctagtgacacctgaagctgcaaattttactgggaaatcagctttcacttcacttcagggccatgtcactgatcagtgctccacaggctggtttggatctattgagtcaaattcccacacagaccatgcatcgtcaagtttgatcaggtcccagcctttggttattggaaatgatgttcagaaaaccaaaggcacttcattcaaactatttgggattcctcttggcagtccagaaaaatctgaacctctggtatccccaccaagtgtcgcatatgacgggaaacttcaaacttctccaacagacaacaatgagccttgttcagaagctacccagaatatccagaacaaagtgcaaagtagttcaaccagaagctgcaagaaggtccataagcaaggcagcgccctcgggagatcgatcgatctaacaaagttcgcttgctacgatgagctgattgccgaactagaccagatgtttgacttcgatggtgagctgaagagtccttgcaggaactggttggtcgtctacactgacaacgaaggcgacatgatgctggtcggcgacgacccctggaatgagttctgtgacatggtccacaagatcttcatctacacaagggaggaagtggagaggatgaacccaggcgccctaaacgcgaggctcgaagactgcctgtctgactcgctgggaagagggctggcttccaaagagccccggagcggcccctcgacttcggctgtcgattctgagaaccgcgctaacttgtccacccttttgaaagtggtgaagcagacaaaaggccacgtgtcagagtgaccggaagaacgagaaaggggtgtgtttcagtggtgtgtagtaggtaggtaattttgtgtgtatgcctccgggtaaaagccccgcggtacccagtttgtagatggtgcttctcctggtgctagtttcccgtcgtaagctggatttttttggggggtgtgtgccctgctctgtgtgctgacccgcctgggggtaagttgtagcagagcaggagaaagcaggcaagaaaccgctggtgcgcctgcttggccaatccttttccttgcggagcgctgtaaatagccttggatctgaagcgtagtaatgtattgtcatggtactcgaagtcatgctccagtttgtgttgggtatga

SEQ ID NO: 99479 - DNA, 1876 bp, Zea Mays
acttcatcatcataattgcattaaagaaaccaagtccaagtccaggcaacagattacgcacgactactaccaccaccaccagtatcagacacccgccatcttccgtctgctgcccgccaccacccccgccacttgcttctcagcaatcaacagcctgtggaacattagcactagcaatccgccaccgccatggcaagcagcagcagcagctggtggacttgcgttcctggaggagctccggtgccatggccgggatttgctgcagccacactctacaattgtgtaggattcatcaggtggttgggaggagtacaactgagctgctacattagtttcaccatctacgctcaacaactgatactgcactgactatcgggcctctctctctcacgttgctaaaacgaattcactttgctcctacctactgtactggaccctcccctcattaggtactgccaatgcaacaaaagcttccctctctctctctctctaccttgcttgatcgcttcacgccagccagccggccggcccttgtctcgtcacgggcctctgctggtggcctcctgctccggctggggcgacgcgtccgcaagccaccggctcgacacggcgggcgacggagcgcggcgccttcgcccggcggcgtccgcgcgcgcgaagaagtcgatgaacccgcgcccgccgcatcctccaccgccgcccgcgctctcgtcgccctcgccgtcgctgcggtcgccgggccgcctcgcgacggcggcggagcccttcttccggaacacgcggcacagcacccagccctcggccggcgcccgcgccacgccgtctccgtcggcgtcggcgtggcggcggcggcacggcgcgagcccggcgcccgccagccggtactcgtgcatcacccactccgtcttgctccccgtcggcggcttcccgcggtagaacaccagcgagcgcttcatgcccaccagcacgccctggccctggccctgcccctgcacgccccggaccgccacggccaccggcttctccttgcccgtcgccttccagtacccggcccccgtggcgcggttcgcgcgccggcccttcacgtacttggcctccttgcacgtgaagaagtagcgctcctgctcgccgaaccctgccacagtgccaccaccgccgcccccaatccacaaagtccagcaacaaaaccaatcagccccagccccagtccgagatgattggatggatccctcactcactcacctgggggcagcaggtcggacgggtcgtgcgccaggatgcggacgtccgggatgtcgacggcggccggcagcggcgaggccagcgcgcgccgccgcaggtagtgcacgatcagctcctcgtccgtcggccggaacctgaaccccggcggcagcgtcgccttcgcgccctccttcttcacctccatcgtcggaagctagcgacccaacaccagtagctagctagactcccctacgcgcctacgcctacgcctacgcctcctcgcctgggtcaaatcgaccgacgactagtggcgctcctcctctggcgctcgacaacttaacgccaccgcgcgcgcgcgcgcgtggacacggcacgcacggaatgcgcggtctttgcaggggacgacgcagcgcttgcttgatgggtccgggtattggtggtggtgggttacgtgccgcccaatcgaggggagcgctttcatttgcgtgcgtggtcgaggggggaggaggagggagacgacggggatcgatttatagtaggagacggcgacgaggaggaaggaaggcgaggagagtggagtgtgggagggtcgcagttgcagtggcgtgagggagactcaaccgggcctagacggaaggaggaggaggaagcgggg

SEQ ID NO: 99480 - DNA, 405 bp, Zea Mays
atgttgttacttcacgcatttcctggtttcatcgctgagcagtgcggcggcgggcccccgtcgtcgtcggcaacgacaaccaggtggcgtgagctgcagggcaacaactcgtggaacgacctcctggacccgctggacatggacgtccgcaggtccatcatctcctacgacgagctggtgcaagccacctacgataacttcaaccgagagcggcgacatcaacttggacaccgatgcaggaacctcacactggcggcgacgagaccgaaggtagcgacgcgacggaagacgcggctagccatgggcggaggcatggtgcctatcagtgaatggagggaaatggcggcagcgcggtgccgtggaggaaaattggagacaaagaaatgggggtggtgtttagggtaa

SEQ ID NO: 99481 - DNA, 772 bp, Zea Mays
gaagcccaaacccttcgaaaacccttctcccgtcctgctcactcccgtctccgagcgccgccgccgccagcgccgacacgcgataaacaagaggaagaagaggccaaccgatccagcagcgatggcaggcgggggcatggtggggggcgctttctgggcgacgcgggcgctggaggtggtcaagcggaacgattccccgggcctattgtggaagcgcatcaagctcaccaccacccgcaagaacaacgccaagaagcgcctcaagcggctctggcagaatgaggcggttataagagcttgtggtgcatcagcgtctgacgcggcttccacagctgacaaacaacagtagcttggagcacaactggagcaggtcctgtgacctacctatgcttgataagctgaagccttgactttgctgtccacccccagtgttttgattttgctgtcctcggattgaatactttctccatccagaggacaacatcattgcttgttaccaggtgcaaccttgcccccccccccccccccccccctcctctctcctgcttacatcagttccgagcacctttgcgccctcctgaattccatcgattttcgttgtttccacgttacttctggaaggagaggaaaaaaaaaacattttgagcctggttgtttttcctctattctgcatcatgcctaggtcagtctgcacatgctcatattgctattgtcttctgcatgtaatgtaatgtaatggaatgcattgcaccggttgctgtcgttgacatca

SEQ ID NO: 99482 - DNA, 1161 bp, Zea Mays
atggcgtgcatgtgggccttgtcagcgcggtcctccttgccgctctgcttcgcccgacatgtgttccctgtgcaatgccagtctaacttcacaaagtttgtcacatcagcatgtttggttagagctttaaatgatgaaagaatgaaccatgataacattgagattgaagtacgccatgaaggaaatgttgccatagggaatgtggtagaatatgacctggatcatgtaattgttgttgtcgaagtcacattcacccttgatgtttattgcgccgtacctcttagttatgcggaagaattgatgcctggtagaaaggttgtagcagtagggcgtgacatctctggcaaattaatggccacaagtgggacacttactgattcaggccaatctgaaggttgtggacatcttatgttctctacatgtaaattatctgaggttatgcaggggggcgccctttttgaatttgatgggaactttgttgccatgaatcttttctcggatatggaaagacccatattcttaccaagggatatagtctttgaacgtttgaaccatttacggacatccaaggaaaagataatatttcttgcaatgttgaagttagtcagggctgtcaaaagagtgcaaggagaagaagagtggtctactgtgcagttagaattaacacatgccaatgctaagcaaccttgttgcagtttgcaccaggataagcaaggtagcatgaatgttaatgcttttgaagaacactttggcgacaaatatcctaatggtgtctggggtgaattcaagaaagaaatttcttctaacatatcttacaccgttgtcgcacttgcttcgttccatggtgaatcgaagttctttgcatgcacaggatttttcattgactatgatgggtgtctgactattctgacctcagcgagcttggttagagacccggatggcgcaaatgagattgctgtgattggaggcccccttgttgatttggatggaagatttatgggcatcaattactacgatacggaaataggaacaccgttcctgttttttcatgatatctggacaattttgtgtgatttgaagacaaaaaaggcgatggctggtagtcatgagggccgtctgagaaatgacaacggaccaccaaacataaatttgctgacctga

SEQ ID NO: 99483 - DNA, 2334 bp, Zea Mays
tcatgtctgatgagaattaacataaaggctcaattgggtcctgaattaataatagagtgaaaattaatccagaggctctattagaaccttcaattagtaataccaagatatatataagatagtagagtatagtttaaatgttggcattgttcattctttcttttgttatttaatttatgctttccacggtggttagtggttacttctgaagggtccaaataatgcatgaagagtttgaggacaagaagtctgccctaaaaatagcgatgcaaaggcatggtgtccaagccatacatatagcgcactaattttatcagcagaacaatggtatttataggtcctagtgcccaggcaacaagagacacgaataaagcatcgatcacgacaagatggcgtgcacaaacaatgcgatgagagccttgttcctcctggtcctcttctgcatcgtgcatggtgagaaggaagagtcaaagggcatcgatgcgaaagcgtccgggcctggtgggtccttcgacatcaccaagttgggcgcctccggcaatggcaagacagacagcacgaaggctgtgcaggaggcatgggcatcggcgtgcggcggcactgggaagcagacaatcctcatacccaagggtgacttccttgtcggacaactcaacttcacaggcccttgcaagggcgacgtgaccatccaggtggatggcaatctgctggcgaccacggacctaagccagtacaaggaccatggtaattggatcgagattctacgtgtggataacctggtcatcaccggcaagggaaaccttgacgggcagggcccagccgtgtggagcaagaactcctgcaccaagaagtacgactgcaagatccttcccaactcgctggtgatggacttcgtgaacaacggggaggtgtccggggtcacgctgctcaactccaagttcttccacatgaacatgtaccggtgcaaggacatgctgatcaaggacgtgaccgtgacggcgcccggggacagccccaacacggatggcatccacatgggcgactcatccgggatcacgatcaccaacaccgtcattggcgtcggtgacgactgcatctccatcggccccgggacctccaaggtgaacatcaccggcgtgacctgcggccctggccacggcatcagcatcggcagcctagggcggtacaaggacgagaaggacgtcacggacatcaacgtcaaggattgcactcttaagaagacgatgttcggcgtccgcatcaaggcgtacgaggacgccgcctccgtgctcaccgtctccaagatccactacgagaatatcaagatggaggactcagccaaccccatcttcatcgacatgaagtactgccccaacaagttgtgtactgccaacggcgcctccaaggtcaccgtcaaggatgtcaccttcaagaacatcaccggcacctcctccaccccggaggccgttagcctgctctgcactgccaaggtcccatgcaccggcgtcaccatggatgacgtcaacgtcgagtatagcggcaccaacaacaagaccatggctatatgcacgaacgccaagggcagcaccaagggttgcctcaaggagcttgcatgcttctagaccctccatcgactgacccatctctctagttataatttttctctcgtccttgcattgcccattagatgctatccattggtaacgcacaacagtaaaacgacagacatccgacagctatattatgttcgacggtgtaacaccctgaatttgagggtataaaatttcttctccaaataccaaccaaatttaggggttacctcttgtctctctctctcttttccttttgattaaaagtaagtgaattaggcgagggtttaattatttattttgtcaaaacttatgtgagtcatgaaatgttgcatcatgttgagcctaaattattcttttgtttgatgcacatgtttgaattggtttgaatttgaaatttggtttgagtttgatttgaaaaccatagagaaattaaaatagaaaagacattagaaatttcaaaaaaagaaaaggaaagcagctcaaacctcctccctccttggcctttcggcccatccagcccaattaaccgcccgcatccgctgacaagcgggccccacctatcggcgccacgctcgctcgccctctccctctcttctcagtgggaccgcctcgtcagcaccgcgcgttccctcgctgactcgcgacccctattgtcagacccatcccctcccctacaactgtcgcgcctgtgcccatggcgtgccccatgcggtcaaagcgtgcccacgtccccacgacctgc

SEQ ID NO: 99484 - DNA, 1437 bp, Zea Mays
agctgcagcagcaactccaccgccgcacgcctcgcgagcattcgcctccctcatcgcccgccgccctccgcgccaccctcaccctcaccagcacgtgcgaccgcgagagggagttggggcgaggaccaccctcaccaaaccctactgcgaaacaactgccggccgcgcgccgtgaggatacccacgtcgtcgttaccggcgacaccctccaccgtctccagctcctccagggtcccagcgcgatgaggatgagggcgccgtcgtcgaccggattgaaggcgatcgtggcatcggcctggttggccgtgctgcttggttccgcctccctcgccgcctgcgatcaggacgcaggattctcgccgccgccgaccgccgtaccagcggttccgccgcgcccggcactccgcgccgccgccgccgctgttcccgtgccggtgccagctccactgccccgcaagatactccgctcgccaggcgtcgtcgctggcggtagcggagaaggagcagccgcagcagggccggtgcggccgagccggatggacgaggggtgcgcgggcgcggaggacatcgccatctaccagcgccacgcgtcgtcgctgccgaacggggtgccggcgtacaaggtggacgtgatgaaccagtgcctgggcgacccgggcggcggcgactgcgcgatcgcgggcatccacgtgcggtgcgggtggttcagctcggtgaacctggtggaccccctcaagttcaggcgcctgcgccacgacgactgcctcctcaacgacgggcggccgctgctcggcggcgacaccatctccttcgagtacgccaactcgttcccgtacgagctctccgtccgcgtcgccacgtgcgtcgaccccaccaccgccccgtagtaggccgttggctggcgccgccatccatgtcgctccgtccgcagtccgcaccacacacgataagcatagaaactccaccctcataatactactaccacgagtattatataaaatactagtacaagtcagtcagttgcagcagtaggacagtgcaaggcaggtctttggttcttggatccaaatgtaattagctggtggtttaggtgattttgttggactgtaggatcgggcgctcgagggggcggcagggactccgcgttttgttcttttgccgatgttccaaggtctcgtctcacgtgtacatggacatggcacggatcgagcggtggaagaagcctttttttttttaaaaaaaagtactagtgtgtaactggatgcgggatgtgaaatttttgggcaaccaggccggcctgctgtaatgcaaatcttttgcttttgtttcaacagggaagtgcaaagctgctattgaaggaagcgagtgcttttcgtgtgtgttggcatttgctcgctttcttctttttggttgagcttctgctgctgtctgttgccg

SEQ ID NO: 99485 - DNA, 1200 bp, Zea Mays
aacacatattttgaacgaagccacataatacgtttattccaaatatctcctcgctgtctcctggctcaattttcccatgcccatcctcaaaacccaacccaaccaacttgagcgcgcgactcaaggcgccacaccggcaccggcatgcaccatgggtcctaccacagctcgcctccttcccctcctgcccttcgtcgccgtgttcctcctcgcctcccccgtggacgccgactccgccctggacgcggccacgcggtgcgcggccacgatcgtgtccatctcgccgtgcctgccgcacgtggcggccgtggcgccaccgctggctagctgcccgcctgccccaaccgacgcctgctgcgtcgccttcctccgcgctgtatccccgttggcagcgggaggcggagaggagggctgcctgtgccacctgctccgcaacccgcttctccttggctttcccatcgacgccgcccgcctcgccgcgctcctccctgcctgcgctgcgggaaatgccttcgccgccgccaacgtggaggccgccaccctcttcgctgacgcctgccgtgatctaaaggtgctgccgggattgcatttcatgccgcaatcaacaaccgggccagaaatttcaccagctgctgtccctgaattgatgtccaagccaaaggaggcggttccacttccaccagctggatcaatggttcgttcaggcactgaggtcaccagttcccgtggtattcctactgcagcattgatcctcgcggcagcaggagctgttatcacatagttcttgtgatgtttaagtgccacttgatactctcgtcggcctcgctcgatcttgatctgcgtttgtcgtgcctagctttgagcctttgacgattcagatgatctgcatttgccatgcctagcactttgcggtctccagtgttgtacgtggcagagttgtgtcacttgacacttcaatggaatctagtgatcagctgataccttcagttgtttctcattcagaagcaggtcaaagatctactcagtcttgatgagatcgaagttgaaacccgccgatatatcaggagttgtggttcagggccaagagacagattgtgtgccccggcccccgggacaagtcgacaactgcgaacttggtttcatcagacgagtcgtcactttcctatcagacatgcatatataagatatcgattttttata

SEQ ID NO: 99486 - DNA, 2375 bp, Zea Mays
ccttttcatcttccaagtctctgccatggagttggatgctacactcctatcgatctcccttgttctcataggcctgctactacacaccactcaagccaccacccaagaaaattgtgaaagatctggcctatgcacgtatattgtacgtgtgagccctcatctgaatatttccatggatatgagccgtatggaccttgaaagctggtatagatcattcctcccaccacgtatggacagatcacctcgatcaacatctccattcatccacacctataaagaagccattctggggtttgctgtagacctcacaaaggacgacgcggagtatgtcaagagcaaagatggggtcctcatggtgtacaaggacatccttcttccgctcttgacaacccacacgccagatttcctaagcctacgaccaaacggaggggcttggagcagcttaggcatgggcgagggaagcatcatcgggctcctagacacggggatcgactccgcacacagctctttcgacgatgagggcatgtccgcgccgccttccaggtggcgtggatcctgcaagtttgctactagtggtggtcactgcaacaagaagctcattggcgcaaggtcattcatcggtggcccaaacaatcctgagggtccactggatgatgtcggccatggaacacacaccgccagcacagccgccggcaggttcgtgcagggtgcaagcgtgcttggcagtggcaatggcaccgcggctgggatggccccacgcgcgcacctcgccatgtacaaggtctgcgacgagcagggctgctatggctcggacatactcgccggactggacgccgccatcgtggatggcgttgacatcctgtccatgtcgctcggcggccctcaacagcccttcgatgaagacattatcgccatcggaaccttctctgctgtaaagaagggcatatttgtgagctgctctgcagggaactccggcccgtttcctggcacgctgagcaacgaggagccatgggtcctgaccgtgggcgcaagcaccatggaccggcagatggaggccatcgtgaagctaggcgacggccgctcgttcgtcggcgagtcagcctaccagccacctagccttggccctctacccctgatgctccagttgtctgctggaaacataacggggaatgttgtcgcctgcgagcttgatggctctcaagtcgcaatcggacagtctgtcaaggatggcggtggtgccgggatgatactgctggggggtgatagtactggtcacacgactattgcggcggcccatgtcctgccggcgtcgtatctgaactcccaagacgccgccgccgtcagacagtacatcaacacgtccagcaagccgactgcctccatcgtcttcaacggcacggcgctgggcaccgctccagctcccgtcgtcgcctacttctcatccagggggcctagcactgcgagccctggcatcttgaagccagacgtcattgggcccggcgtcaacgtcgttgcggcatggccgttcaaggtcgggccaacaacaaacaccgccggccgtgaccgtgacgacgacgaccaacatggagcagcagcagctactttcaactccgtatctggaacatccatgtctgcacctcacctcagcggcatcgcagctgtcatcaagagcgcacaccctgactggtcgccggcggtgatcaagtcggcgatcatgacgacggcctatgtcgtgtatggtaacaacaaaaaccagccgatcttagacgagcagctcagtccggcgagccatttcagcgttggggccggacatgtcaacccttcgcaggctgtgagcccaggcctggtgtacgacaccgacgtggagcagtacgttctgtatctctgtggcctaggctacacagactctcaggtggaaacaatcacgcaccagaaggatgcttgcggcaagggacgacggaagatcgctgaagccgagctgaactacccttcggtggcgacaagggcgagcgtaggagagcttgtcgtgaaccggacagtcactaacgttggagatgcggtgtcgtcttatgccgttgagattgacttgcccaaggaagtcgaggccactgtgtcaccagcgaagctggagttcaccgagctcaaggagaagaagacgtttactgtgaggttaagctgggatgcgagcaaaaccaagcatgctcagggatgctttaggtgggtctctagcaagcatgtggtgaggagccccattgtaatattctagtgtaagatcgtcgtcaagataggactcgcgtggtgactgactggtgagagtctgctagctacttgttataataaaaacttagtccgcctgaaatgtctgtatcgttcct

SEQ ID NO: 99487 - DNA, 342 bp, Zea Mays
gtcgttaccaacccacaagcttgggccatagggccaggcaacctggtcatcagccaccttgtccaacccttcctttgtttgaacttcaccaacggttcgtagaggtcgaaggtgaagatctcatctgggatgggctttttccccgacgcaatggtcgatagctcgtcggcctcggcgttgaaacgtatgtagctgtggtgcagctcgaagcctttgaacttttcctctagcttttgtactttactgtagtatgtgcacatccacatgtcgtgtagctccattgccttcatgacctagtcgatgaccaacttggagttgcccctaactaggagccgctgcaca

SEQ ID NO: 99488 - DNA, 420 bp, Zea Mays
gtcgcggcgtgaaaatgataagtgaaatattaattatgttgaaacttcgatacataaaatgatttcacgtgtaactcacgcaataaatgggagcggaatggaagaaacaccaacatcttgtggattttatagtccaaatgtttttgagaactatatgtggatatatgttgtgtccccgtaaaaattcatgaattttttagactatttggtgtattattaatttcttgttgtagaaaatcattaaaatataattaaattcataaaaatattgtagcgtcgaccggaaattgcaaataagttaccaatattaataaatagtttataaaaagataatcctaagttcccacatggatagaatcttaagtccccacatgaaaatgataaagtttattattttgatataaatttaaacattatttc

SEQ ID NO: 99489 - DNA, 662 bp, Zea Mays
atggtgagattcagctctgatgatgctaaggaggtagtccattaccaaacaatctcatcaaagagcttagctaaatctgttctcgaggaaggtggctggtcaaacttcatgtgctcaagggaggatactcagaataatgttgatgttgccattgtttttattggctcaaagctgcaatcgtcagacatatctaaagataagcaagttgatccagctttagcagacacactgaaggtaatcataggcactcatctctcttagatactgttctatatgcatggtacttgagttattctgcgctactactgacactactaaattggagccttggagtctggagcaaaaaaaggggtggctgtattctcaaggaacatgagaccactgagctctggagtgaatgaaggacgtcgtcgctctggagtgaatgaaggacgtcgtctttggaagtcagacatcacctagagctagggtgtccattcttgacatgtttctcttagtgataggtggatactgtctagctaggtatagagtcttgagggattgatggacgcatgcatctccaattcctgtgtgttgtattactactggtacaatctccaattcttgtgaacttatgtatttggactgtgaatttgtgatatgaacatatatcaacgtgtttg

SEQ ID NO: 99490 - DNA, 612 bp, Zea Mays
atgactgacttcagaggagcggaccagttgccagacccgttggctgcacacacaatccccggtaaagatgcattgatggaggcaatgtgtgccggggttcccaaggaaatgaagagctgtcccagcctcgaggaattgcagagtcccctgattaccaatctgcttgagcatgttgagggtgaaacagagttactcctctccgatcctacagagaacactgagcctaacaatctgaatgaagttgggggcataacctctgatctctggaccatatgtgatcatcaagagaatggcagtcagcttccccaggacactctatacacggatacacatccaatggctgaaggttcgcagatgggacatgctaataaagttgaagctccagattgcaacaaaccatctaataatccaatcaaagcatttgaggcactgcaagaaggcatgattgtgaaatctttgcactgctgcaccagattcttcaaagatcaaactcttaaaagttgcatgcagcaatggcaaaaatggaagcacaaagagcaattgtggagatatatgagtttcccagaatccaaagcaaatattagactaactgcgttagaatatttactgtag

SEQ ID NO: 99491 - DNA, 1413 bp, Zea Mays
gcagctcctacatagacacctcaaagcgagagcagcatcgtcgtcgtcgtcgtcgactctcgtctctctgcttgcacacgacacgccgcgctcgagaccacgagtccagatccgtacatcctgctgcccattggtccactctgccgccactctatttttctatatacaatttcctcctgactcctaagtcaacttgttccatcatctctctagcagtctagctcacatctccgtctccgtctcctgtgagatcacccatcactctagctagtttttatctacaatttccttctgagtcaactagttctattctatctctgtacctcacttctcccccgagatcacctcgtgtgtctgtctgaccttccacacagtagccgccgaccaagctagctagctagccagaggggcacggagcgcagaagctagcatgaggtttcgcagaggcagcaagagctctagcaaggccaagaagggcgccgccgccgctccgtggcagaacggagagcgcaaggtcgacggaggagggcccggctccaacagccggcaggtcgcgccggacgacgacaccggcatcgtcggaaacgtcgacgacggtagtagcagagacgagacgttctatgaagccaccgcctggttggaatcagactgcgaagatgatttctacagcgtcaacggagatctgacgcctgcgagatcgttcgcatcccgatccagcggccggaacactccgccacctagaccccgcgatctaccgacgctggcggcgatcctcaaggccgaacccctgaagccgcaaaggaggctgggcgacctcctgcgggaggcgcaagacgacgatgacgacgacaacgacaccgccgtcgacggcctctccagagacgactccttgcgcatgggcgcggaggccaaccggtgctgcgtgccgcggctcgcgcgggccattagctgcaacgggaggacgcagcgcaagtgaagtgttaatccgtgccttgttgaacagacatgccagaaaagatttgccgcccaaatgtgtacatagaccaaatgactgcaccggaacagtaaaaagaaaatgatttcatgcctgtatcacgtagattcaaggatttgatgcctgcttccagccggacagatgctacagggaaactcgcccggatgaaaagaacattatttggatgtttgagcacgggcacgtcttgcttattaacatctcggaaatattctgccatagttagggcagttaaaccaactctcatacgagctcccggcggttcattcatttggccatagactagagctacctttgattcctcaatatttttttcattaattactccggattccttcatttccatataaagatcatttccttcacgagtccgttcccctactccgccaaatacggaaata

SEQ ID NO: 99492 - DNA, 1410 bp, Zea Mays
atagaaggaaaaatttagagacagtcgctgcggatagttgttccatattcgaaaaagcaaaaatgatatgcacgtcacaatagttgttccccagatttgttttgtcacgcgccccgcccgacgcccgccacggcgccaccatgtcgcaggctacggaggtcgtcggaaacccgtacgccgccgagctcgctgcagccaagaaggccgtcgccctagcggcccgcctctgccagagagtgcagcggagcattttgcactctgacattcaatcgaaggcagacaagactcctgttacagttgcggattatggatcacaggtactggtatgtctggtcctgaagaaggaattgccttctcactctttctcaatcatagctgaagaggattcaaaagacttgagagaagatggtgcccaagaaattatagaacacattaccaccctcattaatgaaaccatcgtaaatgatggttcatacaacatgtcgttatctaaggaagatgtgctttctgcaattgatggtggtaaatctgagggaggtccatctgggcgacattggatattagacccaatagatggcactaaaggtttcataaggggagatcagtatgcagttgcacttggactacttgatgagggcaaagttgttctgggtgtgttgggatgtccaaatcttccattaaaatcaacaaacaagaacaatagcagctcttttggggatcgaataggttccctcttttttgctacaattggttgtggagcgcaagttgaggccttagaaggatctgagccacaaaagattagtgtttgctccaccaataatccagttgacgcctcattctttgaatcctttgaagcatcacactccaagcgtgatttaactagctccattgcagagaaacttggtgtccgagctcctcctgttagaatggatagccaagcaaaatatggtgccctagcacgtggtgatggtgccatttttctgcgcatcccgcacaaaagttacatagaaacagtttgggatcatgcagctggatcaattattgtcacagaagctggtggcatggtaaaagatgccgcaggaaacgatttggatttttgcaaaggtagatatcttgatcgtgacagaggaattattgcaacaaacaagcatttaatgccactagttctaaaggcggttcaagaggctatgaaggaggaacagtaggctgctgtgttcatggagcagttgcaatatttgttatgacatttcctgtttgaatcttaatattagttttgcacaatctcgatgtgcggaaaagttgttgtacttgtaccatatgctagtgtatcgtgtgagtcatatgccactcacatactcacatttccttatctcaacaaatggatatgaatttacctgattgggtttccta

SEQ ID NO: 99493 - DNA, 1062 bp, Zea Mays
ggctttggctggcctccatcgttctcgactagtacagcccgggcgcacgcagagacagagcagaggagtagcgaaacatcctgacgaatcagcaggagagaaaagtcggcaacgttctcgactagtacacacccgatcgaagaggaagaggaagaggcttgctctgcatccagcatatattccatggcgccggcagacatggcggagccggccatgacgacggtgagcagggtggaggacgcggggcggatgtcgtccatagagtgggagcccaagacgctcaccctcgcccagatcaagttcgcaagggaggcggcgctgtacgtggtgagcaccaagacggagcaggaggcgatcaggatcttcaccgagggtcttaagcccgtgcggatcatggccgtcagcaagtccactagctccatcgactcctcgtcgtcggacgacgacgtcgagctcggcgcctgctgctgctcctccaccaaaggctgtcgcggtggcgggagcaaaggcggccgacggcgccgctccatggacgacagggacgtcgctacaacgccattctagctagctagctagctacttgttcctttatttacacgtaaggtcgtagctgtgtgcgtactactagtttacatatatagctagtagagtctactgcatgtctgtctttcctttttttttcttttcctcgatcccgcctgttttaattacttccctttggctggcctggttttgtttaaaatagccggcgagtttggaatagcgcggcgattttttgaggcataactaggctctcttgattagtacttagggggtgtttggtttctagggactaatttttagtctctacattttattccattttagttccaaaatttccaaatatggaaactaaaactctattttaatttctatatttgacaatttatatactaaaatggaataaaataaagggactaaacattagtctcttgaaaccaaacacccccttagcttcgctccttgcttggacacaagagatgtaaataccagaaagctgctagcactgtacattactgcctt

SEQ ID NO: 99494 - DNA, 671 bp, Zea Mays
acggcttcatgatgaagagcgcctcgccggcgcgggacgacgctaccgacaccatcaagacttcctcggccattgacatcgaccctttcgaccacaagtccggcggggccgcactaccaccacccaagaagcggcagcagcagcagcatctgtcctccatagagaactggttgttcgacgatgccactgagcagctcgttgtccagctgatggaggagatctccggcggctcatgctcagttcccatgctgctttattagcaccaagaaaaagaagcgaacatgcatgatagccgatcgatagatgtgacttggataggagaatgaatgtgtgcatgggtgcaagttacccagctgataggagaattttatatacaccaatatgcatgtttggttttatttacacacaagcatgagacaagaacaatacatatatgcatagttaatcaaaactccaaagcgagaggcacctcaaagaacttaaaattgagtggtccagccatatatatccgcgtccttgacaaagtgagataggctccatttctctagcaagcatggatgagtagacagactgtagaccatgcatgtcatgacttgttgccacacttcttttctacagtcttcagatatgaatgcagaatggcagtagcatactattttgtactgttagat

SEQ ID NO: 99495 - DNA, 207 bp, Zea Mays
gttgtgtttggatggtgtaccaccagtgttttacaacagtttggcccttggaattgctactgctaaaacttcgttcctctgagaagaccttttgtttttgcattcccaaccgagggacaacaaagtacttgtattattacattgtgtttgtaacatatgtatttggtgtaggaaaataaagaaactgcattgctcgttcttgttcca

SEQ ID NO: 99496 - DNA, 792 bp, Zea Mays
atggagaggggtgagcccactagcccatatcctgagccacatgagcctgaaagatgcaacatccattccttctgcaagaccttgactacttcagatacaagcacccatggtggattctctgtccttaggaggcttgttgaagagggtctgccccaactggatatgactcataatccaccatggcaagaactggtggctaaagatctccatggaaatgaatggtatttctgtcacatatttcgagggcaaccaaggaggcatctacttatgacagactggagtgtttttgttagctcaaaaagattggtttctggtgacacatttattttcttgagtgtgacggcattgcatgttaaagttgtcttgtacatttacatttgtttcctggctctactgaatttttggatcaaccttctaactgttcttcatctaattgaggtgagaacaaagagctgcgggtcgggttctacactcgcagccaaaatgtatgttcatacagtgggaactcctgcatacattgctcatgatgttcttctgaagaaggaatacaatggaaaggaattactgacgttacctatacagaggatcaccatccctgagataagaaaccatccatggttcttgaagaacctcctagctgacctaatggatgatagcatgatgacagctggttcacgtggactcaatcaatttctgaatgatgacattgacctcgacgatgacatagaggacctagactcagatgccgatcttgacctggaaagcagtggggagatcatgtatgctatttga

SEQ ID NO: 99497 - DNA, 351 bp, Zea Mays
caatgccatttccgtgcctggatagatcgtaggtctacgaggtagcatcgaatggctctccagtaggaagggtagagcctccatgtggcggcctccagatcgtaactctgattcttcttcccaccccgcggcgcatcgatagaccgaattttggcgaagagaacgcttggagcacctctatcccctccacgatggaggccaggtacaggacaaccgtgctagggaacaacactgatttgatgccgttttggaggatctacgccctcgtggcatgcttggtggccggacttgccctcacctctatcccctcttggcctccgtgatggaggctgggtactcagcggccatgac

SEQ ID NO: 99498 - DNA, 876 bp, Zea Mays
atgatgtccgggaaacaaatcctatccccgccgcctacgccggccgttcgcgctcacctactcaccacattcgttctcgccgtggacgcgcgcgtgaggtgagtgagaccaccacgccagacaagaattaatggccctggagacgtgcttcagagcgtgggcgctgcacgccgcccctgctggcagcaaggacaggctcctcgtctgcagcagcggcggtaacctggtgctgccgtcgaagcgggtcgcggccgcgccgctgtccgtcggccgcgtcgccacgcgccgggcgcggcacgtctgccagtccaagaacgccgtggacgaagtgctggtggcggacgagaagaactgggacgggatggtgatggcgtgcgagacgccggtgctggtggagttctgggcgccgtggtgcgggccgtgccggatgatcgcgccggtgatcgacgagctggccaaggactacgccggcaagatcatgtgctgcaaggtgaacacggacgacagccccaacgtggcgtccacctacggcatccgcagcatccccaccgtgctcatcttcaagggcggcgagaagaaggagagcgtcatcggcgccgtccccaagtccacgctcaccaccctcatcgacaagtacatcggtagtagctcatgagcgcgcgagagaggcagcccatgtctcgtgatgtgcccccgagctgcatctgcatgcatgggatactgggatcgatgatacatgtgcccagctcgcgcataaacaccatgtatctctagccttgcccttgcatatatatggatggatatatgatatgacgatgatgcgtaatgcgttcattcggttcaggcagccagccctctgctactgctccgtcatag

SEQ ID NO: 99499 - DNA, 156 bp, Zea Mays
tctaaattgcaactgtatctatatgtggaatacccttcttttgttaatggcaataacaggaatgccgctattaacctgaatctgcctccagagaggtatagttcaaacacaaccaacttaattgatatgaacattgagcctgctaactcaccctta

SEQ ID NO: 99500 - DNA, 1951 bp, Zea Mays
atgtctaaaaaggtgaagcatttcactaagggacttgcgaagagagcatcctatgttatgagaaaggaggacatagtgtttaagggcactagttccagctcgagtaggcgtagagctttgttggagcatgttccagagttgcagggtcagatagttggcgttcagaggaatgaggatgagtctgaagatggggtagagatagaggaggggagacaggtgggagatgttgatgatgcagtagagacagaggaggggagacaagtgggagatgttgatgatgaggtagagacagaggaggggagacatgtgggagatgttgatgaggtagagatagaggaggcggagacaggccatagtggatggcgtgaatggcttgaggatgcaagtggatggccaagagatggagggtcaggagttgggggagctagtgggtcgagggaaggagaagctggtggttttggaagtgggggagttggagggtcttcacgggtccggaagctgcggagaactagttgggtcccccctcctaaagaaccaattgatagggttgagataatacaaactggagatggggcttgggtggatagtagtttcactagcacaggtcgtcgaaggcaagtaaagaaagtgttgggcaacatatgtcgtatgaaatggcctggattggtgatagaggatggtaaggaggtccctgtcacaagatgggatcaatatgcccttgcaataaatgtgcaacatgggaatgcgcaagctgcagtttggcacgacttctgggtgattagtcaagccatgtttggtagtgaagggcgacgtccagagagtaagaacgaggcgacacagtatggacttgatatgactgagcaacaataccttgagcattcgattccatggatagctgccaatgatgctgcttggcgtgcattatgtgattgaggggcttcggctgaattcaaggcaaagtctgtgcaacacagttccaatcgtggaaccgagtcgtatcacaggtatggaggtgaggatcactttcgtttggcaaaacgaatgtgcccagtgatgttcaaatataccttagggggcacagaggaccagatcctacaaatccagatgtgttgtgtagccaaaaggcaacagatcgtgtggctgcatatggcgaggcgatgtctagtcagcatggaccagactatgactggaggacctcacctattgatcctcaggctgtgtatgcaagtggtggaaaagctcatggaaggtgagggttcagcgtagaggttcatcgaggtctgctgctcgtagctcccgtcgctccactcaagatccagcagaagtggagcaactgcgagaagaacttaggcgacatcaggattacttgaagcaacaagtagcgcaacatgaatattatgctacacagattcagcaacagcaaacactcatacaacaactagcacaggcccaagggatacacgtcctgttgcccccaccaccacctctcgttcattatccttggtcttcacctccacctatacctacatctccatctaccgaacatcagacccctccagctaccttgccgacgcatgaacaagaggacgggttagactttgtcgaaaccctcttcaatagtggaggtatcgaccatcactcttcactataacctgatggcgatcggcgaccatgagcttccatgttattgcgttctgatacttgagacttttattatgactatgtatgagatattgtctcttattagtactggatgatgagatgtgtcttattatgactatggatgagacttgtgatgtaattgatgagactatggatgagaattttgtgatgtaatttatgagactatggatttaaatattgttatgtgattgtgtgtgagatgttttatgtgaaaatatgttgtgctatatagctattgatatatttgttatgttgtggaatgtggtgt

SEQ ID NO: 99501 - DNA, 3363 bp, Zea Mays
atggcgacccttcctttcccgcctgacccttcctatcccctgaccatctcctctacccccgacgcctcttcacattcctccaccagccccacgccggagaccactccgatcccggcggccaatcacctctcctcttccccggcgtcggcggggccctctgcatgcggtggtcgttccaaggcgcagcggtggtgtgaggacggcgcagcaggcgcggcgggcgtgggtgctgtcccggcgcacgccgcgggtgcaggtgttgtaccggtgggcgcgggtgttgtcccggcgggcgcgggtgttgtcccggcggccgtgggtgtggccccgtctcagaatcgccgctcctacagggatgcgctggtgtcctcacagcgccctgtttctcgggtagcggtggtgagtgctggtggcggctgggagactgtccagagtcgccgcggccgccgcttggctcgtcgccctccccagccagaacccagacccgttccggttgatctgcggggcagatgtttcaactgtttctctgctgatcatcgggcggcgcggtgttcaaacagggttcggtgcttcttctgcaggcggcgggggcaccgtgtgagcgagtgcccgcgcaggcagacgaacctggtcgctcttcagacaaacctggccgctcctgtggccgctcctgtgcgcagactggtgtggcggccaatttccaaggagacatcggcggcggtctctggtgccgatcacgccatggcgggtgctggtggcgaccatgccatggcgggtggctcgacgcttggtggttccgatgtcgcgatcagcgggaagcggcgtacccgtcgtgggcagcgaaagcgcagggccgggactggtggtggtcttggcggtgatcctctgctgctatcttcgggaaacttgtcgcccgcggctcaggatggtcctcgtcctgtgaggtttattgggcggtccagaatgatcgaccgtgctgagttggagcttcgccatgccctgatcgtcagcgttgttgggcaggaaggaactggttgcgccacggaggttagagaggcgctcgcctcaaggtttggccttgatgccgatgcgctccgcctacgtcgtgctgcgccaggttcctttattgtcctcttcccttcggaggagctggctgggcgagtgtttagtggaggaccgtcgctctttgtccctccattgaggttgcatattaagagatggactaggcaggcttttgcttcgggaggcagtgtcttgtcttccctcattgacgtcgaactccgtggtatccctgctcacctttggggactggagacagcggagggactacacccggattctaccagcggggaggacttgtcagtcatcaggttgagtgcatggtgccgctctcccgtggagttgcctgaggtgttggaccttcatgctgtggagccagcggtccccgatgaagacgaagtctggattccacgttcgttggtgttccctgtgtttgtgaagattattgggccggagggtgttcttgtggaggagcagctgcagccacctccatcggatccctctgatgatgagccggagcagagtcgtcgggctaggcgggtgcagaggctgggtgatcaggcctcattgcctcggacttcggtgcactcgcggctgggtcctcgtcttcattcctcgtcgacgcgtgttggaccctctgatgatgtggagcttttggatgcattaatggataacagtgatgatgtggcggcgtctgtctcttcggattcgttggcagaaccagttgatgcccctaccctcccgtgtgctgcggttgagaagctggcggcgcctggtgttctggccttgtgtgatgttgtggttcccgtttattctcctgatggtgcctctgctgatttggctgctgagttgagggaggattcgttgttggcagtgagttgtgttgtcaatacttcttctgctagatggaatttgaagccgcctgtttttaaagtctactctaggaggttgagaccatctattttggatgatcaggatggcccgttggttcagtcgggtcttgataattctatggtgatttcttcgcccttgtgcgagttccaatgtttggtcactaaaccggtggatgccttgctgccaactccacagattccaaagagaaggaagaagcctctacccagtaattttataccaaggcggagcaggagggtggccaaatttcctccagaactcggttctgaggctgctgcccaggatggcagtaattatgcggagctatttgtttctgggctctctagcgtccatattgctgctttggcagcgctgtttggctggacggttctggtagcttttgagcctgactgttttgaaccagcaattgagctaccggtgagtgaagagcagcaagacaaagatgatgatggctacaaaaaaaagagtagaatggatgataatggtgatcaggttataaagaagcaaacaagcgctgttaatagcagttcctcaccatctaatcaagagaatggtggccctgttcctatgcagacaacaagtttttctttgcttgcatctctttcgtcagtgggggtaaccaattcccctcccaggacagaagggcttagtgcaaccttgtctcatcttccactgtccttgatcggctgtcattctgtgcatcttgctggtatcaatccagagcatcaaaagcagggaagtgatatgatacaggagcaagtcggaacaggcgctgggacggttatagccgaaggtgtcaacaacgatgtgtttgcagcggctactaccactatggaaaaacttgaagtctcaaaggctgaccagaggattgaagggatgggacgttgtgagcgcgatggtcggagcgaggcgaggggcccgggagcggcgcgtgcggatctggcatgggggcgtgggcggctgtttcaccagttggcgtgggatgggactgggagcggcgtgcgcagatccggatgggggccgtgggcggcagtttcgccgagagcatcgcacgcgaaggggatgggggccccgctgttggccgcagccacgccggcggagaagtcgagcttgccgatgaggttgtccatggactggctcctgacttggcgagccatgggcgcacggggcggtggggaggtgtgggagggtggggcggtcgtggatggagcgggggaggaaggggcagggggcggcggcggtcgcagtcgcggattgagcaagttaggaaggggcgggggcgacgagctgggtcacgaatggagcgaggggagggggtggtcgcggctggagcaccatggagatgcgaggcgggggcattggccgcgccaggcgcccacgctccgtacttaa

SEQ ID NO: 99502 - DNA, 2336 bp, Zea Mays
atttcttccgaacagtttagctattattctcagcaagctagcagcatgggtgatccaaacagcaatgactcctccatggtgcatggcactgccactgagacggtgtttgaaggctatgagattttccttggtggcaatgagatggttactggttgtgaagcgattatcagtgataagatgggtcatgccgctgaaacggtccttgattacaagatggtcgacatccatgataacaagatggttcacagaaacgagattgtccctagtggtagcaagatagatcgtaatggccaaacagtccttcgtcgttgcagtcagatagttcgaggtaatgagataggtaacgacaatgttaccactgaggtgaaaccaccaacctcatcgaaacgcaaaagaaagacatccatggtctgggagcatttcactacggaagattctgagggatgcacacgagcctgctgcaaccattgtaagaggatatttgcatacagttctggattaaagatgtctggcactagtcatctgaagaggcacattacccagggtcattgccctgagattgaagttcaaaagcctacagcaggagggagagagaatgattgtcagggtactgtacagaaaccttctatgaggtgccgcagcacatgtactggttacgcaaatgctccattcaatccagaccgttgtcaatcatacctagcgaagatgattattctgcatggctatcctctgcaaattgttcaacaagcagccttcatatcctttgttgagagcctgcagcctagtttcaaggtgattaataaagatgcagtcgaggcagaggtctatgcagtttatctgaaggaaagaaagagcttgctgaagcaagttgaaaatattcctggaaggataaatctcacagtgcagacttggaccactagccaaactcttggatatgtttcacttgcagggcaattcattgactctgaatggaagctgcaccgaagaatgctcaacttcatgatggtcccttggtcttgttcagaggatgatgcagttactgaagccatcagcagaagccttcatcagtggaacatgtcagacaaactcttcaccattactagagattatgagtcctcctcgcatgacatctacagtttgaatttgagagaggaactctccaaaaataatattacaatgcttggggggcaattttcggtcgtgaggtgctatgcccatatgctgactgcagtcgcaattgatgtcactgctttggtccaaagtgttatctacaaaatccgtgaaagtatcaagttcataaaatgtcgcattggccatgaggagatgttcgctgatatcattttgcaactgcaaattcctagtaaccagattctatgtctagacattaaaacccagtggaacacaacctatctcatgctgcaggcagctctggactataaggaggcgttcaccatgctggagaaatgcgatggtaactacagccaagcaccttcggcagtggactgggagaaagtcgaggttgcttgcaggtatctgaagctgttgtatgactctgcaaacaacattatggcagtggaaaatccaactgccaacatatttttccatgatgcctggacaattcagagagagatttcaaatgccacagatcatcaagatcctaattctgtttccagcagcatcgcaaaaggcgtgcatgagacgtttggcaagtactggaaagattgcaatgttgtgctagccattgctgttgtgatggatccccgtttcaagatgaagattgttgagttcagttactccaaaatctacggtccgacgaagggcgctaagtatgtcaagttggtggatggtgttgtacatgagctttacaaagagtatgttacacagacacttccgttgatgccaaaccatgttggggataagaacattccaagagatcctacttccattggcaatctacaatcaggcttcgaggtctccattgtcaagtcggagctagatcagtacttggaagaagccctggttccacgcatcttggagtttgacattctgaactggtggaagcttaatgccgtcaggtacccaacactctcgaggatggcccgagatgttcttgctataccggtgtccaccgttggtcgcggcagctctgtgttcgcagctgggactgaagccaagatgcttgacgactaccagagctcactgcaccctgaaaccttggaggcactgttctgcgcgaaagactggctacggcattcatctcctgctccatagccacagttttgtgtcagtgaagaagtgaaaacttgtccattccatctctagcgtacataacaaac

SEQ ID NO: 99503 - DNA, 2436 bp, Zea Mays
atcggcctctcgaatccatcgcccctgttccctctcccttccgtcggacttcaaaccctagcggcgatggcgtccgcggcggcgggcacaccgaagcgctgctactacgaggtcctgggcctatctcgcgactgctccccgacggacatcaagcttgctttccgccgcctcgcgctctcgctccaccccgacaagcagccccccggctccgacctcgccgccgccaccgccgccttccaggagctccagcatgcccactctgtcctctctgacccgcaggagcgtgcctactacgactcccaccgctcccagatcctcttctctgacccagcctccgccggcgccaaatccgcttccatcgtccccgatcttttcgccttcttctcttcgtccgctttctccggcttctccgacacgggccgcggcttctacaaggtctacggggacgtcttcgacaaggtattcgcgcaggagcttgcctatgctcgccggatgggggttcccgaccccgctgcgccaccggtcattgggaacctcgattccccctatgcgcaggtcactgctttctacagttattggcttgggtttggctcggtcatggatttcggatgggcggctgagtgggacgctgcacgtggggaaagtcgccgtgttcggaggctcatggaggaggacaacaagaaggcgatgcgcaaggcacggcgggagtacaatgacgctgtcaggggcctggctgccttctgcaagaagagggataagagggtggtggacatggttttaaagaagaagctggaggaggagaagagaaaggcagaggagaaggaaaggaagaaggaggaggacaagaggaagaaggagcgagccatggcatgtcaggaacctgagtgggcgagggcagaggaggtagaggagggactgtatgatgaagatgaagaagaggagatgagggccaagaaggaggagctgtactgtgtggcgtgcaataaaaagttcaaatcggacaaacagtggaagaaccacgagcagtcgaagaagcatagggataaggtttctgaactgaggatggcctttagggaggaggagtctttgaaagaggcagaggagggggaaggtgattggaatgaagttgatgtggggtttgattttaagcctacacaggagtcagatgatgagagtgcattttcagatgctgcagaagagttagctgaagaatttgaggaaggtttggaggtgcatgataaagagaacggtgataaggatttcgatagtgcagagcaggaggttgggtcatatgatgaggcaagtgtattggaggcaatgctatcaagctgcaagaacagaaagggtggttatgtggctcctccagaggaggctttgtctggtactgctgaggatgacgatcatcatagaagttctgaagttaataatgcaaaaaggaaaggacgcaggcgacgggcagcaaagaaggagcaagatgaaagtaattatgctggcaatgagcatcatggtaaatgtgaggttcagcctgagggttcggtccatggtaatgatgttgatgatatcatggaagggccatcctcttctaatgtcaacaatggttcagtaagcaaaggagataagcagaatggtgaaaacacgaatcctaaaaagaacaagaaaggcacaaaaaagaaaccaactgtttctactgatcagaagagtatgtcaaaggctgaccagaagagcacatcaaaagggaagaaacaaaaggaggtctcgaaggcacctagtaatgattgcgatacttgtggaggaacttttgagtcgaggaacaagttgttttctcacttggaagaaacaggtcacgcaatgctgaagacgcggcagaagaatcgtcgttgagggaaataagttgaacttccaagcacgtagttggttctgctagttaccacataacagcatggttctcttatgttttggcgcacttttttatctgtagcgaacatattttttttctagattctttatgtgtagtgtggagatgatgtttttgtttataaggccatatggtaccgggggtagggggggtataccgggcgggaaagacactgataattacaatatgtaacattatttcattatttgtgcgacctgtgccatccttacaaattttagtgttacaatggctgccccatctcagatgtaatggcttcatatttttctctcttttttttattattgtcagttctcttagtcctgattcgtaaattatgttttgtgtggtagagtggaaatcaccaaagcattataagagctggacagtcttctcttgaacagaattgccccgatcttgtttggaagcagcgggagcactgattctatctttgtcacagaagccatgcgcttcattttcttgaacatagcttttaccctattcatatatacctttaaaataaa

SEQ ID NO: 99504 - DNA, 310 bp, Zea Mays
gcatatacctagttagattcttatgtggtgaggtcacaactatttaattccattatgctctataggctggtgaggtcacaactatttaattccattatgctctataggctgcatgtacacgagatagttcacgggcaacgtactgatgaagtggttcctaaagagcttcgggctatatgacagtaacatactgatgaagtggttcatgatgcaagagcatactgatgaagtggttcctaatacaagagccgaagttactcaaggactggtaccgacatctatggcaaggactgaagaagtggtgactgga

SEQ ID NO: 99505 - DNA, 691 bp, Zea Mays
ttggctttgctttccccgtatgtctcaagtctagttaccatttatggctttcgcacctgtaaacatttatggttgcttttgttgattcatactagcatctatgctaattttttaatgcacgaccttaatgctacttttatgtgtatttatgatcaatcaccatgtattttacgctcttcggtttttatgtcaaaaaaatgggtttttacgctgatttatatgtgtgcctatgctgcaacacatacaattctaactaaatatgcataaagcagcgcgccagcacctcatattttattctcattgtttctacttcgttaattcattgacccatgtctctgtcttggtatattctggagacaaatccccacgtccagagttacaagaagatcaagcttggctgtggctgcagctgtgttgcctcctcttgttggaccgaagagagggaggggagaagcagctggcgtgcagacttctactcaggtggtcttttattctctatggggcttctaggatacatcttctccagaagcaccataagtcttgtcttgggcattacaccagggctagccactctgctacttggcactctcagtctgaagttctggaggagcgacagatccagcttcctgcttatcttggctcaggcagaggtgatgctgatgtgcaagcatcttcaccttgagttctgcct

SEQ ID NO: 99506 - DNA, 455 bp, Zea Mays
agcctcgccctgctcgcatcttcctctccctctcagcgctggtgctcaatctacaggtcgtcccgctccctacacacccgccctccggtgtgaaccttcatgacgtccgcaaccactctccgatctgctgtcgtgacctcatccagccgtgctgtggcagtggatcggagttcgctccagctctgattgaattccactactatatgtgccacttaaagttgttatgtcaaaatattatggtgaaagcgagcgtctattgggatctattttttatcttgcaaatgatcttcctgaaggaggtaatatattcttagatgaggtatatatcgtaatacttatagcataaacactcaagccactacaagtaagctcttgccctttgcttgtttccagattgatatgtcaagatacgcttgtttcatttgagctcactgttatctgaaaatctatagact

SEQ ID NO: 99507 - DNA, 1317 bp, Zea Mays
ccagatcgagtgtacccgtgcacgaggcgccggcctggagtcgcggtcgctgccgcatggccctggcctccctcgcggcctcgctcccagtcgccgccaccgccgccgcggtgagattcccattccgtttccgcatcggtcgcgccatggcctccgccgccgcaggggcctcgccggcgagggtggccgtggtacagatgacctccgtgggggacgtcgacgccaactacgccacctgctcccgcctcaccaagctgcttctggagtgaaatttctttgcttccctgaggtcttctcattcattggatccaaggatggcgaggctatgaagctagctgaaccattagatgggccaataatgcagagatactgctcacttgcaaaagaatcaagcatgtggctatctcttgggggttttcaagaaaagggacctgatgattctcaccagtacaatactcatgtattaattgatgacactggaaaagttaggagctcatatcgaaaaatacatttgtttgatgttgatgtacctggcaatatggtgtacaaggaaagtcgtttcacagccgcaggtgatactattgttgctgtggatagcccttttggacggttggggcttactgtttgctatgatttgagattcccagagctttatcaaattttgcgttttaagcatcaagcacaggtattactagtgccatctgcattcacaaagataacgggagaggcacactgggaaattctcctccgagctcgtgcaattgagacacaatgttatgttattgctgctgctcaagctggaaagcacaatgaaaaaagagaaagttacggtgattctataattattgacccatgggggacagtgatagctcgacttccagatcggctctccactggatttgcagttgcagatcttgatttgtcaaaagttgaggctgtgagaactcgaatgccaatttcagagcaccggaagttcgacagcgattggaaacccacgcctctttagtagctgagggtttattttgtgtttcctatgtttaatgtgcgtatacacatatagttgatatattcatctatgcataattattaccacaggtttggtcagtttgtgactgggaactcgcaagagaggttgctgaactaaataaggttcctaaattgccaaacgatgggactaaaacatggactaaattgtttgtctctagtctttcaaggggagactaaaagggactaaaccatataaattttacttttcactcttcctttattttagttgtactaatgacatgagaatgatagaggtattttagtactctt

SEQ ID NO: 99508 - DNA, 1324 bp, Zea Mays
ctgatccaacggctagcaagcgttgacgtgtgagctccgccggtacgcgcaccagatcgagtgtacccgtgcacgaggcgccggcctggagtcgcggtcgctgccgcatggccctggcctccctcgcggcctcgctcccagtcgccgccaccgccgccgcggtgagattcccattccgtttccgcatcggtcgcgccatggcctccgccgccgcaggggcctcgccggcgagggtggccgtggtacagatgacctccgtgggggacgtcgacgccaactacgccacctgctcccgcctcaccaaggaagcagctgcttctggagtgaaatttctttgcttccctgaggtcttctcattcattggatccaaggatggcgaggctatgaagctagctgaaccattagatgggccaataatgcagagatactgctcacttgcaaaagaatcaagcatgtggctatctcttgggggttttcaagaaaagggacctgatgattctcaccagtacaatactcatgtattaattgatgacactggaaaagttaggagctcatatcgaaaaatacatttgtttgatgttgatgtacctggcaatatggtgtacaaggaaagtcgtttcacagccgcaggtgatactattgttgctgtggatagcccttttggacggttggggcttactgtttgctatgatttgagattcccagagctttatcaaattttgcgttttaagcatcaagcacaggtattactagtgccatctgcattcacaaagataacgggagaggcacactgggaaattctcctccgagctcgtgcaattgagacacaatgttatgttattgctgctgctcaagctggaaagcacaatgaaaaaagagaaagttacggtgattctataattattgacccatgggggacagtgatagctcgacttccagatcggctctccactggatttgcagttgcagatcttgatttgtcaaaagttgaggctgtgagaactcgaatgccaatttcagagcaccggaagttcgacagcgattggaaacccacgcctctttagtagctgagggtttattttgtgtttcctatgtttaatgtgcgtatacacatatagttgatatattcatctatgcataattattaccacaggtttggtcagtttgtgactgggaactcgcaagagaggttgctgaactaaataaggttcctaaattgccaaacgatgggactaaaacatggactaaattgtttgtctctagtctttcaaggggagactaaaagggactaaaccatataaattttacttttcactcttccttt

SEQ ID NO: 99509 - DNA, 92 bp, Zea Mays
caattttctcgtagaaaagtcctaccagcagcaaatcaatctgcaacagtcacatgcatactatgaaatgttcaaagatcaatagaaaaata

SEQ ID NO: 99510 - DNA, 1872 bp, Zea Mays
ctctaaaaccccaaccgtcgacgttcactcctcaccccctgcggccctgctcttttgagcctcactcctcagtcttcacgccgccggggcagtgctaagatccaggacacgcgctgtcccgctagcaccacgcctccccttgtcatcgtcctcctcccacgtgctgctgtgggggtgcagacgggagacacatccggacctgattgatttcttcgttttgttctgctggtttacatggctgcaagaaagaaaaagcctttgcttattgcttgccaagcaaccagtgccagaataacaagatctcaggctgctgcaaatagtacaagatctgggctggctccttctgtaccagtacctctgaaaacggagcataaccatgcagcgaaaaaaaagatgaaaagggaagcttcagatgaaaatgcttctgctgatgctggagcttcagctcctctgcctaaaaggcgtacagttctcaagaatgtaactaacataagctgtgctaaaatttccaaaaggtgcactgctgtgactgggctgaagttgggtccctcccagaaggctgggcagagcataaacaagcaatgcacaaacaagatctccatgcttctccctctggctgttggagggagttcacttgtggatgattctaataatgctgaagaaacacaaatggtagaccttttggcacagaaagagaagcagattgttttgcttaaggaggctcagccattacagaatactgaacaaaacaaaggcggtgcttgtgatgaggcatctgttgaggaaagaaatgccatgaatgtacacgaaactgctgccttaaaggctggggtctctaatggtttaaacattgtagatattgacaaaaataatggtgatcctcaaatgtgtgttacctacgttgcagagatatacagaaatctaatggcctcagagcttataagaagacctaggtcaaattacatggagactttgcaacaggacatcacagctagcatgcgaggtgttctaattgattggcttgttgaggtttcggacgaatataagcttgtggcagatacactttaccttacagtatatcttattgaccaatttctttctcagaactgtatccaaacgcacaagctgcaacttcttgggataactagtatgctgattgcctcgaaatatgaagagtattctgctcctagtgctgaagaattttgtaacataacggctggtacatatgcaaaggctgaggttctggaaatggagcaacaagtgcttaatgatctgggctttcatttatctgttccaacaacaaacacatttctcaggagattccttagagcagcacaggcttctcgtacagctcatctgaccactttgaattatctggcgagttatcttgccgagttgactttaatcagttacgatttcatgaaatttcttccctcagaggtggcagcatcttcgattttccttgcaaaatggacacttgaccaatctgaccatccttggaaccctactcttgagcactacacgtcttacaaaagcttcgatattagaacttgcgtgcgggctctacaggaactgcagcacaacaccagtaattgccccctcaacgccatccgtgagaagtatgggcagcagaagttcgagtgcgttgccaacctcaggtcaccggagctgctgcggtcgctcttcagttgatgtgctcccctgcactctgctgattcactcgccatttgctgcaacgatcctgacactgtataaaatatttcttcagtttctgttccatttccaaactttcttcagtttgaacatgcattctgtgacttgggtcaccgacaaaagaggcgcgacacactaatatatcaatttgtaactcaa

SEQ ID NO: 99511 - DNA, 1961 bp, Zea Mays
ctctaaaaccccaaccgtcgacgttcactcctcaccccctgcggccctgctcttttgagcctcactcctcagtcttcacgccgccggggcagtgctaagatccaggacacgcgctgtcccgctagcaccacgcctccccttgtcatcgtcctcctcccacgtgctgctgtgggggtgcagacgggagacacatccggacctgattgatttcttcgttttgttctgctggtttacatggctgcaagaaagaaaaagcctttgcttattgcttgccaagcaaccagtgccagaataacaagatctcaggctgctgcaaatagtacaagatctgggctggctccttctgtaccagtacctctgaaaacggagcataaccatgcagcgaaaaaaaagatgaaaagggaagcttcagatgaaaatgcttctgctgatgctggagcttcagctcctctgcctaaaaggcgtacagttctcaagaatgtaactaacataagctgtgctaaaatttccaaaaggtgcactgctgtgactgggctgaagttgggtccctcccagaaggctgggcagagcataaacaagcaatgcacaaacaagatctccatgcttctccctctggctgttggagggagttcacttgtggatgattctaataatgctgaagaaacacaaatggtagaccttttggcacagaaagagaagcagattgttttgcttaaggaggctcagccattacagaatactgaacaaaacaaaggcggtgcttgtgatgaggcatctgttgaggaaagaaatgccatgaatgtacacgaaactgctgccttaaaggctggggtctctaatggtttaaacattgtagatattgacaaaaataatggtgatcctcaaatgtgtgttacctacgttgcagagatatacagaaatctaatggcctcagagcttataagaagacctaggtcaaattacatggagactttgcaacaggacatcacagctagcatgcgaggtgttctaattgattggcttgttgaggtttcggacgaatataagcttgtggcagatacactttaccttacagtatatcttattgaccaatttctttctcagaactgtatccaaacgcacaagctgcaacttcttgggataactagtatgctgattgcctcgaaatatgaagagtattctgctcctagtgctgaagaattttgtaacataacggctggtacatatgcaaaggctgaggttctggaaatggagcaacaagtgcttaatgatctgggctttcatttatctgttccaacaacaaacacatttctcaggagattccttagagcagcacaggcttctcgtacagtaagatcagtacccaaaccacattgcaacgagtcctttcagtctatatgtattgtcctcaacactaagttggcaagctacatttccaggctcatctgaccactttgaattatctggcgagttatcttgccgagttgactttaatcagttacgatttcatgaaatttcttccctcagaggtggcagcatcttcgattttccttgcaaaatggacacttgaccaatctgaccatccttggaaccctactcttgagcactacacgtcttacaaaagcttcgatattagaacttgcgtgcgggctctacaggaactgcagcacaacaccagtaattgccccctcaacgccatccgtgagaagtatgggcagcagaagttcgagtgcgttgccaacctcaggtcaccggagctgctgcggtcgctcttcagttgatgtgctcccctgcactctgctgattcactcgccatttgctgcaacgatcctgacactgtataaaatatttcttcagtttctgttccatttccaaactttcttcagtttgaacatgcattctgtgacttgggtcaccgacaaaagaggcgcgacacactaatatatcaatttgtaactcaa

SEQ ID NO: 99512 - DNA, 975 bp, Zea Mays
agtggctgggcggtgaggccgtgtctcccggtctgcagtatcgggcaagcctacgggcccaaacggaaaaagaggacctgagccgactccgccgaggtcggtggcggcggcggcggtgagcatggccgcgcagagggagaagtccgcggccgtcgcggtcggcccagcacacggcgctgcggtatcggggtctccttctccttcgtcctcatccggaggcccggcggcggcgtcctcgtcgggagagcggtggagcgccgcgatcgggaacctgggggagctcggcgccaacgtggacgcgctgcagaagatgctcgggcggaaggctgtcttcgtcgacgatgacatcttctccaaggcctccctcgccgccgaccaggcccgcaccattaaggttcttgaccagagggtgcagtctctggaacgcgaactcgatgccgccatttctgcagcagctcgagctcgtacagataaacgacaggccgaagctgcgcaacgagctgcagagttacgcacacaggaggtcaccaaggaactggagaacactgcgagagtgtttcagctgcacatggaggagttgcggctgaagcaagaggagattgcgaagaaagatagcgatatcaaggtgttggaagcgataatacgaaccctcggtagcaaagatgatgatggatccagcgaataattgtcatgaacagggagcgaggcttttatgttcaaatatctcacggcgtgtttatgattatgtatttccttttggggtttaatccctttgttactcagatggatgtaacttgtttcgacaagattgagcgtgtccgcactcatactactataaatttgtattctaaaacaaatattttatcatcgttagcaagattatctactatataccataatcctctgtattcatatgtactctatatctcaccactataccaaatatcatatattatatatttttttttcacttca

SEQ ID NO: 99513 - DNA, 595 bp, Zea Mays
actagcaaataacaatataacatgaaagtatgccatgtttgccggcacaagcgccagcatgcaacgcacgctttgaaagttccacaactcaaactcaacaaaaggactcgttccattatttagacatcagacacctatcatgttaacagaaaacactaccgaatacatatggcctagaatccacacggcctcgcatggtggtggtggacacaaattagctcctcttgttggcgtagctgtcaggctcatcgtccttgaagagatcatccatgatttcatcattcttgttaccgtcaccaggtgtgccggcagagaacccatcagcgccactggaaccacccattgcgccaaagctaccagcagggttttcaccaaaaccactgtcagcaaagttactgctgccaaagctgtcgctacctccagcagcaaaactgccttcagccccacctgcaactccataatcaccaccaccaccatagccaccaccagccctgtcgccgtagttgccaccatatccaccgctgccgccaccatagtcaccactgccgccgccgccatagccaccgctaccaccaccatagccgccaccatagcc

SEQ ID NO: 99514 - DNA, 555 bp, Zea Mays
atggtggacatggagcagcaactaacagcaaatcagtctccatccatggcttccggccaacgatgccagcaaatcgtacatgtcggcaacgataaccacaagaatttggaagaaagggctagagcagttcgtcgactcaacaaggtcaatcccagcgaggtgcgcaggtgtcggtggggcagatttgactggaatttggtggggattggtgctgatctaaagcttgcaagagcatgggaagctgcaactgcaatggggaaagcaatatgtatggtgggaccaagaaaaaagaaacagattcagcgaatctctgagcctaatcccgaatccacgacaggtttgggatctgaatccgcgtactgcgagcccagatcacagcgtctaggcagaggcgatgctccaaggccgacacattccgtagacctcgagcaacacattcaggcgaagatcctacccccattcccccgatccacaacagcgagaacccgcgcactgtgccgcagcaccaggcaggccgtcctagttagacacggaactgctggactccgcgcctag

SEQ ID NO: 99515 - DNA, 363 bp, Zea Mays
atgtttttttctacaacaatgtgtattaaacagcaaacatatccaataatacaccacaacataatagcatcacccacgataatgtcaacattggcattgcgcacaattccatcagcagggatagaagctcttgctaccagtagctgtggatcaacacacgacacacacgaacatgtacacacatacaagcaatcccaacaacatagataccatgagcagtttgatatttactcatgggaatacaagattcttttccctttttcctttgttaagcagaaaccttctcccatgatcatggcgaacactaacagcaggtgtacatcacttgccatctttgctgccactaaaaagataaccgagtga

SEQ ID NO: 99516 - DNA, 935 bp, Zea Mays
gcttgcaggtacattttgaaggtgacaattggcagaaactatgttggcaatattgtggaatatcgggatttctgtgtgagaaactactcacctgtccctacaatcaataacagcattaagatggaagtaggaattgaggattgcttacatattgagtttgaatacagcaaaagcaagtaccatctcaatgatgtgattattgggaagatatatttccttcttgtcagaataaagataaaaaatatggaactggaaattaggcgtagggaatcaacaggatcaggctctaacacatatgttgaaactgagactcttgcaaagtttgagttgatggatggtgctcctgtgagaggtgaatctattccagtgaggctgttcctgacaccctatgagttgaccccgacttaccgcaacataaacaacaaattcagcgtcaagtattacctgaatctggtccttgtggacgaggaagatcggaggtacttcaagcagcaagagatcacaatgtaccgtctccaagaatctccccctgcctcctagatcccaacctgttgcatcatgttcacttctcaggttttgtacaagtggacgctgaggttagagcaatgtcctgtatataaactaaaatccagaagagcgccacagctggttactgctatggccatgcacgctgcactgtcgtgttcattgtttatgtttcgttgttctttcccttgagtatgacgccaccttgatagcccggggtagaattacctgcctatatttatcgtccttgtggtctgcaagaatcatgacgttattacttaggcacttattcatcttactatctggaagtgatgtgatttgttttggtaagtcgaacgatatagatttatctgtgtttcatgcgaaatgcacttaatcttggttgttgatcaattcattagcttttctca

SEQ ID NO: 99517 - DNA, 1235 bp, Zea Mays
atgacgcacacctgcactcacctcatcgcgaatgtctgctcagtgcaccgtctcaaggtagatgacttctgtgtcaccaagtccacgatcaggaacaagaaggattgctgcatcagatccagatgcagcgtcgacggatacgactgggagatccagttccgcttttcaccttacgagggcagtcctgaagactactggttagcgctcgtgcttgtgtacctcggcgcgccgtgcgacggcggtgtggcggtggctctgagctgtcatctggtagatcagagctgcgatcttcgtgttccattattaacaacaacacaaggtctaaacacaacgtttaggcgtcccttggaccgctctcctccgatttacttcggcaaagggaaggttagagacgatgtgcaggcagcagcagcagctggtcgcccgctaatattcaagggtggttcatttactgtggaatgccagatcgacgtgcacagcagcagggactcagattccgtttctctgccgtcctctgacctgcaccaacacctcggggagctcttgcggaaccagtctggtgcagacgttaccttcatcgtttccggtgagtccatcgcagcacacaagagcatactagccgcaaggtccccgatcttcatggcccagttctttggcaacatgctggagaggggctcccagtgcgtggagatccaggacatgcacccggccgtgttcaaggccatgcttcactacatctacactgacacagtgcctgaccttggtactgataccaccacggtcgaggagacggcggtgatggctcagcacctgcttgtagctgccgacatgtatgcgctagacaggctcaaggagatctgcgaggaaaggctcacccgtggcatcggcattggcacggtggcgtcgacgctggctctagcagaccagcacaacttggcccagctcaaggctaagtgcatcgacttcatcactggaggatccagtaaaaatcttctagccgtcttggagacggaagggtacaggcatctggaggccagcaacccctcggtgttgacggagctcgtcatggctgcgcatggaaaaaagaggaaacgattatacgggtagattcttgaattagaatggcgcatatatggcctgctgctgaggataatatattatgttcagccttaataatttcactctgtatatactattgttatcgtgaccaactataatttgcttgcatttccgaa

SEQ ID NO: 99518 - DNA, 4012 bp, Zea Mays
gtttttatttgtttttctttttctttccttctttggctattttttgtgttatttttctgctatattaataaatgtgtactcgcttgtgccatttgtttgagaaattacaatggaactacaagtatatatctctgccaattttgtctcctttgcttttcatctatgcatacaaggttcgctagatgtatgggagaagattaaatcacaaggaatactaaaatagtgacaattgatggttttcattacataggacatgtgaaatactattataagaacatctgcgtataaataattatcttttagattttttgtcttgttagcatgacctctctcaaacattgtctctgcagaggactacaatgttgattataaattatgtgttgtttttcttactgtaatcattgtaggctaacattttaacgaataatttatattccgttgcaacgcacgggcactcacctagtgaattttaaatgcttcaacatcaaatcacacgctcgtgtcgggccacgaccgaccggcccgtttggacattggacatgtgaagttctgggcgttgcctgaaaggggctgaagtttgtaattgaaaagatttctcgtcgttgtcagacgaagcctagatgggtggatgctgaccgtgccgaccctcccacgcgcgtgccgcctgcttcgtctcttcactcgtctcgaagctagggttttgcccgccgccaccatcctagtttccttctcgtcatcgttctcatcttccccagccgccgccccgcctcagatggatccgtcgccggcgtggccgtcccggcggatccgccaggagttcttaaccttcttcgagtccaaggcacatacgaggtggccgtcgagtcccgtggtccccgtcgacgaccccacgctgctgttcgccaacgctggaatgaaccagttcaagccggtcttcctcggcacagcggcgccggactcgccgctcggccgcctgcaccgtgcctgtaacacccaaaagtgcatccgcgccggcgggaagcacaacgacctcgacgacgtggggaatgacacctaccaccataccttcttcgagatgcttgggaactggtctttcggggactatttcaaggaggaggccatcagatgggcctgggagcttctcacccaggtatataaattgcccaccgatagaatttatgccacatactttggtggtgatgtgaaatctggtcttggtgctgatgatgaatcgaaggacatttggttgaaatatctaccgaaagaaaaggttctgccttttggctgcaaggacaacttttgggagatgggtgacactggtccttgtggaccatgtactgaaattcattttgaccgtattggcaaccgtgatgctgcgtccttggttaacaatgatgatccaacttgtattgagatatggaaccttgtattcattcagttcaatagggaggcagatggcacattgagacctttgccagcaaaacatgtggacactgggctgggctttgagcgtttaacttctattcttcagaataaaatgagcaattatgatacagatatattcatgccaatatttgatgccatccaccaattggctggcgatggaattcagccatactctggtaaattaggttctgatgatattggcaaagttgatatggcttacagagtagtagctgaccacataagaaccctttctttcgctattgctgatggttctcaacctggtaatgagggaagagagtatgttctgaggcgcatacttaggcgagctgttcactttggtcatcagaaattgaaggcaaagcaaagtttttttagctcgcttgtaaatgtttttgtccaactgatgggtgatgtatttcccgagttaaaagacaacgaaaagaagatcaaatgtattattagagatgaagaagaaagctttgagaacactctagcaaagggttatgaaaaatttaagaaagctgcagacgctgttaaggataatggtggaactatacttagtggacaggatgcatttattctttgggacacttatggttatccaattgatttgactgaggtcatggcaatcgactatgggctaactgttgataagaaggggtttaatgcttctatggaagaagcgaggcaaaaagctagaaatgctcgtaacaagtctggagggaactctattgctatggatgcgaatgctacagcgcagttgcgcaaactggggcttgccagcacggacgatagcccaaagtttctgtggcccaaggaacatgaaagcgtggtgaaggctatctatactggctcagaatacattactacagctactggtgatggggactttggtcttgtgctggaaagtacaagtttctatgctgaacaaggaggccagatatttgacactgggagcattgaggggtcatttggaactttcaatgtgaacaacgtccaagtgtttgctggctatgttctacatattggctcatttacaaaaggttcgaaggttttgtctcttggagatagtgtgatatgcaaggttgattacaaccggcgcacactgattgctccaaatcatacgtgtacccacatgttgaactttgctctaagggaagtacttggtgatcatgttgaccagaagggttcaattgttctaccagagaagctaagatttgatttctctcatggaaaacctgtccagcctgaagatctgaggaaaatcgagttcatagtgaaccagcaaataaaggacgagctgggtgtgtatgcacttgaaataaaactagaggatgcgaagcgcataaatggtcttcgtgctgtgtttggtgaaatctaccctgatccagtaagagttgtatcagttggtcgcaaagttgaagatctgcttgcagatcctgatagcaaagagtggctatccatatcgactgaactatgtggaggtacacatatcacaaacacaagagatgctaaagcatttgcactcttatctgaggagggtattgcaaaaggagttaggaggataacagccgtgactgctggatgtgccacccaggctatggagttggcgtcatctatcgattctgatatcaataaagcatctcagttggagggagctttgttggaaaagaaaattgcttccatcaagagtgggctggatgcagctgctatccctgctgcgagaaaagctgatttgagaggcaaggtttcaaagttagaggacgaacttaggaaggcaaagaagaaaatgggggagcaaaatatacaaaaggctgtgaagtccgcaatggatgctgcagaagctgctctttcaggaaataaaccgttttgtgttactcatgtggatgtgggtcttgataccacggctgtccgtgaggcggttatcaaagtcatggaccagaagggtttgcctataatgttattcagcaccgatgaggcatcaaacaaagccgttatctatgctggtgtgcctcccaatgctcctagcggcttcaaggtgttggactggctaacaccttcaattgcgccactcaagggaagaggcggtggcggcaagaacggcgtcgcccagggccaggggagtgacgcttctcagctcaaggaagcaatggcacttgcgaacagcattgcttcaatgaagctctgctgattggtggtagtaactggtgcactgcccatggaactcatgcgtggctgctgctggattactctttgattttagctttctatttacccattatacttaaacagaagttcaatggtgcttgcagtttcatttatacttaccatacaattggaagcacaggacatgtaacagtataaagcttgttgtgtgcccgattgaacgaaaggttctatgcatatacgattgggagtcactttgtaggcgtttaggagtcgaatcatttccttccctgctaaggctattttcagatcctctatccaattccctatcttactctattttaaatttcactctgtaaatagtgttatttattatttatagtgtcctctatcttaccat

SEQ ID NO: 99519 - DNA, 2653 bp, Zea Mays
cgtagtctagtcaagactcaagactcaagaggagtccccaccctgccggcaaatgcttctcctgcacaaatctgttcccctccgcctgctccttccacgccgtcctctcaaaacctttctcctcccgccgccgtctcgcccccgctgtctctcgctcctcccacgcgctgccatgggctccgtagctggagacaccgccgcccgcctcgcgtacccgccggcccgccgcgacgattcggtcgtcgacgactaccacggcgttcggatcccagatccctatcgctggctggaggacccggactcggaggagacgaaagagttcgtggcgcggcaggcggagctggcggagacggtgctcgccgggtgccccgacagggagaacctgcgccgcgaggttacgcggctcttcgaccacccgcgccacgccgcgccgttccgccgcgggaacaagtacttctacttccacaactccggcctccaggcccagagcgtgctctacatgctggatgatttggacgggaaggcagaggttcttttggatccaaatactctaagcaaggatgggacggttgctctttcaacatattctatcagcgaggatggaaactacattgcttatgggctaagtgaaagtggtagtgattgggtctctattcatgtgatgagcattactaacaagcagcctatgcctgataaattatcctgggtaaagttctcatctatcagctggacgcatgacgggaaaggttttttctatggtcggtatccagcacctagaggaggggaagtggatgctggaactgagacaaacatcaatcttaatcatcagatatattaccatgttttgggatctgatcagtcagaggatatattgtgctggaaagatcccgaacacccaaagtattcctttggtgcctcagtcactgaagatggaaagtacatcatattgggcatctatgaaggttgtgaccctgtcaacaaattatactattgtgaaatttcttctcttcctcaaggaatagagggctttagagggacacaggatttgcttccgtttgtcaagcttattgacaattttgatgctcaatatcaagttgtggccaatgatggtgatgaatttacatttttgaccaataaaagtgcccctaagaataagctggtaagggtaaatatcaaaaatccagagctgtggactgatgttctctcagagcatgaaaaagatgtgctcgaatcagccgacgccgttaacaataaccaacttttggtgaattatatgtcagatgttaagcatattctgcagataagagaccttagaactggaaactttattcatcagttgcctttggagatcggttctgtttcagagatctcgtgcagacgagaagacaaggaagtatttattggcttcacaagctttctttctccaggcattattttcaggtgtaacttagcatctacaatccctgaaatgaagatgtttcgagaaatttcagttcctggatttgatcgcacaagttttcaagttaagcaggtttttgttcctagcaaggatggaaccaaaattcccatgttcataatgtcgaagaaagatatcgatcttaatggatcgcatccaactttgctatatggttatggaggattcaacataagcataacaccttcatttagtgttggtcgcgttgtgctatgcaagaacatgggctttgttgtctgtgtagcaaacattcggggtggtggagagtacggggaggagtggcacaaagctggagcacttgcaatgaaacaaaattgttttgatgactttgctgcctgtgctgaattcctcatttctaatggttacaccagttccagacgtttatgtattgaaggcggaagcaatggtggtcttctggttgctgcttccattaatcagaggcctgatctctttggatgtgctctcgctcatgttggcgtcatggacatgctccgttttcacaagtttacaattggtcatgcatggactacagactatggttgttcagataaggaagaagagttccagtggctcattaaatattctccccttcataatgtacggagaccttgggagcaaagctctggtaataactgccagtatccagcaaccatgttgttgacagctgatcatgacgatcgtgttgtgccattgcattcactgaagttattagcaactttgcagcatgtcctgtgtaccagcactgaggacagtccgcagacgaatccaataattggtcgcattgatcggaagtcagggcatggagctggcaggccaactcaaaaaatgattgacgaagctgcagacagatatagctttatggcaaaaatgttaggggcttcgtggactgaatagtgaattttgtccagcttagtgtggagatggtgagcaagattactctatgcagtcaaagtaaagtggctgtaaaagttatattgcttatgttttgctcttgcttggatgatcatccaccaaatagtatagtgtttatgcttcggtttgagataagggttcagggagcattgtcatgcttggcgttggtgcaccatttctttcatatatatcttttgattgttaaattttatacgttactacttcattgattctaaattataagatgttttggttttttcagatata

SEQ ID NO: 99520 - DNA, 1166 bp, Zea Mays
cattcattcactgctgcagagactgcagcagttatatatatatattgtcttcgcactcatccatccgtgctagataaaatagtgctgcagatgcaaaccaaaaaaaaaagaagaaaaaatccatttgattgatagagaaacacgaagcagccctttaatctgctcgctttctctttcatccatgcctgcccggctgcccctcccctgccctcatcatggctccgctcccttcccttctccctttatcgtctcgtctgcatgcaccatcgccgcagctaaagcttgctcctgccgccgcgcccgcgcgcgaggggttccttgatgccgcccagctcccagatggtggccatactacaactcacgctcctactcatttcatgtagcctttacagcatgctgcattcttcttcttcttcttctccttcctcctcctcctcctcctcctcctcggcaccgtcctcgctcgcgttgctggtgctgctggtcgtctccacctgcctctccttgctcttcgccagcctcaaaaggctactcagagacaccaccgcccacagaggagctaacaacagggcgccagctccttccatggaggaggctgcggctgcggctgcggctgtgtttccggagaagagcgttgtgtcgtcgtcgccactgccacaggacgaggcggcggaggatttcacggtgggcgggagcggaacaagcccgtcagattcttcggagtgcgcgacgaccaacgacgacgaggacgagggcaccgaggaagaaggctcggtgtcagacgaaaccgacgccgacaacgacgacgacgacgacgacgagagcctcattgagatctcccttgtcgacggccactacgtgggctccgagcagcgccgcgcgtacaactgcaactacaagaaggacctcctcgcggacctgctgccggacttgctgctcgacaggagagacttcatcttcgacatcttgtcggagatcggcgaggaggacgacagcctgatcgagatcgacctcgcgagaggctccatcaagtgcgacgtcgtcaaggcgtgaacatgaaccgtgtgtctgaaacctcccgctgcatgcattaatttgttcaaagctctggtctctctcaggtgcccctctttgcgagagctagcttattatgcatgtcttttctt

SEQ ID NO: 99521 - DNA, 1594 bp, Zea Mays
cgtcccctcggcgcacggttctgcctctgcccgcgacaccttgtcccgcttccgtcaatcacgcgccttgcacaaccgccccatccgcagccctcccacccccgtgacctcgtccgcccagatctggatcccgcccccctcatcggcgcctcctcccccgcgcgtccgagacctagatccgccgcttccccgtcaagctccccagtctccccctccctgctcggtccgtatggcggcttgacggcgaatcggatcttcctcggcctcctctccctgcgcccctctggtcgccatggagctcgcctataggttttctcaaactcctcgccgccggttttctcaaattgtcaatttgagaaaacctctacacccggatccgccgcttcctcgaactcctcgccgccggctctcctcagctccgccgactcgcttcgctgtcctcctcgccccaggccccagcctcctcctgatcccagattcgcctcgccggccccaggcgcccgccacgagcgccgtcaagcgaagccgttcttccctggtgcgtgccgctggcgtagctgccaggctccttccgccggagcacgtcgcggccagctggtcccttgctcgtcctccaccgtcgtcgcggcggacttcgtccccctcccgaaagcacagatccgcacggtctcggctgcatttctccacttgctggtaaggaagctcgctccgatggattactccgagggttagttccgccctggtcttccgtttctacgctgccagcaatcaagttccaagtcgtcgatggactgcgatttgttcgctgcgtggtggagcagcagcaccagattagtctccaggatttttcgggggtcagctgatgccccgggcccgtcgccagcgaggccagccatgccgcttcaccagaagcaggcggggctcgctgctagcaagctaggcgtgaggacatcgaagaaacacagggcttttgtcgcaagcgatgagcagtggtacaacaagatttttgatccgtcaagcgacttcatcttgacatggaaccgcattttcttcttctcctgcttcgtcgcgctacttcatcttgacaagcgatgtttgttttttttcctttcctctttctacttggttttcatttaacgaattggtatcgctgatgcaccagtttaatttggtgccctattatttgttctttccctggagagagggatcgacacctgtaccattgcttgccatttgtctggaccagttcaacaattcgatttaaccatcgcgtatatgtgtctgatttggatgaacatttccctcatggtgatgagattgccggtttgttatgccttaatatgcgtggttgaggatgtgctggccgtgtgccctgctctgctttttaaccgctgttatatttttttcaaacaaaagagaggcgtaatatccgtcaagatcaactccaataaaaagttgtatatttgagtcctaaaaattaaaatagggtctaatttcaaatatttaaaactatagaaaatatttgcagttgaaacagttgagtcatatatcatattattagaaaatagatcattttatttaagaaataaaaagt

SEQ ID NO: 99522 - DNA, 230 bp, Zea Mays
gactttttaatggttggtctttccacaaaggacatgccagtgaccaaagccgattcaatagatgttttatgtgattatatcatggcaatataagacgatacgacactagagtaagtgctcattgatttatttattttatgtatatcaactacttagattcttgatatagactttcgtcatgctacattacaggagaacatgggtgcgaagtttcaatccttttaagatag

SEQ ID NO: 99523 - DNA, 97 bp, Zea Mays
attcaccttgccgcgtatgacatcagcatgacatcaagcaagcaacttcagtggtcgttctgttcgtgcgtagtctcgctgcgtccatctagaaaat

SEQ ID NO: 99524 - DNA, 300 bp, Zea Mays
atggatcccaacacgaagattattcgggaggagttggagaagaaattcgcagccatggatctcaaatgggagcaacaattctccgaatacgcccgtcacaaggaggagcgtgtggaggccttggagtcggctacggccgatttcgagcagtgtcggcctaaagtggatgccgccatggaagaccaggaaactcagcaagcagtgggagcgtgcggcgctcgaacactcctcaacggaacccggacttccctcgaagccagagttctccatgccgcatcctggtggtggcaaacactttga

SEQ ID NO: 99525 - DNA, 141 bp, Zea Mays
tctcttaacacctatgtcagcttcagatctggaaatgcagtagattttcttctcaaacctgtccacgtacgtgaacctgtggccatgctacaatgcattgtagtaatagtaatctgcagcagtgaatgattgattgatcac

SEQ ID NO: 99526 - DNA, 2140 bp, Zea Mays
ccccctcctctcttccccaaacacacaccacaaccataaccacgaactacctgaacggctgaacaattcccttcgtcccatcttcctctcgtctctcccaccccccgacccgaccgggcggcctcctccccgaaccctagcccctctacaaccaccgcgtcctgcctcctctgggcggctccgccccagatccagcacagcaggttaaaaagggggcgggcaggcgttggatggacgggccgaagcggtcgcagctgcgggtgcgcctccgcgtcacggcgcgccggcgtggtgccgatggcgacggcgccgggggcgctgccgggcctggggggcgtaagcgccggatggaggcccccgtccgcaactccgtcgccaagctgcagcgccgcgagatcgggggccgccagctcgccgcgcgcggcggcggccccgccgccgccgtgcccgagcgcttccggaacatgcagctccaggaggagttcgatacatatgatgaaaatgctcacctatttgtgaagctgcagtttcttaaaagaagatccaaaattattgagattgttgcagcaaaggatatcatatttgcccttgctaattctgggctttgtgctgcttttgaccgagtaacaaacaagcgcatagccttcttgaatttgagcccagatgaagtgattcggagcttgttttacaacaagaacaatgattctcttattactgtttcagtttatgcggctgacaaattcagcacattgaagtgcagaacaaccccgattgagtatattagaaggaatcagttagatgcagggtttcctctctttgaatcagagtctctgaaatggcctggatttgtggagtttgatgatgtgaatggaaaagtactcacatattcagcgcaggatggcatatataaggtatttgaattgaagaactactccttcctatattcaataccagatgaaaacgtgcaggagataaagatcaggacaccaagttatgttccattgaagatactatcaattgaagatggaaagcaactgaaatcttttaagcacttgttgcatcgcaacaagaaaattgatttcatcgagcagttcaatgagaagctccttgtcaagcaagagaatgaaaacttccagatatttgatgtatggtgactgtggatataatttgatttttcttaatccttactgtttgaaggcctaatgattttatggtctgtgtttcgaaggtgcggagttctgagctaattgaagtcagtgtctccaagtttatgaccccttcagcattcatttttctgtatgagaacaacctcttcttgacattccgaaacagaacagtcgctgtatgggacttcagaggagagcttgtgacttcatttgaagaccatttgctctggcataatgattgtagcaccaacaatatttacatcacgagtgaccaggatctcattatctcgtactgcaaatctgaggcagtggctgaggatggtacagttgttccagttggatccatcaacataagtgagattatgacaggcaggtgtatcgccaagattactgccaatgatccttccctaagtgtacccggacgcagaaatggttacagcaagcggtcctcggactggagcaccgttccagaagctctggaggacgtcactgcactgttttatgatgaggacaggaatgagatctacaccggcaacagccatgggctggtgcatgtgtggtctaactagatagtagcatgtacatacatcatttcgcccttttgatttgacttggttagctttactgcatgctgtataatccttggctcgggggctcacctagcttttctatttggcaatagaatgtgtttccttgagcaattgtgattgcatagtgttcttgtaaatatcttttgttcagctaccttgttcaagtaacatagaaataggcctgccaaatgtaactttgctggatactgccagccaagtttcgggcagcaagagagtgaagacctgcagttctgaccatcatgttattgttattttcaagtgtgttgtagtgttcgttttgtctgtaagctgctgaattatcgtatctgaagccttggatgaaccacctttaattatcagttaatctgtacctgattgacctca

SEQ ID NO: 99527 - DNA, 713 bp, Zea Mays
ataaaaaaagtgaactggcattatagaaatctttctttgattgtgctatcaggaaataatcttgacactggtgtcgtgcagttgttccagttggatccatcaacataagtgagattatgacaggcaggtgtatcgccaagattactgccaatgatccttccctaagtgtacccggacgcagaaatggttacagcaagcggtcctcggactggagcaccgttccagaagctctggaggacgtcactgcactgttttatgatgaggacaggaatgagatctacaccggcaacagccatgggctggtgcatgtgtggtctaactagatagtagcatgtacatacatcatttcgcccttttgatttgacttggttagctttactgcatgctgtataatccttggctcgggggctcacctagcttttctatttggcaatagaatgtgtttccttgagcaattgtgattgcatagtgttcttgtaaatatcttttgttcagctaccttgttcaagtaacatagaaataggcctgccaaatgtaactttgctggatactgccagccaagtttcgggcagcaagagagtgaagacctgcagttctgaccatcatgttattgttattttcaagtgtgttgtagtgttcgttttgtctgtaagctgctgaattatcgtatctgaagccttggatgaaccacctttaattatcagttaatctgt

SEQ ID NO: 99528 - DNA, 2072 bp, Zea Mays
ccccctcctctcttccccaaacacacaccacaaccataaccacgaactacctgaacggctgaacaattcccttcgtcccatcttcctctcgtctctcccaccccccgacccgaccgggcggcctcctccccgaaccctagcccctctacaaccaccgcgtcctgcctcctctgggcggctccgccccagatccagcacagcaggttaaaaagggggcgggcaggcgttggatggacgggccgaagcggtcgcagctgcgggtgcgcctccgcgtcacggcgcgccggcgtggtgccgatggcgacggcgccgggggcgctgccgggcctggggggcgtaagcgccggatggaggcccccgtccgcaactccgtcgccaagctgcagcgccgcgagatcgggggccgccagctcgccgcgcgcggcggcggccccgccgccgccgtgcccgagcgcttccggaacatgcagctccaggaggagttcgatacatatgatgaaaatgctcacctatttgtgaagctgcagtttcttaaaagaagatccaaaattattgagattgttgcagcaaaggatatcatatttgcccttgctaattctgggctttgtgctgcttttgaccgagtaacaaacaagcgcatagccttcttgaatttgagcccagatgaagtgattcggagcttgttttacaacaagaacaatgattctcttattactgtttcagtttatgcggctgacaaattcagcacattgaagtgcagaacaaccccgattgagtatattagaaggaatcagttagatgcagggtttcctctctttgaatcagagtctctgaaatggcctggatttgtggagtttgatgatgtgaatggaaaagtactcacatattcagcgcaggatggcatatataaggtatttgaattgaagaactactccttcctatattcaataccagatgaaaacgtgcaggagataaagatcagtccaggaatcatgctcttgatatatgataggacaccaagttatgttccattgaagatactatcaattgaagatggaaagcaactgaaatcttttaagcacttgttgcatcgcaacaagaaaattgatttcatcgagcagttcaatgagaagctccttgtcaagcaagagaatgaaaacttccagatatttgatgtgcggagttctgagctaattgaagtcagtgtctccaagtttatgaccccttcagcattcatttttctgtatgagaacaacctcttcttgacattccgaaacagaacagtcgctgtatgggacttcagaggagagcttgtgacttcatttgaagaccatttgctctggcataatgattgtagcaccaacaatatttacatcacgagtgaccaggatctcattatctcgtactgcaaatctgaggcagtggctgaggatggtacagttgttccagttggatccatcaacataagtgagattatgacaggcaggtgtatcgccaagattactgccaatgatccttccctaagtgtacccggacgcagaaatggttacagcaagcggtcctcggactggagcaccgttccagaagctctggaggacgtcactgcactgttttatgatgaggacaggaatgagatctacaccggcaacagccatgggctggtgcatgtgtggtctaactagatagtagcatgtacatacatcatttcgcccttttgatttgacttggttagctttactgcatgctgtataatccttggctcgggggctcacctagcttttctatttggcaatagaatgtgtttccttgagcaattgtgattgcatagtgttcttgtaaatatcttttgttcagctaccttgttcaagtaacatagaaataggcctgccaaatgtaactttgctggatactgccagccaagtttcgggcagcaagagagtgaagacctgcagttctgaccatcatgttattgttattttcaagtgtgttgtagtgttcgttttgtctgtaagctgctgaattatcgtatctgaagccttggatgaaccacctttaattatcagttaatctgt

SEQ ID NO: 99529 - DNA, 2042 bp, Zea Mays
ccccctcctctcttccccaaacacacaccacaaccataaccacgaactacctgaacggctgaacaattcccttcgtcccatcttcctctcgtctctcccaccccccgacccgaccgggcggcctcctccccgaaccctagcccctctacaaccaccgcgtcctgcctcctctgggcggctccgccccagatccagcacagcaggttaaaaagggggcgggcaggcgttggatggacgggccgaagcggtcgcagctgcgggtgcgcctccgcgtcacggcgcgccggcgtggtgccgatggcgacggcgccgggggcgctgccgggcctggggggcgtaagcgccggatggaggcccccgtccgcaactccgtcgccaagctgcagcgccgcgagatcgggggccgccagctcgccgcgcgcggcggcggccccgccgccgccgtgcccgagcgcttccggaacatgcagctccaggaggagttcgatacatatgatgaaaatgctcacctatttgtgaagctgcagtttcttaaaagaagatccaaaattattgagattgttgcagcaaaggatatcatatttgcccttgctaattctgggctttgtgctgcttttgaccgagtaacaaacaagcgcatagccttcttgaatttgagcccagatgaagtgattcggagcttgttttacaacaagaacaatgattctcttattactgtttcagtttatgcggctgacaaattcagcacattgaagtgcagaacaaccccgattgagtatattagaaggaatcagttagatgcagggtttcctctctttgaatcagagtctctgaaatggcctggatttgtggagtttgatgatgtgaatggaaaagtactcacatattcagcgcaggatggcatatataaggtatttgaattgaagaactactccttcctatattcaataccagatgaaaacgtgcaggagataaagatcaggacaccaagttatgttccattgaagatactatcaattgaagatggaaagcaactgaaatcttttaagcacttgttgcatcgcaacaagaaaattgatttcatcgagcagttcaatgagaagctccttgtcaagcaagagaatgaaaacttccagatatttgatgtgcggagttctgagctaattgaagtcagtgtctccaagtttatgaccccttcagcattcatttttctgtatgagaacaacctcttcttgacattccgaaacagaacagtcgctgtatgggacttcagaggagagcttgtgacttcatttgaagaccatttgctctggcataatgattgtagcaccaacaatatttacatcacgagtgaccaggatctcattatctcgtactgcaaatctgaggcagtggctgaggatggtacagttgttccagttggatccatcaacataagtgagattatgacaggcaggtgtatcgccaagattactgccaatgatccttccctaagtgtacccggacgcagaaatggttacagcaagcggtcctcggactggagcaccgttccagaagctctggaggacgtcactgcactgttttatgatgaggacaggaatgagatctacaccggcaacagccatgggctggtgcatgtgtggtctaactagatagtagcatgtacatacatcatttcgcccttttgatttgacttggttagctttactgcatgctgtataatccttggctcgggggctcacctagcttttctatttggcaatagaatgtgtttccttgagcaattgtgattgcatagtgttcttgtaaatatcttttgttcagctaccttgttcaagtaacatagaaataggcctgccaaatgtaactttgctggatactgccagccaagtttcgggcagcaagagagtgaagacctgcagttctgaccatcatgttattgttattttcaagtgtgttgtagtgttcgttttgtctgtaagctgctgaattatcgtatctgaagccttggatgaaccacctttaattatcagttaatctgt

SEQ ID NO: 99530 - DNA, 423 bp, Zea Mays
  misc_feature (94)..(193): n is a, c, g, or t
tacaacagtacagtgtggggaaaaaaacacacaaataaaagtcacaacaacccacgtctgttctacaggactgacaacaaaggtggaatgatcnnnnnnnnnnnnnnnnnnnnnnnnnnnnnnnnnnnnnnnnnnnnnnnnnnnnnnnnnnnnnnnnnnnnnnnnnnnnnnnnnnnnnnnnnnnnnnnnnnnnaagcttgttctcttctttaggctacaagaggcctgcagtcattcaatctatgtacatatttaagcaaccaggtattggtggtgaggtcgtgccgcaccaggataatacattcctttacacggaacctcgtacatgcacagggctgtggcttgcacttgaagatgcaacaatcaacaatggttgcctgtgggcaattccaggatcacataaaaagggtttggtgagacgta

SEQ ID NO: 99531 - DNA, 1426 bp, Zea Mays
gcctctcgctgtgcattgaccagcgcagagacaagtagagcagggagggaagcccatcgtgtgtttctcagtcccagtcagcagcatggctgtcggcgtcgcaacggcggaggagatcaggaagaagagccactcgggcggtgtgcggcggtcgccggtggacaggccaccgttcacgctgggggatatcaagagggccatcccgccgcactgcttccagcgctcggcgctcaggtccttctcgtacctcctccacgacctcgccatcgcggccggtctcctgtaccttggcgttgccggcatcccggcgctcccgagcgccgcgctccgccgcttcgtggcgtggccgctctactgggcggcgcagggcagcgtgctgacgggcgtctgggtcatcgggcacgagtgcggccaccacgccttctccgactacccgctcctggacaacgccgtcggcttcgtgctccactccgcgctgctcacgcccttcttcgcctggaagtacagccaccggcgccaccacgccaacaccggctccatggagaacgacgaggtgtacgtggccaagacccgggacgcgctgcggtggtacacgccgctcgtgttcggcaacccggtcggccggctggtgtacatcgcgctgcagctcaccctcgcgtggccgctctacctggcgttcaacctctcagggcagaactacggcggccgcttcacctgccactacgacccctacagcccgctctacacggcccaggagcgcgtcccggtgctcgcctccgacgccggcatcctggccgcgctgctcaccatctacaagctctccgtggcgttcgggttctggacggtggtgcgcctctacggcgtgccggtgctcatcgtcagcgtgctgttcgtgctcatcacgtacctgcaccacacgcacctggcgctgccgcactacgactccagcgagtgggactggctgcgcggcgcgctcgccaccatggaccgcgactacggcctcctcaaccgcgtgctgcacaacgtcaccgacacccatgtcctgcaccacatcttccccaacatgccgcactaccacgccatggaggccaccagggccatgcgcccgcttcttggagagtactacatgttcgacgacacgcccatcgtcaaggccacatggcgcgaggccaagcagtgcatctacgttgagcccggggaggagcacaagggcgtgtactggtacaacaacaagttctagcacacaacatgtacaacaacgaaccacctgtcatggatcgtggatcggatggatggccttcctcgttgcttctatcatgcattcctgtctggaataatataataataataatcctttgagttgagtcttactgtactatatcctttgagttgagttgagttggacctgttaataccaactacatat

SEQ ID NO: 99532 - DNA, 403 bp, Zea Mays
ggcacatctttacccacaagtcgtgtatcccatctagccagggtttgcaaggcccttagacactgtaacaatccaaaatcgtatcttggtcagttaagaaaatttcaagcgtattataacaaagttatgaattaagactttcttccctaaaatttagtaaatagtaaatataaaatgttggttatataaaatctataataaataggatagtgagttattctatataaattactcatattggtttatataactatgtgaattccatgcttattaaatttcatgcatacaaatacttatttgagcaaagtaaataaggagtaaataaatgtaaaatatttgtattcatgttggtgttttggttgtgcatataaatatggtttcaaaatttaaaatcagatttgaa

SEQ ID NO: 99533 - DNA, 2088 bp, Zea Mays
ctcagttataagacttcttgttggatatgctattaggatagttaaattgtaaaatttgtagatatgtcaaaataaaaaaaaagggttagagacaatgtccaaataaactcggtaataaagagcaggcactctccccacctcacctcagtcaccactactttcccgctctatccgtatataacacccaccaccaccgccactctccttcctcctctgcatgtctcaacaacccgtctccaagaaaccaccttcccccctcgctccaatcccaatccttctccgcggaccaatagaacccaatccgatcactccccacgcagtttccccatatcgaaagatccgatcggagtccggcagctaattcaccggggaaagatgaaggtcgacagggagatggagattctgctgaacgagatccccctcctccaccacgtcggcctcctcggcggcagcgaggccggcgcggacgacgacgccgacctctccttcctcatccacgagctcgccgcgatgggcctcgtcgacggcgacgacgagctgccggcgccgggcgctgccaccggctacggcttccccacgaaaggcgagaaccttgtcgccatgcactcgttctccatggccagccactacgcgcacatgcgctctctgtttgttcccgtcaccttcgacgacgccgccgcggccgacggctgggacatccggtgctccccgccgccttatgtgcctctgccttctcccgccacgccgagggcccggtgcaagagcgtgaggaggaagaacggctcggtgatgacgacgagccccaagaagtgcggagccgccgcggcggccaagtggcacggcgagagcctggccggcctgcgcggggtcatgtaccacatggcgcgcgaccagcacgggtgccgcctgctgcagcagaggctcgacgacggcaagcgcgaggtcgactatatcttcgccggcgtctcgcgccacgccgcgcagctgatggtggacccgttcgggaactacctcatgcagaagctgctcgccgtctgcgacgacgggcagaggatgacgcttgtgctcaccctcaccgccgaccccttcgcgctcgtcaggatatccctcaacgtccatggaacacgggcggtgcagaagctgatcgagagactcagtgcaagggaagagattggtcttgtcatggatgctctgcgccctggcttcttggagctcatcaaggataccaatggcaaccatgtcgtgcaaaagtgtttgcattcgtttgcttcaaacgataataaggcgatctttgctgctgctgcactccactgcgtcgatatcgggatgcaaatccacggttgctgtgtcctacagcggtgcattgcgcggtcgcgtggtgagcacagggacaagctggttgccgccattgctcacaatgggtttaagcttgccgaagatgcatatgggaactacgttgtccaggttgtactggacttgaagataccaactgcgaattcaagccttgcgcaacagtttggaggcaagtatatccacctgtccatgcagaagttcagcagcaatgttgtggagaaatgcctgaaagtgttcaaggaggttgacaaggccaagatcatactggaactccttgccacgccacacctggagcaactgcttccgcactgctatgcaaactatgtcgtctactctgctctcaagaattcaaagggctcacttcattccgcactgataaatgcaatcctaccacatgaggaactacttaggaccagtccgtactgcaagaggatatactcgaaattttttctgaagaattgatggcaggtttgcagcttgtaacaagaactgctgcgctcttgtgctattttttttcagtttcaaaaggcataaagatgatcatgaaatagatctgtataaattagtattctttggtcatgtactcctagctgtacctgtaattgatgcacggcttgtgcctggtgctgcataatcatctgggacggaataagttcaattgaaagtatcatacaaattatttgtatgttacgttgttgtcttgttgatgcatgcaaggatattgttgttgttacc

SEQ ID NO: 99534 - DNA, 199 bp, Zea Mays
ttttcttttaacaaatatctggaacttcggattaagaattggtggaatatcaggcaatccgtacctttcttaactgatattcaagagaagaattctagaaggattcataaaactagaagaactttttctcttggatgaaggattcataaaagagaaaccgaagacacatgtacaaaaacttcctataggaatacacaag

SEQ ID NO: 99535 - DNA, 1918 bp, Zea Mays
aaaagaacatctataagacattaatgttgttactatttggttattcacccatgtattttgttgtaattctcgctgatttaaatgcatgctgattaagcaatgatgttctctggtggaagtatgcaggttgttttgcaagtgaatgttagcgttaacaaattggaagatcctgtgcttgaagtccttcagtttgagaaaagtatatcaaacaattgtatgcctgggaatcttgtggatggacaatgtgacagtaacgatgatccatgtcaggagctgcttagttggttgctccctttagatcgcacattaccacctcgttctttggcaccccctactctcaatccaagtgtatcacacaagcaatcttattctgcttctggttctcaaatattcaacttcagaagttactccatgccttcagcctcttctgttcagacaccaaataatataagaccaccaccaatatctgaaagtcaagaatttatgcctgaaaaacctgcaaaaaccccagatattataaatgatgggcaactttcgtttagaggagttcctttagaacctgaacggtattctgtacgttgtggtttagaaggcgtgtatctaccagggaaaagatggcggagaaaagttgaaatcattcaaccaattgaggttcaatcttttgctgcaaaatgtactgtggaaaatcttctctgtgtcacagtaaagaatattgctcctactcatgcaaaagatatagtcgtattcatcgatgcaattactattgtatttgaggaggcatccaaaggaggtgctcctttgtctttaccaattgctagtattgaggttgggcatggtcacagcttgccaaacctagcactcaggaggggcgaggaacactcttttattctcaaaccagcaactatgtcctcaagggaacggaagactaacagtcatgcacctctggccttatcactcccaacgatgaccggtgctactttaaatactcatacaccaaaggctggtgagccgtatgctgatctaagtgaccaatatgctgtactggtatcttatcgctgtaattacacagaatcgaaactttttttcaagcaagcaacaagctggcgaccctctgcagccagcgatcttatgatctcagtatcatccgaactgtctttacggaatcctagtcttggtgctcgtgttcctcaactccccgtgcagatactaacactcgaagctactaatatgacatccgaaaaccttacattaactgtccttgctcctgaagcatctggttcttcttcagttgtatccttgaactcatctccaaccaccccaaatggttcttttgatggtgttaatgagtcagcaaaaagatctggggtgggaaaagatgggattggctttcgaagattgaattctgtcctagctactccaaaagaaggtgataatggaggaaacagaatgagtaatgcttcaggctgtactcatctgtggttgcaaagtgcagtgcccctagggtgtgttcctgcccgctcaagcaccactgtcaaacttgagctgctaccattatcagatggaattatcacacttgatactctgcaaataaccgcaagggagaaaggccttgcttacataccggagcactccttggagatacatgccacctctggtatgtcatcaggaaggtcataggataggagagcatcaagagattttaccgaaggatggttgctgccaacatggggaaactaccccagatgaatcattatgtatcacaattgtgttacaaatccattcatttcatactgaggtcgccgagacactggtgttcgtcttcacaaaggcttatgaaattcgtaatgtgttgcttagttttgatgccgttattgttgttggtggtgttcatttaatcccactcatgttgctgagttgt

SEQ ID NO: 99536 - DNA, 127 bp, Zea Mays
caaaaataaacgtatttctagaaatgatcctaagcagccgaccgcttccaataatattgtttgtaagcggttattttgttgggtctcgctgcctaaaacaatacgtaagcgtcgtttgaaaaaaaaa

SEQ ID NO: 99537 - DNA, 650 bp, Zea Mays
ttgctgtacttgaacaaagtcagtgcatctgttttcattgcagctttagccgtgcccaaactagtattcggagaggcttttacacctgatgcagttagatcatcaaagtcaagatacgcatgccactgctcatggaaggttagtgactctccctgatctgctagatggataatatttgtttccatactaacaggagtcatagcagtactcttatcctccactggttgcatcagagatgctattgctctggagttattttcctcttcatacaattgcaaattcgtattttcatcctgaactgatgttctggaggactgaatatttgtggctccatttgccgcattattgttttcacaattgtttgatatattgttaggtgcatctgcttcttcatcagattctgatgattcataagcagaagccagaagcccaagagcggaagtgcatccatgggtgctgctgctgtatagctgtctacacctatcagaaacttgggctgcactcacattttgtattgtattatcatcagtttgatgagcatatcctgcttgctaaccttgttgatgagctatcaccattcgatttgaggtatcatccgattccattatttctctgtgtattgcacttgatgacatgcactccctagaaat

SEQ ID NO: 99538 - DNA, 820 bp, Zea Mays
cgtcagtttgtagaaactgtgttgcaagaatggtgcaagacgatgagtaatttgcctgctggtctccaccaagcttgtgagatgggtttggtgagttctgcacagatggtacgttacttgtcaatatttgcaagacctacaaacactaggtccttctcaagagctcttccaggttggctttccaaaggtcttgttggaaggacacttgcagatccatcattcccacataagatgggtttggagtttgtggctaccttttcctcatctatttggtgggaaatgaatattcgtaaggagaggtttaaacaagaatgggacttagtgattgtgaatgctttgactgcatcgtgttgcaacttgatggttcttgggcttttggcgccatgccgttcatatgggagtacatctcgatttgagttccaaaatgcaattgagaaacttccaagcaacatattcgagaagagctatcctttgagagagtttgatctaccaaaacgaatcagtgcattcttttataaagctgctgagcttagtcttgtcgggtttgtggccggctctgttcaaggtggtatgtccaaagtcttgtctgtaagaaaagaaaggaggttatcggtgactattccctctatcagcaccaatgctcttggttacggagctttcctagggctctatgtgaacttgcgatatcaaattgctctgtggactagaccaatatatggtcaagcgctttgacgttttgggtgtggcaatcttctttagcacagcagcaaggtaaatctgtattgatgttctcgtcttaatacattagtgtttcatggga

SEQ ID NO: 99539 - DNA, 879 bp, Zea Mays
gacggcacagcgcgcaggcccattaccaaccctaccctgtccttcgttgcgcctcccatggcgtcgtcactcgctgccttccaccccactctttccccggaccaacccataacccatccgcatcgctgccctgcgcgccccaaccccaccaccggtctcctccgcctcctcccgccctgccgtcgcgctcgtgctcccgcgctcgtccgcctcgccgtttctgcctcctccacctctgccccgctcccatcggccgatcggtcggaggccgcgtcgtcgcttgagagatgcctcttgttgacgggggcggggatggaaacgggggcgatgccaccagcctcggccccgccgcgcgccgcgccagtgatgaaggggggacggaagcagcgcagcacattaggagccgtcacgctcgagaaggccaagctcgatctctcccagcgtcgcaagaagatcatgcccgaggttgttatctaatcctaatcctctcgcaggtttgcgtaatttttgctggaggaaggggcattccgaaataaggtttagaattttagggataataagcctttagagtgcggaatttttgctggatgcaatagagtgcggagtacccatgtttggcacagtggtgactacagtgatcgagtgccaaggtattggataaggtatgcagggcagaaagcgggtgatggtagaatagttgtatggaaatcatggaaaagatgtgcttgtattgtgtaacatgctctgtttagacttgctactcggcatggatatttgcttcaaaatttttctgattacatcttcaaaacagagagtttcctatgcatttttccatccaaaggtgtgtgcctgaacgtgtcttgctaccggtggtggagg

SEQ ID NO: 99540 - DNA, 89 bp, Zea Mays
tttagtatctttgatgagtaaaatggcacatgaaatgtccattataccctcagtcttatcctatccacaccacgcagtctttgaagtct

SEQ ID NO: 99541 - DNA, 775 bp, Zea Mays
aacaaaggagaaaaaacaaacggatcctttaaagcaggatatagtgcgtcttcatgttcgtctggatcaccaggttatgtttggtgagcatgttggcattattggttcgacaaaagagcttggctcatggaagagtcaggttgatatggattggacaccaaatggttgggtctgccagcttgatgtccctggggaagcacttctggagttcaagtttgtgataattttgaataaaggcaaggacaaaatatgggaggatggtgataaccgtgtagttaatttgccaaaaaatggttcatttgatatgccatgccactggaataagacaaaagagcctttagatcttttaggatcatcagagattaagttgtctggagatactgaggtgataggtgaagatgctaaactatctgaaaatattgctctagaagagatggggagtatctgcaacgctggggttggcgatctgacaccaaaacacgagtcaagcacacttggtggccaatggcaaggtagtgatacagttttcatgcggtctaatgagcatcacaatactgagaattgtaggaagtgggacatgactgggcttgatgcagtatcgctgaaattggtggagggtgataaagcatcaagaaactggtggcggaagttggagcttgtccgtgtgctcttgtctgaatatgttcaagatcagagtcacttggaggctcttacatattctgctatatatctaaaggtcctccctcttgcaccttactgtgctgttagtcaatag

SEQ ID NO: 99542 - DNA, 11519 bp, Zea Mays
tcgccgcctccgaatccccacctctttgctcctccgccatcctcctccgcggccgatgtgtgtgccccgccggcccaaaaccctagaggttacgagcaggtaagggtttcgatcggagatggcggctgcggctgcggcgatggccgcacatagagccagcttcccgctgcgcctgcagcagatccttgctggcagccgcgccgtctcacctgcgatcaagatcgagtctgagccgcctgcaaacatcaaagcatttattgatcgagtagtcaatattccactacatgacattgccataccgctatcaggcttctgttgggagttcaataagggaaatttccaccattggaggcctttatttattcattttgacacctatttcaagacatacatttcttctcggaaggatcttcttttatctgatgatatgaccgaggctgaccctatgccaaagaatgccatcttgaaaatcttaagagttatgcagattattttggagaactgccagaatagaagttcttttactggtcttgcgcatcttaagcttctcctggcatcgtcagaccctgagatagttgtagcagctttggaaactcttgttgccttggtcaaaataaatccttcaaagttgcatatgaatggaaagctaattagctgcggacctataaacacccatcttctatcattggcccaaggatggggcagcaaggaggaaggtcttggcatatattcttgtgttgtggcaaatgaaggaaaccatcaggggggtttgtccttgttccctgtagacttggagaacaaatatggtggcacacaacatcgtcttggttcaactcttcattttgagtataatttgggtcctgcacagtatcctggccaaactagtgacaagggcaagtcatctaatttgtgtgtgatacatattccagacatgcatcttcagaaagaggatgacttgagcatactgaagcaatgtgtagacaagttcaatgtgcccccagagcacaggtttgcattgcttacaaggataagatatgcccgtgctttcaactctgcacggacttgtaggatctatagccgcataagtcttctttcgttcattgttcttgtgcaatcgagtgatgctcatgatgaactcacatatttctttacaaatgaaccagagtacataaacgagttaatcaggcttgttcggtcagaggattctgttcctgggtccattcgtgctctggctatgctagcactgggagcacagctggcagcatatgcatcatctcatgagcgtgctaggatattgagtggctcaagtattatctctgctggtggcaatcgtatggtcttgctcagtgtcctgcagaaagcaatatcctcactcaatagcctgaatgatacctcatctcctctaattgttgatgcccttcttcagttttttctgctccatgtactgtcttcatcaagttcagggactacggttagaggctcagggatggttcctcctctcttgcccttgctgcgagataatgatccttctcatatgcatcttgtctgcttggcagtgaagactctccaaaagcttatggagtacagcagccctgctgtttctctgtttaaagacttgggtggtgtagagcttttgtctcagaggttacatgtagaagttcagcgtgttattggtactgctgatggacataattcaatggttactgatgcagtgaaatcagatgataaccacatgtactctcagaagcgattgattaaagctttgctcaaggctttggggtctgctacttattcccctgggaatcctgctcgttctcaaagctcccaagataactcattgcctgtctcactttcccttatatttcagaatgtagataagtttgggggtgacatttatttttcagcagttactgttatgagcgaaataatccataaagatcctacatgctttattactttgaaggaactcggtgttccagatgcttttatctcatcagtgactgctggggtaataccatcttgtaaagcccttatctgtgttcctaatggcctgggtgcaatatgcctcaataatcaaggacttgaggctgtcagggaaacttcagcactgcgatttcttgtagataccttcactagcaggaaatacttgataccaatgaatgagggtgtggtccttctagctaatgcagtggaagagcttcttcgtcatgtgcaatccctgagaagtattggtgttgacatcattattgaaataatcaataaactaagttcgtctcaggaatataaaaacaatgaaacagccaccttgcaagaaaaaacagatatggaaactgatgttgaagggcgtgatttggtaagtgctatggactcaagcgtggatggaagtaatgatgaacagttttctcatctgagcattttccatgtgatggtattggtgcaccggacaatggaaaactcggaaacctgccggttatttgtagaaaagggagggctacatgctcttttgacactcttgttgaggcctagcatcacacagtcatctggagggatgcctattgctttgcatagcacgatggtgttcaagggttttactcagcatcactctactccacttgcacgtgcattttgctcatctttaaaggagcatttgaagagtgcattgaaggaacttgataaagtttccaactcatttgatatgaccaagattgaaaaaggagcgatcccatctttgtttgttgttgaatttttgctattcctagctgcctcaaaagataatcgttggatgaatgctttgctctcagaatttggcgatgccagcagggaggtcctggaagatgttgggcaagttcaccgggaagtgctttggaaaatttcgctttttgaaaaaaacaagattgtcgctgaaaccagttcatcttcttccacatctgaagctcagcagcctgacatgtctgccagcgacattggtgatagcagatacacttctttcaggcaatatcttgatccaattttaaggcgaaggggttctgggtggaacatagagtctcaagtgtctgacctcattaatatgtatcgagacattggccgtgcagctagtgactcgcagagggttggttctgatagatattctagtctaggtttgccctcaagttcccaggaccagttttccagttcatctgatgcaaatgccagcacaaggtcagaagaggacaagaaaaaatctgagcattcctcctgctttgacatgatgagatctctctcctaccatatcaaccatctttttttggagcttggtaaagcaatgctttttgcatctcgtcgggagaatagtcctgtaaacctatccccagccgttatatctgttgctaacaatattgcttctattgtgttggagcacctcaactttgaaggtcattcggtaagttttgagagggacatgactgttaccacaaaatgcagatatcttggaaaggtggttgaatttgttgatgggatgttattagaccggccagaatcatgtaattcgattatggtgaattcattttattgccgtggtgtcattcaggccatcctgaccacatttcaggccaccagtgagttgctcttcacaatgagcaggccaccgtcttcacctatggagacggatagtaaaaccggaaaggatggaaaggagatggattcttcatggatctatggtcccctcaccagttatggggcaattatggatcatcttgtgacctcatcttttattctctcttcatcaactagacaattacttgagcaacctatttttaatggatctgtaaggttccctcaagatgctgagacgttcatgaagttacttcagtcaaaggtgttgaagacagttcttcccatctgggcccatccccagttcccagaatgcaacatcgagctgattagttcagtcatgtccatcatgaggcatgtttgctctggggtggaagtgaaagacactgttggcaatggtggtgctcgtttggctggtccacctcctgatgagagtgcaatttcacttattgtagagatgggtttttctcgtgccagggctgaagaagcattaagacaagttggaacaaacagtgttgaaatagcaactgattggttattcgcacacccagaggaaccacaagaggaggatgatgaacttgctcgggcgcttgcaatgtctcttgggaattctgttacccctgcacaagagggagatagtaggtccaatgatcttgagctggaagaagcaacagttcagccgcctcctatagatgaaatgttacgttcatgtcttcagctacttcagagaaaggaagcattagctttctctgtcagggatatgcttgttactatcagctcacagaatgatggccaaaaccgagtaaaggtgcttacatatttgattgataatctgaaacaatgtgtggtggcatctgagccttcaaatgatactgcattgtctgctcttttacatgttcttgctttgattcttcatggagatactgctgcccgtgaagttgcctcaaaggcaggacttgtgaaggttgctttggatctgctgtgcagctgggaggtgcaaattagggaaagtagcatgattgaggttcctaattgggtaatttcctgtttcctttctgttgatcagatgctccagttggaaccaaagttgccagatgttacagagctacatgtcctgaaaagggataactcaaatataaaaacatcacttgtgattgatgacagcaagagaaaagattcagaatccttgccaaatgttgggttactagacatggaggaccagtttcaacttttgaagatctgttgtaagtgcataggaaaacagttaccttcggcttccatgcatgctattctccagctctctgcaacactgacaaaagtccatgcagctgctatttgtttccttgaatctggtggtttgaatgcattactatcactgccgacaagtagtttgttttctgggttcaacaatatggcttctacaataattcgtcacattttggaggaccctcacacccttcagcaagcaatggaattagagatacgtcacagtcttgttacagctgctaatcgacatgcaaatcccagggttacaccacgcaattttatccagaatttggcttttgtcgtgtatagggacccagtgatatttatgaaagctgcccagtctgtgtgccagattgagatggttggagataggccatatgttgttctgttaaaggatcgtgagaaggaaaggatcaaggagaaagataaggacaagtcagttgataaggataaagcaacagtcgcagtcactaaggtagtttctggggacacagctgcaggatctcctgcaaattctcatggaaaacagtctgatttgaattcaagaaacgtgaaatctcaccgcaagccaccacaaagttttgtcactgttatagagcatctcttagatctgctgatgtcctttgttccgccaccccgtccagaggatcaagttgatgtctctggtactgccttatcttcagacatggatattgactgcagttctgcaaaagggaaagggaaagctgtgtctgtcccacctgaagagagcaagcatgctatccaagagtctactgcatcccttgccaaaactgcatttttccttaagttgctgacagatgtattgttaacttacgcatcatccattcatgttgttcttcgtcatgatgctgagctgagtaacatgcacggtccaaatcgaacaagtgccagactaactagtggtggaatctttaaccatatcctgcagcatttccttcctcatgctacaaggcaaaagaaagagagaaaaaatgatggagattggatgtataaattggcaacaagggctaatcagttcttggtggcttcatctattcgttctgcagaggcccgaaaaaggattttctctgaaatctgcagtatatttcttgatttcactgactcgtctgcagggtacaatgccccagtaccaaggatgaatgtgtatgtcgatttactgaatgatattctgtcagcccgatcaccaactggctcctcgctgtcagcagaatctgcagttatatttgttgaagctggtcttgttcattcattatcgacaatgcttcaagttcttgatttggatcaccctgattctgcaaagattgttactgctgttgttaaggccttggaactcgtcagtaaggaacatattcattcagcagataatgcgaaaggagtgaactcgtcaaagattgcttctgacagcaacaacgtgaattcatcatctaatagattccaggctcttgacatgacttctcagcccacagagatggttactgatcacagggaaacgtttaatgctgtccgaacttcacaaatatcagattcagtggcagatgagatggatcatgatcgtgatatggatggcggctttgctcgtgatggtgaagatgattttatgcatgagatggctgaagatggaactggtgatggatctacaatggaaattagaattgaaattccacgcaatagagaggatgatatggcccctgctgctgatgacactgatgaagatatatctgccgaggatggtgaagatgatgaagacgaagatgaggagaacaacaatctggaggaagatgatgcccatcggatgtctcatcctgacacagatcaggaagaccgtgaaatggatgaagaggaatttgatgaggatctgctagaagaagacgatgaagatgaggatgaggaaggagtcatccttcgcctggaggaggggattaatggcattaatgtgttggaccatgttgaagtatttggtgggagcaacaatttgtctggggatacgctgcgtgtgatgcctctagacatttttggtacaagaaggcaaggccgaagtacctccatatacaatcttcttggtagggctagtgatcatggtgttcttgatcatccacttctcgaagagccttcttcaacaacgaatttttcagaccaagggcatccagagaatcttgttgagatggctttctctgatcgaaaccatgaaagtagctcctctcgtttggatgctatattccgcagcttgcgaagtggacgtaatggacaccgctttaatatgtggctagatgacggtccacaacgtaatggatctgctgcccctgcagtacctgaaggcattgaagaattgctgatctctcatctgagacggcccactcctcaacctgatggccagagaacacctgttggtggtgctcaagaaaatgaccagcccaaccatggatcagatgctgaggcaagggaagtagcaccagctcagcaaaatgagaacagtgaaagtacactgaatcctctagatctgtcagaatgtgctggccctgcacctcctgatagtgatgcacttcaaagagatgtgtccaatgcaagtgagcttgctacagagatgcagtatgaacgtagtgatgctataacacgtgacgttgaagcagtgagccaagcaagcagtggcagtggtgctactttaggggagagcctcagaagtttagaggttgaaataggaagtgttgaagggcatgatgatggtgaccggcatggaacttcaggcacctcagaacgtttacctttgggtgatattcaagcagctgctcgatcacggaggccatctggaaatgctgtgccagtaagcagtagagatatgtctctggagagtgttagtgaggttcctcaaaatccagaccaagaacctgatcagaatgctagtgaggggaatcaggagcctaccagagcggcaggtgctgactcaattgatcctacatttttggaggctcttcctgaggacttgcgagctgaagttctttcttcacgtcaaaatcaagtaactcagacttctaatgaccaacctcaggatgatggtgatattgatcctgaattccttgctgcacttccccctgatataagagaggaggtgctagctcagcaacgtactcaaaggatgcaacaacaatcacaagaattagaaggacaacctgttgaaatggatgctgtttcaattattgcaacattcccttcagaaatccgggaagaggtgcttttgacatctcctgacacactactagccacactcacgcctgcactagttgctgaggccaacatgttaagggagagatttgctcatcggtatcacagtagctccctttttggtatgaactccaggaacaggagaggtgagtcctcccgacgtgacataatggcagcaggacttgatagaaacacaggtgatccctccagatcaactagcaagccaattgagactgaaggtgctcctcttgtcgatgaagatggccttaaagctcttattcggttacttcgagttgttcagcctctatacaagggtcagctgcagaagctacttgtgaatctttgtactcatcggggtagcagacaggccttggttcaaattctagtggacatgcttatgcttgatctgcaggggttttcaaagaaatcaatagatgcacctgagccaccatttaggttgtatggttgccatgcaaatatcgcatattcacgccctcaatcttcggatggtcttcctccattagtctcacgtcgtgtgctcgaaacgctcacgaacttggcaagaagccatccaaatgttgctaaactcttgctctttcttgaattcccttgcccatcaagatgtttccccgaagcacatgatcataggcatggcaaggctgttctcctagatgatggtgaagaacagaaaacctttgcacttgttcttctgttaaatctgttggatcagccactttatatgagaagtgtagctcatcttgaacagttactaaaccttcttgacgttgtcatgcacaatgctgagaatgaaattaagcaagctaagctagaagcatcatctgagaagccatctgcacctgataatgcagtgcaagatggtaaaaataactccgacatttctgtatcatatggatcagagttgaatcctgaggatggcagcaaagcccctgctgttgacaacagaagtaacttgcaagctgttttgcgaagtcttcctcaaccagagcttagattgctatgttcattgcttgcgcatgatggattgtcggacagcgcttatctccttgtaggtgaagtgttgaaaaagattgtggctcttgcccctttcttctgttgccatttcataaatgagcttgcacgttcaatgcaaaacttgacacttcgtgcaatgaaggagcttcatttgtacgagaattctgaaaaggctcttcttagctcttcatcagccaatggtactgcagttcttagagtagtgcaggctttgagctctcttgtcaatactcttcaagagagaaaggatccagaacagcctgctgaaaaggaccattcggacgcagtttcccagatttctgaaattaacacagcattggattctctgtggttggaattgagcaactgcataagcaagatagaaagctcttcagagtatgcatcaaatctaagtcctgcttctgcaagtgcagctatgttaacaacaggagtagcacctccattgcctgcaggaactcaaaacttattaccatatatagaatcattttttgtgacatgtgagaagttgcgtcctgggcaacctgatgctgtacaagatgcttcaacttctgatatggaagatgcttcgacatctagtggtgggcagagatcatctgcttgtcaagctagtcttgatgaaaagcaaaatgcttttgtgaaattctcagagaagcacagaagattgctgaatgcattcatccgtcaaaactctggattgctggaaaagtcattctcgctgatgttgaaaattcctcgcctgattgattttgacaataaacgtgcatattttcggtctaaaatcaagcatcagtatgatcatcatcatcatagccctgttagaatttctgtgcgtcgtccatatattcttgaggactcctacaatcagcttaggatgcgatctcctcaggatttgaagggtaggctcactgtccaatttcaaggagaagaaggaattgatgctggtgggctgacaagggaatggtaccagtcgatatcacgagtcattgttgacaagagtgcccttctgtttacgacagtcgggaatgatttgacgtttcaaccgaatcctaattctgtgtatcaaactgagcacctctcatacttcaaatttgttggacgagtggttggcaaagctctcttcgatggtcagcttttagatgcccacttcactagatctttctacaaacacatacttggtgtcaaggttacataccatgacattgaagccatcgatccttcgtactacaaaaacttgaaatggatgcttgagaatgacataagtgatgttttggatctcacctttagcatggatgcagacgaagagaaactgatattgtacgagaaggcagaggtcactgattgtgagttgattcctggagggcgtaacatcagggttactgaggagaataagcatgaatatgtcgaccgggtagcagagcatagattgaccactgccatcaggcctcagattaatgccttcctggaagggtttaatgaactcattccacgggagctgatatctatcttcaacgacaaagagcttgagcttctgattagtggtcttccagatattgacttggacgatttgaaaacaaatacagaatattctggctacagcatagcctctccagtcgtccagtggttctgggaaatcgttcaggggttcagcaaggaagacaaagctcggttcctccagttcgtcactggcacttcaaaggtaccgttggaaggttttagtgaacttcaagggatctctgggccacaaaggtttcagatacacaaggcatacggcagcacgaaccatctgccttcagctcatacttgctttaaccaactagacttgcctgagtacacgtccaaagagcagctccaggagaggttactgttggcaatccacgaagcaaatgaaggtttcggatttggctaatcagtcatgctcgtttgtccgtgagagtctgtacagatactgagcattgcaatgggcgagcagcacgtgtgtgctgatccttaccacattctgaactccacgtgtttgatggccggggagaacatagaagaatctccgtgggagaggtactgatgagagagagcgactattttgtgttcataatattcattacctttttttagcttttttcggtcgttgccccgttcgtagtttttgccttacattggacttcgctccgattttttttctctgcttttccttcatagactggtgtaagatgtaaccgaacactatgtcaaatgcaaatcatcttagggccccttcgattattactgaatggaggcatggaataatttctagccgtactgtttctctactatattaaagcatcagttttagttacacgattgtcctgcatctataaaaaaactaaaattatacataattagct

SEQ ID NO: 99543 - DNA, 185 bp, Zea Mays
tgcgcaacatttcattaaggtagaagaaaggcaggaatgccaaaaataaatacaagaacacctcacccacacccactgtacatcacgcctcccaccctggagacgctaaaacccaaacagaagagaaaaaagaaaggcggccagggaaaggaacctcaacaagctcctaatcccccagactgaac

SEQ ID NO: 99544 - DNA, 336 bp, Zea Mays
atggaggttctgtacgcccacggcctccacgtggaggttggaggcggtagcggcctcataattgaaatcttcactagcgtcggcgtcatcatcagggtcgtcgttgagaggagggaaggcagcgtcacgagcagcggccttagcacgcttgagaccggtagcagcctagcgttccctcgcgagagcgtcctgggttgtgcggccacgatcctaggcggcagtgacggccttgacagcctcatcggcagcaacgataaggatctagcaggccttctcctatgtggctgcatcctcggtatgttgttggtcaccggaaaacgggcagagggtcactag

SEQ ID NO: 99545 - DNA, 553 bp, Zea Mays
gaaacatgcatatttgcgcttaccaaaaataatatttccatcgtaattactaaataaccatataacatactaataattatgtggacaaggattacaaatatgagggtgaaggtgaggtactggatagcctcgctagagctatcaagtaaaccatataacatacttgacaaggattacaaaatatgggtgctggttaggctttttttgtgtggcatggataccaacatttttatcaacatccaacttgtacaaaaaccaaccatcgcttgtccatagtgatatccatcaaaccaaatacaccttgaacctgtagttacaggatgaaatttcatctttgaataaaccccataatcggttttttagcgctgggcctagcaaaagaaaaatcaccatatactaggccctccaatttcttaagggtttatctaaaagattcgcagtataactaggaagacctttcaaatacaccttaaaccctttaacagcatctattggtgatatatatatgcttcttgcatgccacatggaatcataatgataatcaccagtccat

SEQ ID NO: 99546 - DNA, 3913 bp, Zea Mays
gtctcactgagtcaataggtcatgggtttgaagcagcctctccgcatttgcgggtgaaggcttgcctcgatttatcccttccccagaccccactcatgtgagagcctccggcactgggtctgcgcccccctccccctacagaaaatgcaatttgtggttctaaacttaataatacttcctatgcttgcacttctatgtaagtgttcatatcttggtgcagggtaatgccttgaccttgagcaaattttcaaattatcaggttattaactcctccagaaactccgctttttcgatctttggatgatgaagaaaaccaatccatcactcaggtttctaggggcagagctcagagcaagcctgtacaaacttcaaggtcatccacgatggataatagtcaaagagctagtagaagcagtgcaagcccaagcaggcttagcccatctccacgctctatgggaaggacaagatcatctagttcagcttctcgctctagcccaccacttgctgttcaaacacaaatgccatcacaaagatcgtcagcccctccgattgctaagacattaacacctcctcgaaggtctccaagtcctgtctcaagaaggatgagtactggttcaagtcgcccaactttgaatgaaacaagaggagcttcaccagtgaaacctaatcacagatcttcacaaaagctgcatggatggcaatcaaacgttcctggtttcccttacgatgcgccttcgaaccttcgcacatctctaactgatcgtccagtatgccggtcaaggggtggatcaccttcatcttttagtggactagaaaaaggttcaagatctagaagacagtcaatgtctcctaccccacctagaagagccagttcatctcacagcattgaacgggaccgaatgagctcttacagcaaagcttctgcaacatcatctggtgaggatgatctggattctatgcagtctgtaccaattagctactccagtagcccagttgtgaaaaagagcttggttgtaatgaaaaccagaaccatggcaccatcaaagaatctgtccaaaaatttcacacctagttctgtcccaaagcggacatttgactctgcactttggttgatggatcaccgcaaagctccacaagataggttccgaccacttctatcaggtgcccctgccagcacatttggttctgggaatggaaatgatgtgcacaaacctatgttttcacacaattcctctttgacaactagcagcaatgcaagctcttatcatggtgccacttttggctcttatatgcatggcagccaagaacaacatgatttggttggtgaatgggaagcagatgatagttctcggggtcatgaggatatatttatgtttgataaattggatgagctcaataaagaagacattcattacaagagcacgggatctacggataattcactggtcatagtaaaacatctagtaagtagcagacatgacttggaaggaagcagtagacctaatcagtccttatgccattctgctgatagttctcaggttggcaatagtaaaaatgctaattgctctagatgtgggaagttttttgatgcgatggatgtggatgaagagggtgtctattgtgatgtatgtgcttcaatgattggaaatatcttaaccagtcctattgtacaacctataggagaagaaaaccagcaatttgataaaactacaaatttgaaacattgcatcgcatctgaccctcctatacccacaggttgtataggctatagcaaagaagtatctcttgatcatcaacttgtgaacagtgaatcgtacactgattgcctggaccaggtccctccaattcattcaatggggcacacacctcaggaaatgctactggggcgggaggaaaagattgacgcagagcatagaaagaaacatgttggggactcattaggaaatacaaatgatattgtcttccatcaatctaatgtgactgaatgtgaacaaatagaaccaacatctgtggggcatgaccttttcatcagagaccaaatggataaccataatcatggatcgtcccaatataatgaaactatctctgaaactgtgaccagtgacagttctcatcaaccaggatcaactacatatcaaaaccctaaacttgaaactactgagggtactgggatatcagtactattagtccctaagtcaaacagcaataaatggcctattgtagaagggagggccctggctgctacaaatatgttgtgttcagaaccctattatgcaagagatggtgtcagtatgatgaagcgtagctttggactggacagcacttcagctgcttcttccagtgatcttggatcttcaaggcaatcaatcatatgttttgagcgccttaggagtggtaagaggggtgacttcgagaagtctcagataagcagcactatgagtcgtcaaagcattgcttctgtgtcagatatgtcaatctgtagctcttcagcttcactttgccctcagattggtgctgtaggtgattcctgtttcccaattgacactttagaaagcagcacttcaagaacattgatctcttctgaagaaaatgatgctttttgtaaggatgctttgccaagtgatatggaatgtttgtctccacaggttattgctgatgatgacagtcatgttgacttgaaaattcagagctatttaagtgaggtaggagatacaacagttgagaatcatagtgctggcagaatgcctgacatggatcataccagtacaaatatgtattctttagatactgaaatgccaagtgatacccgagagtcatcaggcctagaggaaagttgcctgcctgaaactgaagaggatgcttacgccatcaatcagtgcaataaaggtagtgctcgagaacattcaagtgatgagaacaactttgatgatattcaaatgcagtctgaaatagttcagggtttagctgaggaaaacagattggacgattgttgcatgtctgccatctctgaggaggatgtgttgatttctggacgagaagccgacataagggaacttccgaatgatgaagaattttgtgcggaggtagaaggatcaaggaaacaaatccaaagatgctttacattggaagaagctgctgatacaattctcttctgtagttctattgtccacgaccttgcatacaaggctgcgactattgcattggaaaatgagaaggaatcagagtttgttgaccctattcgcccaactgttagaatagttggaggatctttctctaaggatgagagtttaccaaagctgactcacagacgaactccaaatcgtaaggtcaaaaggaaaagattggaaggtgaaacaactacaacggaaactacagagaaagatgctgttgcgaaagactcctcccctgtatgttccgcatcaggtattacaaggaattccgataatatgaaacctccaaagctggagtccaagtgcaactgtataatcatgtaagtaacttcacgtccaaggtcgaaggagttgtgatattggttgggacgaaaatccatgctttctggtttcatgtcacatgcaacttgaagcatgcctacctgcttggttaacccgctgtcagcagcaacgatggagttcaaggcagtggatcttccactagattattttgcagaggtgcatttgctgtgttttttaggtgacagaatgcactgcgagctattcttttgtaaagtcttttcttctctgttgtggaaattttctgcttgtcgtgaggtctattgcggtttgtccaaagtgtgaaagactactagagttgtgctgatagcgtatttacttgcaatgcacgtggctacttgtgaaaatgatggtcgtatactcctatgcacacggcccggatctcacttttttgattccacgat

SEQ ID NO: 99547 - DNA, 397 bp, Zea Mays
aaaaacaaaagccacttctcccccagtccaccgcctccctctctgctcctccagcgaagcgcacgcacgacgagcgcaggctgcaaggcaaccgaagctagcgagctcctttgcttctacccgcggcaactcttcaggcgctcgcgacgcatcgagcccttaaggccgaggcgagcgcgagttcgggagcggaggagagaagcgctccgcgagacgactgggacccccaccgcgctcgggtcggaagctggatctgcctcggggctcgtgcccgcggctggatatcgtggggcgcgggggccggagcggctggtggagcggactgccggcggacggagggcgccggtaatcgaaggcggcggtggaatgcgggtgggtagcatgtttttcattttaa

SEQ ID NO: 99548 - DNA, 1433 bp, Zea Mays
cgggtcgtcggcgtcctggtggtggtcgtatcttatctctctcactgccatagtgccatcgtgcgagcggcgagaaagtagaaggaagtgtgtcgtactcgtactcataccgggttggttggtttttgagacgtgtgcggtcgggagaggggatggagagaaagggagggtgctgcctcgcgccgaggtacgccgccaccgcggccgcgcagcaggcaggcgcggcctggcagatggggaggatcatgctcaagttccgcccgattgcgcctaagccggcggccatggcgcccgcgccggcaccggcatcggcaccggtgaccggatcagccgccggtgccgggagagggaagcgaaaggccgcgtgcggaggcggcgggaggaggggccggaagcccaagaaggcggccaaagttgcgatggtgactgcagcgcctgcggcgacggcggcggcgcaagatgtgggcgactgccgggagcactgcgacaaggagaagtcgtcttcgtcgccgtcctcgtcctcgtcggggacgtcatccgtggactcgtcgccgccaccccggccgcagcagcgccagctcgcaacgctgccgctcatgcccgtgacggcggcggaggataaggccgctgcttgtcctgcgacagtggggccggagctcgtgccgtctcaggtggctacggcggcacggccgttggctccgcgcgcgatgcgccccgctgctgctgcagcttacttggtgacggtggaagaggtgaccgcgacgtggcgcgacggcgaggcgccggcctccgcgacgggccacgacgaggccccggcgttcgtgtcggaccagtggggccgcgtcacgttgtggaacgccgcgtttgtccgcgctgcatccgcggacgacggcgacgaggcggcggcgcccgtggtgctcggcggtgccctcccggcgtggggcacctgcgcgggattcacgtgccgcgtccgcgcccggcactggagcgcccggcgcgtcggttcccccgtggtggcgccctgcgatgtgtggcgtctggacgccgccggcagctacctttggcggctggacctgcaggccgcgctcactctcggcggctgcctgtgaaccgtacaccactgtcaagagcaagcaacgaatatgctgtgctactcctctacgtgcggagacgtgttgtattttattctatgagcgttatttactgacgtaaggtatggtttaatcgacggattgctatcctggtcgggcttaattaaggacgttgaagcctggtaaggtatactaacttagcgtccttcggaatgggagtgagttgggaggacttgaaaatgtaagaagaagaaaacaaagcatgtgatggatgcttctggatgtgcaagctcagtcttcattcttcagcagcgcggaaattggctctaataacattggttt

SEQ ID NO: 99549 - DNA, 2210 bp, Zea Mays
acaggtctcgctagggttcttcggtcctccacccacctttgcccgcgaaatgtttcccgccatttcgtgtccgcatttcccgctacccgcctcgctctgctccccagatccctcgccccctcttccctctccgctcccccacgtcatctagtcgccgcccccgctcaccgattgtcctccgctgtggagcgagcaagcagcggcgaagcgatggaggaggagatccgaaaggagttccagagtaacggcttctccatcggaggagccggccccgaggacgccgcccagatcctctccacgctgctgacctactgcatcaactacaagatgagccccgcggatctcgtctcaaactgggaggtctactacctcaataggctcttaagcaattcacatgtagatgaagcagcattccatgacacaccaggctatgaacaggaaaaggcacctgaaggatcatctatctctgagttaactcctctgtatgttctcaatgctgataacgcagttggtgtgccaagtaaaagtgctgaaatcacagaagatgaaataattagaagagttcaacctagtcaaagatgttacttacaagttcagcgctcacagcctgaaccaggttgcagattcatgtatgacagaatggaagacagatttaattacttggaagatcggatacggaaatcggcgagcttgttttctgcatctggattttgtggacaacctgcagatgctacccttgcttcagaggagaaaatgtttgcagtcggtacagtagcctgtgacggggaaggtcatttgaatgaaaagtctatcttgctacagggcagtgttgaacactccagggggcagtgtgtgcgccttgacttgaaggatcttgatcacttctctttgtttcctgggcaggtggtgggtattgaaggccacaatcccagtggacactgttttgttgcatcaaaattatttgattccataccggtctctgtggatgctcaacttcccagtgctaagaaacaagctattgataatgaaagcaaccaaaattctgacgctggcactctgtcaagagcattgtcatcgatcatcgcagcaggtccctatacaacaaccgataatatgttgtttgagccacttcaagaacttctttcatatgcttgtcgaaagccgcctcagcttctcatattgatgggacccttcattgactctgatcatcctgacataaaaaagggaactattgaccagagctttcatgacatttttcattttgaagttctgagaaagattcaagactttacccagtatctggggaacaccgttcgtgtaattctcattccatctgtgcgagatgctcaccatgactttgttttccctcagcctgcatttgatttgaatttgctagaagataccacccatcagattacttctctggcaaatccatgtctcttcggttccaacgagataaattttggctgttgtacagtggacattctgaaacagctcagtggccaagaaatttctcgcaagccacctggcggaaagcctggagacaggattggtagacttgcctcacacatactaaagcagcaaagttactaccctctatatcctcctgcccccggtgtgccgttagacttgtcactcgctaaggaagcgctggagatcccatcagcgccagatgttctcctccttccttctgatctcgcaccatttgtgaaggtgctctcccttggagaaggtagcgacgacgacagacggtttatctgtgtgaaccctgggaggttggcgaagggtattggcgggggcacatttgtggagctttactacaacgagggcatcgacaagaccaatgcctccatcatccgcatataggatcgctgaaactagggtgcgccgcagaaaatcacgtacgtagtttttgagctcggaaaatccatctcagcgtttgttatcccaggaagtgttgcttaacatgtggcatctccgctgcaaccgagtacctggactgaaatgttcatgttatcgtcaactaacaactgacctggtttacttcaggccctactgtataattacaggaattggttggtccatctttgctgttttccacagcattcttatggtaaaattattactgggagtttgttgtccagattaagctgtaatgcgccatacaacttccccgaatactggaatatgaagtgattgatgaacctaaa

SEQ ID NO: 99550 - DNA, 2435 bp, Zea Mays
acaggtctcgctagggttcttcggtcctccacccacctttgcccgcgaaatgtttcccgccatttcgtgtccgcatttcccgctacccgcctcgctctgctccccagatccctcgccccctcttccctctccgctcccccacgtcatctagtcgccgcccccgctcaccgattgtcctccgctgtggagcgagcaagcagcggcgaagcgatggaggaggagatccgaaaggagttccagagtaacggcttctccatcggaggagccggccccgaggacgccgcccagatcctctccacgctgctgacctactgcatcaactacaagatgagccccgcggatctcgtctcaaactgggaggtctactacctcaataggcaattggatggcttaaagctcgaaagctcgtatcttgatggttttctgtcacaccttcaaaatgaagttaaagacaggataataaaagaagaagccaaccttcacatttactccagtaacgatgttgacatgctcttaagcaattcacatgtagatgaagcagcattccatgacacaccaggctatgaacaggaaaaggcacctgaaggatcatctatctctgagttaactcctctggcaagtgacagaccatcatccagcagagtggccaaaacaaatgctgatcgtattaccccttttgcaacacgagtaaataaatttacccaacagtatgttctcaatgctgataacgcagttggtgtgccaagtaaaagtgctgaaatcacagaagatgaaataattagaagagttcaacctagtcaaagatgttacttacaagttcagcgctcacagcctgaaccaggttgcagattcatgtatgacagaatggaagacagatttaattacttggaagatcggatacggaaatcggcgagcttgttttctgcatctggattttgtggacaacctgcagatgctacccttgcttcagaggagaaaatgtttgcagtcggtacagtagcctgtgacggggaaggtcatttgaatgaaaagtctatcttgctacagggcagtgttgaacactccagggggcagtgtgtgcgccttgacttgaaggatcttgatcacttctctttgtttcctgggcaggtggtgggtattgaaggccacaatcccagtggacactgttttgttgcatcaaaattatttgattccataccggtctctgtggatgctcaacttcccagtgctaagaaacaagctattgataatgaaagcaaccaaaattctgacgctggcactctgtcaagagcattgtcatcgatcatcgcagcaggtccctatacaacaaccgataatatgttgtttgagccacttcaagaacttctttcatatgcttgtcgaaagccgcctcagcttctcatattgatgggacccttcattgactctgatcatcctgacataaaaaagggaactattgaccagagctttcatgacatttttcattttgaagttctgagaaagattcaagactttacccagtatctggggaacaccgttcgtgtaattctcattccatctgtgcgagatgctcaccatgactttgttttccctcagcctgcatttgatttgaatttgctagaagataccacccatcagattacttctctggcaaatccatgtctcttcggttccaacgagataaattttggctgttgtacagtggacattctgaaacagctcagtggccaagaaatttctcgcaagccacctggcggaaagcctggagacaggattggtagacttgcctcacacatactaaagcagcaaagttactaccctctatatcctcctgcccccggtgtgccgttagacttgtcactcgctaaggaagcgctggagatcccatcagcgccagatgttctcctccttccttctgatctcgcaccatttgtgaaggtgctctcccttggagaaggtagcgacgacgacagacggtttatctgtgtgaaccctgggaggttggcgaagggtattggcgggggcacatttgtggagctttactacaacgagggcatcgacaagaccaatgcctccatcatccgcatataggatcgctgaaactagggtgcgccgcagaaaatcacgtacgtagtttttgagctcggaaaatccatctcagcgtttgttatcccaggaagtgttgcttaacatgtggcatctccgctgcaaccgagtacctggactgaaatgttcatgttatcgtcaactaacaactgacctggtttacttcaggccctactgtataattacaggaattggttggtccatctttgctgttttccacagcattcttatggtaaaattattactgggagtttgttgtccagattaagctgtaatgcgccatacaacttccccgaatactggaatatgaagtgattgatgaacctaaa

SEQ ID NO: 99551 - DNA, 1620 bp, Zea Mays
tcaattcaacacctttattgcaacaattcaattaatcagctacaaattgaataaaaaaccttatgcgctcctttcgactttatatagcattcagctaattgttgagtcaatcacaggagaagttcgcgaaaaactatctctatcaactccatgctagatagcctatagtaacaatcccaacacaaaaaaggaacaatttgttcactccttaacgccaaccttgctcaacacatggccatgcatcaatcacccctcaattgctatctgtgaagtctgcgtcaatgacatccccatcattctgcgttggtccggtaccaggcgtaggtccggcctcagcaccaggagtaggcccagcagcactggcaccaggctggttatacattgcctggccaatctgcatcacctcctggttcagagcagccatggcatctttcatactctgtgttgatccaccagaaatggcgtctttgagctcctggagcttcacatccaccttctctttcacaggagcggggactttgtcgccaagctccttcagttgcttctcagtctggtagaccactgagtccgcctggtttttggtgtcgattgcatctctcttctctttgtcctccttggcaaacttatcggcttcttctaccattctctcaacctgcaaaaggaggtagcgtactagcaccagtgatggtgatgtcctgtttctttccagtgcccttatcaatggcagcaactgagaggataccatttgcatcaatatcaaacttcacttcaatttgtgggacaccacgaggtgcaggagggattccgtccaaccggaagcttccaagggacttgttgtccctaacaaactctctttctccctggagaacattaatctcaacgctcgtctgtccatctgcagctgttgagaatacctccgattttgaggttggcagtgtggtattcctggggataatctttgtcatcactccacccaatgtctccaaaccaagagataatggagtaacatccagaagaacgacatctttcacatctcctgccaaaaccccgccctggtgttgcaatggaagcagaatacgccaaatgtggcatattggatgagtcaaaatgatgctttacatcataatgatgtgttatgcaattcaatacaaaagcaactttactattattctctgcaaaaataaaccacatttgaggataaagaaaatcacctgcacagctgccccaagagaaacaacctcatcagggttgaccgtaacattgggatccttgtcagtaagcttcctcacaagttcttgaactgcagggattcgggtggatccacccacaagaataacttcatccagatcactgagagacaacttggcatctctcagtgcattattaacaggagttttaagcctgtcaccagaatgaaagtcagcaaagcctttgaaaaatctctcatacatagatcatatggaattatagagagacaattttcaaaaagcagtgagcacagaaatactgatagaatggtacctgtctataaggtctgaacatagttcctcgaatttggctctcgagagggttgcctcgatgtgttttggcccatcagcagtagcagtaatgaatggtagg

SEQ ID NO: 99552 - DNA, 1187 bp, Zea Mays
gaaacaaagaaacaaacagaagcctcgccgctgttttacccgtgtcttcccctcgactgttcgatttcgttcgtttgcgatcgaggatacgggcacgcgcgcatggcgatggcagcagccaccggcacggtggtgctggtagacgcggccctggccccgtacgagcaccctgacctccggtggcttgtgcggaagcatgtcctcgccgtactccaggacttccccacgctgtcgccgtccgtcgacacctacaccagcgacagcggcgcgtccgccgtgctgctcaacgcgcggggcctcctcaccgtctcccccgccctgccaccggtccttctcaccctatggcttcccctggagtacccgtacctgccgccgctcgtctacgtcttccccgccgcgccgccggcttcgctcgcccgcgaccaccccttcgtggaccaccgcaccgggcgcgtccgccaaaccctgccctaccttgaggactgggccgtgccgcgctccagcgtcgccggactcgtgcggagcctcgttggtgccctgaggatgtgccacccgctgacgtcgcgcttcggctccgtcgtccacgccacggccacggccagagcgacgacgacgacgacgccgacgccggaggaggaggagcaggagcgcatgcacgcggcgctgctcgacgagctcgtctccaggctgggcagggacgcggccgccttccgcggccacgtggacgaggacatacatgccttgtcctccagccaaggcaacctccgagcgcgggccgacgccatggaccgcgccgtccgcgacctcgaaggcgagaggatgcggctggagcgcgccgtgacggccagccttagtcaccgcggcgagctgctgtcctggctgcacaagacgagctgcgcgcccgacgacgccggagcagcactactcctggcaccgcacggggcggcgggcggcgacgcgccaaggtggcttgagagcaaggcgtcggagctcgccatggacgacaccgtcgacgcccttggccgcgccctcgaggacggcgagcgcgtcatcggcttccacgagtacatcaagcgtgtcaaggtgcttgctcgggagcagtttttccattgctacgcagcatccacctcgatgagcaaggtcacaaaatattaattttttctttggtgcaaacacaaaatattaaa

SEQ ID NO: 99553 - DNA, 613 bp, Zea Mays
gatcatcccaggatcgttcaccatctcataagctaataagctagttcttgaaccatcgtactagcaaacaaaagatggttcagcggccggctgcagccggcgatcgggcaggcgaagggtggagccgggtggcggaccagccggccgcggcgggaggcagcagcggggggcggtggcgggatcgtcgccatcatcatcagcagcagcaggagctggtgctgcgtcggctgctgccgatcaacaaggccaaggcgtgccggttcaagcgcagctgcttcagcgaggaggacgacgccgcctcctccgccatgcttctgctcgcctgcgtcgtctgcgccccctccctttgatggtgataaaaatactttttatttactttggccgcctgcttgtaactaatcaacatgtggatcaccatgtgatgccatgcctcatgcatgtcagtctgtcgcatcggaaacgttcgctatgtaatggggtactggtcgttgattcgtctctctgaatgagtgtttggcagcaatttctttcttccgatccgcttcagtggtgccagaattgtcaataggatcgcgagacagagacgcgggaaatttcgcaaacaaaaaaaaaa

SEQ ID NO: 99554 - DNA, 1488 bp, Zea Mays
gcatcgaacacactgtggttagttctagcctcccagccacccacgcttctctcgtccctcccctttgtcggtgtcttccccctctctcttctcttctctacaaatctctcttccgcatccgccgcaaaaccctaacctaagcggctcaaccctacgattaccgccgccgccgccccccgctcgcccacgcaagcttgggcgggcctccctcagctcggccaagagcccgaccccctgctccggcaccagcgccgccaccgccatggatatggaagtgtacgagcgcctcaccgccgaaaccagtcactaccgtggcacgcgtttcgatgcgctgatcgggctcgacgaggtggagcctagtgacgaggaagaggatgaggaggaagaagagcgagcggcgggtgccggggctggagacgagctgctctgcccgttctgcagcgaggagctggacgcggtggggctgtggtgccatatggacgacgagcaccgtgctgaggtcaatgccggggtgtgtccaatttgcacagataaggttgatatgaacttgattgtccacatcagctcacagcatcgaggtttcttgaaggataagtggagaaatcagcaaggttcatctggggtgcgttattcaacacttgccttattgaagaaagatctacatgagaggataagtggatcatctcgtgctgccccagtcagcacggtgcctgatcctctactgtcctcttttgttggtagcttttatgaagtcgatttgccaaaggatgctaaaaaagagtccttggttgagacagaagtgagaagtgataacatagagcagagagcagcggagagctttgatgagcctttgctccctgaggtgaaggaggagaaaaccaggaggagccaatttgtgcaggggcttgtcttgtccctgatgtttgatgacatcttatgaagagcacatcccaaaaggggaagggagaaggcatattttgctaccagcaaacgtttcgccggcacagctgttgtaacgattcgctgatttgccatcggaagatggtgacattgctctgggataatgggggagatgaactgtggatatggatgtttcgtagtactatgcatcatcattgcatgaataatagagtatatgtatgtatagtttgttagcatcatggtactggatattctggggctctgtatgtatattgggaggccgaaatggaccctacctatcataaatcagccatttgataatgtgcatgtggtgtttttctggaagcctgggatgtgcgtaggtaacaccagacacatctgcctgtggttgtcgtaccgacttttcaacaaatcctttatttcaaaaataaaatggcatggtttggttaaatttggacgaaaggattcacgttttttttgttcaaaaataaaacggcatggtttactttttttagtggtgtgatgtatcggcgttcggttcccatcatcgacaagtgtgaagagtaa

SEQ ID NO: 99555 - DNA, 237 bp, Zea Mays
atggagctgcagctgcgcaggggagggggaagagctcggacgccgccacgggggccggggccgcgccgccgtgccacgccacgcgcgcagggggcgccgggacgtgcgcgcaggggggccacgccgctgccgcgggctgccgtgccccaagcagctcggccgccacggccggtcgtcgtcgccgcgccacggcaggggcagggtgggcgcgcacaggggcagggcgggcacgcgtag

SEQ ID NO: 99556 - DNA, 1176 bp, Zea Mays
cttggcacaccccaaacatagcagctgggcacataaaagctaagcttactgggtactggccagtctttctatgaattttatttttcttcagcacctgtactattctgtacctctccgaacgaattctctgaaattttctcgcggtcaaaccacgtgatctcgtggtccaagatttccacgtcaccaagctccggtccaaccgcgcagccacatctatataataagtagttcttgatcgtgttcgtgcagtgagcacaaacataacagtcttacagtacgtagcagcagcctagcacgacgatggtgtccggcagcatcagcgaggagatcgccgtggccgtcccggcggagcgcatgtggaaggtggccttcgccgagaccaagtcggcgctcctgcccaaggcctgcgccggctacgtggacgccgtcgaggtcgacggcgacggcgggcccggcagcgtcaccaccatgaagcttaacccatcgctgggtgagaacaagacgctcaagagccgcgtggtggcgttggacgccgcggcgcgcgtggtgaggacggaggtgctgcagggcggcacggtgagcgcgcagctcaggacgcacttcgccgagatcagggtggaggccgccggcgagggcgcctgcgtcgccaaggtcaaggttgactacgagcgcctcgacggcgcgccgctcgcgcccgaggacgaggccaggctcgcgcaggggtacgtccgcctcgtcaggatggtggaggcatacctcgtcgcgcaccccgacgagttcgcctgagccgccacctttcctacgtacgtgtatgatcatgccatatggccgtgagtgttttggtttggaataacgggaggaaaggctcctctgtttggttgcttcaattcgcttcgaatcgagtatagaccgacgtttgtgagttggtgtatccgtgctgctacaagtgtgtctacatctatggtctatttatctacatgttcttttgtttgtttgcttcgctgtgcactgtgaggtcgcgtatagacgtattggttgtgttgcaaagaatttgttagatattaagatcgataataatgtatgtatttattcgtttttatgtaattgttgtgttttaaaattttatcgaatatttatatgtagtcgcaatgcttgtgtattgtattggtttgtgtt

SEQ ID NO: 99557 - DNA, 2192 bp, Zea Mays
tcacttgtcaccaaatcaaccataaagtattgattaattcctctccatctttttatctctatgtctcatttacattgtatttcaagaagtcatacggagcgaacgttactatagcacacggaggacctttcgagagccacgctgtaaacctatgcacacaaaaaagaagaaaaaaataccacccttgctcttaagcttcgcgtcagccaccctccgctattcgttctatctccttctccactgggccaactccgctctactctccaatcccaggcgaatccctcgtcttcttcgaccgcgtgtcggagcttcatcttctctggtccgcctgccctgatttgccgctccgctctcccccccttccgccggaaaggggggaaattgatggcgaggctagtggctctggcatcgatggtggcagttctggtactcggcctcgcctgtgcagaggcggagccacagtgcacgcggcgccgcccgcccgcgccgccgcggccgcacagcgtgacgatcaccgagttcggggccgttggtgacggcgtcaccctcaacaccgtgtccttccagaacgccgtcttctacctgcgctccttcgccgacaagggcggcgcgcagctgtacattcccaggggccggtggctcaccggcagtttcaatctcaccagccaccttaccctcttcctggagagtggcgctgtcatcgttggcacgcaggacgtttcacagtggcctgttgtcgaacctttgccatcatatggacgaggaatggaccttccaggttcgaggcatcgaagcttaataaacgggcagaatctagttgatgttgtaattacgggaaacaatggaacaatcgatggccagggttctacatggtggaactggtttcgttcgaataagttgaactatagtcgccctcatcttgtggagtttgtggactctgagcaaatcgtcatttcgaacataacatttttaaattcccctgcttggagtatacatccagtgtattgcagcaatgtagtggtccatagtgtcacaattcagacttcattggatgctccacttaatcatggaatcgttccagattcatgctcaaatatgtgcatcgaggacagcagtatcagtgttagccacgacgccatatcactaaaaagcgggtgggacaagcaaggcattgctttcgggaggccaacctcagacatccacataagcagactggatctgcagtcctcactgggcgccgctctcgcgttcgggagcgagatgtcgggcgggatctcggacatccatgcggaccgcctcctcatccactcttcgtccagaggcgtcttcttcaagaccgcgccgggacgcggaggctatatcagagacaccgtgatctcagacgtccagatggaagacgtcgacgtcgccatcgcattcaccggtgactggccaagccacccagatgaccagttcgacccggccgcgctcccggtggtcagccacatcaccctgaagaacatgactggaacaagaatctcggtcgctggcgttttgtcaggaatcgccggcgacccgttcaccgacatctgcctctccaacatcaacttctcactggccgattcggccagtcccacctcccactggtcttgctccaacgtctccggatactccgagctggtcttccccgagccttgcctggatctgcagacccaatcctcagacgcttccgtctgctccaccctccctagcttccacgccgccgccattgcagcagcgtaaatgcacagagagtacaaagtgtccatcctttttcctgttcccggtcccctgtacacttcagaggatctctcaagccgccttttcctcccccgacaattctttgaagctataggcgcgcccctgtcgttgaagaaaagaatcgttcaccgtttttctccggccgtcggcttcgagggctcagctgcatcgcctttcttgcgggaggcaagcctggcggcggacggtcgacatcgagctgttaatttgcttgtacagttatgatttcttcattcaatctgtaagaaggaatttttgtggtagtagagggttgagtcgagtccagagagttgcttcatacgattgtcgatttggtgaataaaacacatgatgaattcatgatccagtggctctgtatacatcctgtcatccttgtgggtacatccatccatgat

SEQ ID NO: 99558 - DNA, 237 bp, Zea Mays
atgccaggatccgaggacaacaccagcgagatcgcatcagcagcagtgaccacaaacccaaatgtcgccctagaacaaaagctggacaccatgacgaaggtgttcgctgatctcaccaccaaggtgtcaggcttgtcgctgcatgtgttcgacattgacaaccgcacgaccaatattgtggcgctaatctctacccctccttacaaccttccaggctatggtgcatccctgacttga

SEQ ID NO: 99559 - DNA, 1568 bp, Zea Mays
catgggaaagatggtagagttgaatcaacaactaatggtgtcttcaatactctgagtgggtttgaagcggcagacagacaaaatagttggcaatattttaagatgctcctctctgataaggagtcgcttttggatgatcttgagggagaaaattctgatcaaagtgattcagaccatgtcacactagcgataagtattgaggacacaggtgttgggataccattgcaagcacaagatcgtgtttttacaccatttatgcaggctgatagttcaacttcaaggaattatggtggtactggcattggtttaagcatcagcaagtgtctagctgaacttatgggtgggcagataagttttgtcagccgtccttttgttggaagcacattcactttctccgccacactgaagcgctcatacaaagatacttcagttgattcaagtaggagcttgtcagaggcacgcactaccaactgcttttaagggaatgaaggccatcttgatagatgggagacctgtacgtagtgctgttacaagatatcacctcaagaggttgggaataattgttcaagttgtgaacaatctgagtgcagtagcaaaagctttccctggacaaaatggagcaactgtttctagggaaaaggcaaccattctttttattgagagtgacttctggaggcctgagacagatgttcagttactgaaccatctacgcgagaacaagaaccgtcagttgtctgatgggtagaaggtagttcttttggtcacctccgaagacaaggacaagtatggatccatatttgatattgtgatgtgtaagcctataagggcaagcacaattgcttcgtcgattcaaccactgctcagagtagtgatgcccgagagaagagataatcagaatcggccatcgtttcttcgcagcttgctggttgggaagaatatactggtcgtagatgataataaagtcaatctcagagttgctgcagctgcgctcaagaagtacggtgctaatgtagttgtgttgaaagtggcaaggatgctatcagtctacttcaaccctcacattgatttgatgcatgtttaatggatgttcagatgccagagatggatgggtttgacgcaaccagacaaataaggcaaatggagatgagagctaacgaggaaaggaagaacaagttggctttgactgaaggctcgacgtttatcatttacatgttcttgcaatgacaaccgatgttatccgggcaacttatgaggagtgtataaaatctggaatggatggatacgtgtctaaacccttcgacgaggagcagctataccaagcagtctccaaattagtagtgggaatgacggattcagttgtttaatgtccaagttgatatggatctgacttcccattcaccgaagtcaagcaccaccatgttgcttctgtccaaactgactctaactcttgacaatggtctgacatggcctctcgtagcactggatgaaaaagatgaaagtggcatgaactagctatgcatcagtatcacagatgaagttgttgcatcaagcccaaatgtagataggtg

SEQ ID NO: 99560 - DNA, 767 bp, Zea Mays
cccaccactccgagttcagtgtagacacaatcatccagtgtattatatggcatgaaagatgaaatggttgtttcctctaatgccgtcccatctgttgcagtacggccccgacgagatgcagggagccggtcacgcagatgaggcctggagccgtgcctctgctctccaggagctgggaggcagcaacgatcaggttcgaggagaacggcgccacgtcttggcacccgatcaccatgggctttcttccggaattcgacgatggactgcagtccaagagatcactaatgtgctctggggtttcagcaccactgacgccaccgatgtccacgtactcgatgccacgatcgcgtgccgcggctatccatacttctttcagggacgaggctggcattgcgcgggaggttcctccggcgacgctcgcctctgtcagcagcacaacgtcaggcgtttgacctgcaagaagctgctcggcaaacgcaagatgctccttgtcactagccattccgacaacaagcgctagaggcccttctggtctgacagtttttatcacgcctgataaagcctttgcagattcctcagtatgttaacctccatcaattagtacagtggatgcgctatcgaacccaagtgccgaggcttcctctgctgtgagaaactggctcctaccaggaagagtattgttaccttgactacagagacagagagctgcgcaagcagctgtgacagcattctgacgttgatgatctcccagcagctggaggtttatg

SEQ ID NO: 99561 - DNA, 851 bp, Zea Mays
gatcctgttgagcttgttgaagcgctcttgcaaccaaggaccagcctcctgccaatttcagtgagagctgtctacatccatgcagtatttaaagtgattacatggtgtttcagtgcatatattgggagattgggtgattcagacttggcaatggatgtcatgtttgacaggttagctgctgatgaaactgtcaatttggaaagcaatgctgcacttgggtctggtgatgagcaagatattggggccagcacagtgcaaaaggaccctttttcgcatgaatctatactttacatgattaacctgattcaaactacagttggtccactcattaactgcaatgaagtagaagtccaggagagagcacacaacctgattggttttgtccatttagtaagagagattcaagggttgaacaaaaggaaggttgctgatggtgacaagtctagcaggttaaaagagcttgttaagactatgcgggcagtattctgtcaagaattaggccctgtttatgtgaatgcacagatgaaagtgtcccctccagatggccttatcctgaatgaaaatcttgttgaacttgctggcatggtgagtgaagatgatactactccctcaacttcaatctttttctatcctcgcagtcgtcattctgtagataccagagatgagcctgcagtgtcaattggtttgtcttctctttctgagcatcgcaagaggcatgggctcttttatctccaaacagggaaagctgaggacgagccaaatgattaccctcaagctaacgattctctaccatcttctagcaataattctgctaatgatgacaagtggaagactgctgaacgtgtatttgc

SEQ ID NO: 99562 - DNA, 452 bp, Zea Mays
gtcaccatgatccaaccaaactgctctccaaccatgctttaagaaatcggaaaactcgtgcgacagccatttcagtggcagaagaagccatggggcagaagccgtcgtacctcctgctgctcgtcggcctcctcgccatcgccatgctctgcgctggcccgggtcacgcgctgcgccaactgaacgacgccaacggcggtggcctggagttatccttgggctctaaggcagccacggcgggggccaagaccgagccgctggacccgtccctgagcgacgactacgaggtttgtgcggttatgggttatggggatggctgtttcgtggctggtgggggcaggatggctatggcgttgcggtggggctgcgcgctgctgtctggggcaggttgtggttcgtgcaggcgggcacgcgggtgggtggcgggggcactgtggacgcttatgttttag

SEQ ID NO: 99563 - DNA, 537 bp, Zea Mays
atccggtaaatctagccgccgggtggacgctctcctcatccttcctcttcgtgatggttgtccctctacgagcatgattttttctattagccgagtccatttttttggtcttttctgtttttctggctatttgtttggttttctgatggatcgattgctctccgatgatgattaaaaattactttcgttcttctgaagttagcaatgtggaagaacaatttggagacctgaactgaggggagtttttctcggtctattcctggttttcttgtatatttatttgtctttcttgctggtttatccggttgaatcagcgctcttcggaaatccctgtgaagacctgtgatgttaaagtagtggactgatttacatctttgatgagcagtattattatcacgcagagggatctgagtctgatttattcttcttcagttttttttaatttttatgattcctgttattttttttcttttttgtgtcatcacccgatgaatgtacatgatttaagtttcagccttgtctgaataacaatcaata

SEQ ID NO: 99564 - DNA, 1244 bp, Zea Mays
agcgctcgtggaaaggagacgtctctgaaccgaggctgcgactgcgagggcatcagggcagcgaggcctcttgtcgcgtgaatcccctcgagagccgccggcggagccatggcgcggtccccagctgcctcctcctcctcctacacggatagcacgggatcctcctccgactcaggctccagctcatcgggaatcgaccgccgccgccgccgccaccgccatcggagcagccgccgcaaggagggcacgtcctcgtccgcgctgaaggcgcgcaaggaccggaggtcccgccacaagcgccgccgccacgagcgggagcggcggcggtccgcgtccgacgacgacagctacagcagcacaagctcttatgacagtgaccgtgaggtgtctggcagatctcggaaacataagaagagcagcagatcaagaaagtttagggagagggagcggagcaaagatagacatcatagacgagacaagagtaaacacaaagaggtaaatttcctatttattcagaaactactaaacttttatgatggcttaacttaacatgtcagtggtagaagtacattttatctatacttccacacaagaggtccttatatttcttttgtgcctgtttctgggttggctctttgacattggagctgggattggtgaacgggtgacaacatggtggattggcctgctgcttgttctgttggtgggttggttgtgttctattataaatgggggagctttatacagaagaaagagagtgagcatgctgatggccctgtccagctttccaagtttcttggacgggacaaagaaaaggaagaaggtactcaacggagtgcaatctctggtaaaaagataatgatgaagcttgagaagacaaaggaagacaaggcagcagagagcaagcgaaacgaactgttgaagtttctgaatgccagttacgattgatgtgttcgaatcgctggcgcagaaagtgcagaatgcccttttttatcgtctttgcactggtgcttttggtgatacttaagttataaacgttttgtttcttgtctataacttggccaccaaagttttgttatgcttaactagtgactgagtgaaggtctacatgtaattgatttgaattctgtgttgccagtcatggatttgcagcttttaaacccatcctttttgtgattgctccttgtctttgtcaatgtcaaactgtttcactggcgattcattgttcttggcggcttactgcc

SEQ ID NO: 99565 - DNA, 996 bp, Zea Mays
atttagcgctcgtggaaaggagacgtctctgaaccgaggctgcgactgcgagggcatcagggcagcgaggcctcttgtcgcgtgaatcccctcgagagccgccggcggagccatggcgcggtccccagctgcctcctcctcctcctacacggatagcacgggatcctcctccgactcaggctccagctcatcgggaatcgaccgccgccgccgccgccaccgccatcggagcagccgccgcaaggagggcacgtcctcgtccgcgctgaaggcgcgcaaggaccggaggtcccgccacaagcgccgccgccacgagcgggagcggcggcggtccgcgtccgacgacgacagctacagcagcacaagctcttatgacagtgaccgtgaggtgtctggcagatctcggaaacataagaagagcagcagatcaagaaagtttagggagagggagcggagcaaagatagacatcatagacgagacaagagtaaacacaaagagaagaaagagagtgagcatgctgatggccctgtccagctttccaagtttcttggacgggacaaagaaaaggaagaaggtactcaacggagtgcaatctctggtaaaaagataatgatgaagcttgagaagacaaaggaagacaaggcagcagagagcaagcgaaacgaactgttgaagtttctgaatgccagttacgattgatgtgttcgaatcgctggcgcagaaagtgcagaatgcccttttttatcgtctttgcactggtgcttttggtgatacttaagttataaacgttttgtttcttgtctataacttggccaccaaagttttgttatgcttaactagtgactgagtgaaggtctacatgtaattgatttgaattctgtgttgccagtcatggatttgcagcttttaaacccatcctttttgtgattgctccttgtctttgtcaatgtcaaactgtttcactggcgattcattgttcttggcggcttactgcc

SEQ ID NO: 99566 - DNA, 1096 bp, Zea Mays
atttagcgctcgtggaaaggagacgtctctgaaccgaggctgcgactgcgagggcatcagggcagcgaggcctcttgtcgcgtgaatcccctcgagagccgccggcggagccatggcgcggtccccagctgcctcctcctcctcctacacggatagcacgggatcctcctccgactcaggctccagctcatcgggaatcgaccgccgccgccgccgccaccgccatcggagcagccgccgcaaggagggcacgtcctcgtccgcgctgaaggcgcgcaaggaccggaggtcccgccacaagcgccgccgccacgagcgggagcggcggcggtccgcgtccgacgacgacagctacagcagcacaagctcttatgacagtgaccgtgaggtgtctggcagatctcggaaacataagaagagcagcagatcaagaaagtttagggagagggagcggagcaaagatagacatcatagacgagacaagagtaaacacaaagagctgggattggtgaacgggtgacaacatggtggattggcctgctgcttgttctgttggtgggttggttgtgttctattataaatgggggagctttatacagaagaaagagagtgagcatgctgatggccctgtccagctttccaagtttcttggacgggacaaagaaaaggaagaaggtactcaacggagtgcaatctctggtaaaaagataatgatgaagcttgagaagacaaaggaagacaaggcagcagagagcaagcgaaacgaactgttgaagtttctgaatgccagttacgattgatgtgttcgaatcgctggcgcagaaagtgcagaatgcccttttttatcgtctttgcactggtgcttttggtgatacttaagttataaacgttttgtttcttgtctataacttggccaccaaagttttgttatgcttaactagtgactgagtgaaggtctacatgtaattgatttgaattctgtgttgccagtcatggatttgcagcttttaaacccatcctttttgtgattgctccttgtctttgtcaatgtcaaactgtttcactggcgattcattgttcttggcggcttactgcc

SEQ ID NO: 99567 - DNA, 1005 bp, Zea Mays
agcgctcgtggaaaggagacgtctctgaaccgaggctgcgactgcgagggcatcagggcagcgaggcctcttgtcgcgtgaatcccctcgagagccgccggcggagccatggcgcggtccccagctgcctcctcctcctcctacacggatagcacgggatcctcctccgactcaggctccagctcatcgggaatcgaccgccgccgccgccgccaccgccatcggagcagccgccgcaaggagggcacgtcctcgtccgcgctgaaggcgcgcaaggaccggaggtcccgccacaagcgccgccgccacgagcgggagcggcggcggtccgcgtccgacgacgacagctacagcacaagctcttatgacagtgaccgtgaggtgtctggcagatctcggaaacataagaagagcagcagatcaagaaagtttagggagagggagcggagcaaagatagacatcatagacgagacaagagtaaacacaaagagctgggattggtgaacgggtgacaacatggtggattggcctgctgcttgttctgttggtgggttggttgtgttctattataaatgggggagctttatacagaagaaagagagtgagcatgctgatggccctgtccagctttccaagtttcttggacgggacaaagaaaaggaagaaggtactcaacggagtgcaatctctggtaaaaagataatgatgaagcttgagaagacaaaggaagacaaggcagcagagagcaagcgaaacgaactgttgaagtttctgaatgccagttacgattgatgtgttcgaatcgctggcgcagaaagtgcagaatgcccttttttatcgtctttgcactggtgcttttggtgatacttaagttataaacgttttgtttcttgtctataacttggccaccaaagttttgttatgcttaactagtgactgagtgaaggtctacatgtaattgatttgaattctgtgttgccagtcatggatttgcagcttttaaa

SEQ ID NO: 99568 - DNA, 2763 bp, Zea Mays
acgccacgcctccacctccacacctgcacgcctctcgctctctctcctcacctgtcgagctgcccacagcccgtacgtacctgcccccagtcccagtccccgccgccccgcctgcccgacccgcggcttatccaccacgtccgccgctgggctggatcgatcgggaccggtatcgcgccgccgccgctgccctcggcactcgcgggatcctgttcctaccatgcagcagcgctgcgcccttgcccgaccgcgccggcccgccgaaccgcgcgttccgctccccgacgatcactccctcgtcgccgtcttctccttcctcttcatccccacctaaatcaacctcctcgccgcgaaattctgctacaatttcttcatcttcccttcccgccgggagcggacggatcgccgcttcctcggccggcgggatgagccgggaggcgcagaaactcgactgcgccgccggcgccggggggatcggggtcctgtcgctggacctactgggccaggtgctggaacacctgcgggagccccgggaccgcaagacgtgccgcctcgtcagccgcgccttcgagcgcgccgaggccgcgcaccgccgcgcgcttcgggtgctccgacgcgagccgctcccgcgcctgctccgcgcgttcccggcgctcgagcggctcgacctctccgcctgcgcctcgctcgacgacgcctccctcgccgcggccgtcgccgacgccggcggagggctcgccggcctccgcagcgtgtgcctcgcgcgggccaatggtgtcggctggcgcggcctcgaggcgctcgtcgcggcctgccccaagctcgcggccgtcgacctgtcgcactgcgtcaccgccggggaccgcgaggccgccgcgttggcggcggcgtccgagctcagggacctgaggctggacaaatgccttgccgtcaccgacatggggctcgccaaggtggctgttgggtgccccaagctggagaagctcagcctcaagtggtgccgtgagatctctgacattggaattgatctgctggccaagaagtgccctgagctccgcagcctcaacatatcctacctcaaggtgggcaatggatcccttggatcaatttcgtcacttgagaggcttgaggaattggcaatggtttgttgttcaggtatagatgacgaaggcttggaattgctgagcaaggggagcgattcgctgcagagtgttgatgtgtcaagatgtgatcatgtgacttccgaggggttagcttcactcatagatggtcgcaattttcttcagaagttatatgctgcagattgtttgcatgagataggacagcgttttctatccaagttggcaagactgaaggaaaccttgacattgctgaaactcgacggtcttgaggtctcggactctcttcttcaagccattggtgaaagctgtaacaaattggttgagattgggcttagcaaatgcagtggtgttactgatggaggaatctcatctcttgtagctcggtgtagtgacctaagaacaattgatctcacatgctgcaatctcattaccaacaatgcgcttgattcaatagctgacaactgtaagatgcttgaatgtttgcggttggaatcatgctctttgataaatgagaagggactagagcgaattacaacttgttgccccaaccttaaggagatagacctcactgactgcggagtagatgatgcagcattgcagcacttggctaaatgctctgaattgcgaatattgaaattaggcctatgctcaagtatttctgacagaggcattgcatttatcagttcgaattgtggaaagctcgtggagcttgatctctaccggtgcaactctattactgatgatgggttggcagctttagcaaatgggtgcaagaggattaagttactgaacttgtgttactgcaacaagatcactgatactggtttgggtcacctaggctccctggaggagctcacaaaccttgaactgaggtgcttggtccgcgtaacaggcattgggatctcctcagttgcaatcggatgcaagaacctgatagagctggacttgaaacgatgctattcggttgatgacgctggcctgtgggcccttgctcgttatgctttgaaccttagacagcttacgatatcgtactgccaagtcacggggttgggcctgtgccacctgctgagctccctgcgatgcctccaggacattaagatggtgcacctctcatgggtctcaatagaagggtttgagatggctctgcgagcagcctgcgggaggctgaagaagctgaagatgctctgcgggctgaagaccgtgctctcccctgagctcctccagatgctgcaggcttgtggctgccgaataagatgggtcaacaagcctcttgtctacaaggactagacagactcgtgttcctcattgtgtgtgcagtgtcagcatcagcatgtattgtcaagatcttgcaggtttgccctggctcacgttgtgagtccgcaataatcgttgggggcgtaagctcccgtcccccagatgtggttatggtgcctttggggcacttcttgcgccatttgtcactctctgctccggtgtatctgtgtatgcaaacggaggcaccggtaatgttcatgtgtatatagcgtgcagtagaatgatcccattttatgggattagttagtgtgtaattgttacctcatttcgcatgattcgaatcttgagatgaaagaatcataaggggtatgatcgatgcattgcattc

SEQ ID NO: 99569 - DNA, 387 bp, Zea Mays
atgccctgcactcgtggagccattgccgcacctagtgctcgcggttgcgaggccgtgcccagcccttgccattacgaggttcgcggtggcgaggccatgcccaacgctcacaatgctaacactagcgatggagagtcctcgcccagccctgcgctcgtcctcgacgacatcgacgacgacctcggggtagttcttgtcatggcccctaccagctgttgtgacgtcgtgtccccctcgccgcatgccagtggtgatgttgagccctcctgtgcctgcgagctctcgatccgtagccggcatcggtgtcgggaaagttgccgcactttcttcgtcttccaggaacacattaaaatccaagcctcgccacaaggtgctcctatactttaa

SEQ ID NO: 99570 - DNA, 666 bp, Zea Mays
atggaggttgctgccgctgcttggtgttttggagggtgggctgctgtgcgccatggaaattgcaaaggggaactcgacggggtggctgggacagcaggcatggtgttgtgctgcgcgtggctggctgctggccggaaagccgggtatcggccatgggcgacggcggcctcacctgctcgagcttggatcagagggtgtgccgcaccatggctggaacagaggggaggacgggcaccgtgcacagggatggatggcgggcgcgctgggcacgtcaccgagggagcggggaaacagggagctcggccatggcgctgctgggggatgggtgccgctggagaggggacccggcgtagggagctcggcgtccgagcagaggggacctgcagaccgggcttgcagagctcaactgggtgcggcgttgaggagcagcggctggagcaaaagggaaggcgctcaaggagaggagccatggacggtcctggagctgaagcgtcgctggggaagaagaccccctgctgcagccgctcgccaaaggaggagcagggagctcggcggccagggagaaggctgctggcgacctgcagggaagaagctccatggggaagaagctctctgctggaaaaaaatctgggcgccatggagctgttgctcgccagcagggagtag

SEQ ID NO: 99571 - DNA, 625 bp, Zea Mays
ggaaggtcaatcatggaagtaattttcttaataagataagtcatgaagtgatataagcagcaaaaaaaattgcacatggtttttatcaatttgaaaaaggtctatgataaaatacctaggaatattatgtggtagatattggacaagcataaagtcctaacaaagtatgttacgttttttaaggacatgtgtgacaaggttgtgactaacgttcgaataactgatggtgatacaaaatatttttttgattaatataggactacatcaaggttcagctttgaatccttatctatttgccttaggtatatacaagaaaatattcattggtgtatgtttttcgtgacgatgtagttctagtagatgaaagccggaaaggaataaataaaaagctactattacggcgtcagaccttagagtcaaaaggttttagaatgagaatgaccaaaaccgagtatatgagatatgattttggtactacaattagtgaggatggagatataggcttgggagtccaggtagtacccaagaaggacacattctattatttgagatcgatgctacaaagagatggtgatgtgatgaagatgttagccatagaatcgaagcaggatggatgaaatgacgt

SEQ ID NO: 99572 - DNA, 1120 bp, Zea Mays
aaaaaaaaataaaaacttggtggggacagagtagttggagtcggagaattttggggtaacaggtgggttggcttcctggctgttaaaaggaaggacgcctttgtgctgttctcctaatccaaaagtcgcgtgctgtgctctgctctgctctcgcctcgcacggactcgtggtaaaggatggagaccatgtcggctctcgcgaggacggcgccgccccttgctgggaccattcgccggccctcatgcgcgctgaggccgacggcgtccctctccttcgccgccgcttcaacgacgccccgcggccggctcgggctggggctgagcacggcgccggcggggagcgggagggcggccagggctcgcgccgtcccgcggcgcatcgtcgcctcctcggaggttgagcaaagctacattatgatcaaaccagatggtgttcagcgtggtctggttggagagattatttctcgctttgagaagaaagggtttttgttgaaaggcttaaaacttttccagtgccccaaggacttggcgcaggagcattacaaggatttgaaggataaacctttctttcctaagctgatcgattacataacttctggccctgttgtctgcatggcctgggagggtgatggtgttgttgcatcagctcggaaattaataggagctactaacccccttcaagctgaaccagggactataaggggtgatcttgcagttcaaactggaaggaacgttgtccatggaagtgatagtcctgataatggcaagcgtgaaattgaactgtggttcaaagaaggcgaggtctgccaatgggaatcagttcaagcaccgtggcttatagaataactattgctaatcatttccagagttgtattcaatgtttttttttgtgttcgtcttgattcaaggagccatgcaagagtgtatgagtttagttcggctaagtaattagctcatgagggcttgaattatcggttctttttgaggattgaggatttgtgcaactgaaacctttgatcagttgctcatgttgagaagctaatttcttgtcatatttacatgtaataaagtccctctactacagtaataaattagtatttcctctggtccaattaattaa

SEQ ID NO: 99573 - DNA, 1100 bp, Zea Mays
ccttgttggcgggaccatttctttcaaagagttagctccatcattatatatacaatcctgggatacattagcaaaaatatgccttgtagatgaaaaagtggccaaacggtatattccaatttttgttcaggagcttgagaggagtgatatggctacccttcgtaataatatcatgattgcgatggcagacttctatgtccgttatactgcattggttgactgttatatgccaaaaataacaaaatcactacgtgatccctgtgaagtagtacggagacaaacatttatcctactctctaagttattgcagagggactatgtaaagtggagaggggttctcttccttcgatttctgccatctttagttgatgagtctgagaagattaggcatttggcggactacctcttcgggaacatcttaaaagctaaagcgccacttcttgcatacaatagtttcattgaagctatatatgttctaaacgattgcactggacatggtgtatatagcgactctcagtctcagggaagtttagacagaagacctgccctttttgcaattcgtggcactgatgaaagcacgaggtcaaagagaatgcacatttatgtctctttgctgaaacaaatggcaccagagcatcttttagccacgtcggccaagttatgtgctgagatcttggcagctgtttgcgatggcttgctcagtgttgatgatgctggtggaagggctgtacttcaggatgctctgcagatactggcttgcaaggagatgcgcatccaccccaacatcttatcagagaattccgagatggacgaggaaggcggtgagggcggaggaacagccagcgcgctcctggcggccaaagggagggcggtgacccaggtcgctaagaagaacctgatccagatcgccgtcccgatcttcatcgagctgaagcggctgctggagagcaagaacagcccgctgatcgggtgcctgatggagtgcctgcgcgcgctgctcaaggactacaagaacgagatggaggagatcctggtggcggacaagcagctccagcgtgagctcctctacgacatgcacaagtacgaggcaggcaagggga

SEQ ID NO: 99574 - DNA, 675 bp, Zea Mays
cgagtgctctctccagtccccacgcccgatctcgcccccatcccatggacgccgatgagatggacctcgactccccatcctcggcctcccccgcgcccgcctccggctccctccccaccgtcctctctgagctcgccgccctccaccgccgcgcgtcttcctcctccgtcacctccccgcccttgtccctgccctccatcacattcctctcctccagccccgcagccgtcgcgtccatcttccctcgcctcgccgaggccggcgtccccgcatcctccttgctgcccccgctcgaggcctcgctctccgcgcacccgctccccgcagccgtcgcctacctccgcctcctcctcgccccggcctccccgcttctcaccctcttctccccgcttccattcctctccctcctcctcgtcatccgcaaggccgcctcctccttctccggagccggcagcgccgcctccaaccctagctccgtttccggcggcgccgccaacccccgcaagcgcaagaaccagcgccaaaagccagcagcggctccgccggcggcgccgtcgctgctcccgaaggcgctctccctgctggcggacgccgcggggaggctgccgctcggggcccacccggacgcgcggcggtcgctcgtcgataccgccgcggagctcacggcgtttgacg

SEQ ID NO: 99575 - DNA, 1461 bp, Zea Mays
atggagccggatccggtcgccgctagggcatcctcctcgccgccgccttatccagcgtcggccacgtccccgccgtggcaaacgcgagttgagaacgccgaggtgggcagcgaggtggagcaggaggagccaaagaaggaggcaatggcaggagtaggagagactctccgcagcttcatgaaggagtttggggatcaaggagaggactccattatcttgtcaccgtggctgaaggagattagtactcctgaccgccccactgcccttcgtttcctaggggagaagtataataacctcatggagaggtacaagaagcaggtagtcaagtgttccgaggagtgtgaaccaagatataatgccctgaagaagaagtacacagacaagtgtgtagagaggcggcgtctgtacaatgagcttattgagctaagaggtaacattagggtgttctgcagatgcagacctctgagctccaatgaggtcaaccgtgggtgtttatctgttgttgagattgacccatcacacaagactgagctgcagtttgtcctcaatgaaaaagaaaagaagccctttaagttcgatcacgttttggggccagaggatggccaagcttgttcgcttattgtaaaatggcatgaccgtgagcttgtcttgtcgaggctcagaaaggacaatgagaaagcaaaagatgcttttgagaaggcctcaaaaggacaggaaatgatctcctcgtatcctttggagatttctctgcaggagcttgggtgctggaatgaagtatctgatttctatcacagagcttcagaattataccgtgaatgtggaaggccacaacctgcatctgatgctctagcaaagggtgccagtgtattggaggagaaatctccagaagaagctatcaaaatgtatgatgaggcttgttcagtaatagaagaagatgggaaggaacagatggcttttgacttgtaccgtgccgcagcagctttgtatatcaagatggagaacctcacattttcatctatgtgctatctcattcatgatttccttggaactttttttgttcgttcttccttgttcttacatgcgaaatatttagatgctgctgctttgtttttaagactcggtttagctgctgataagtgcaatgccatcaatagccaatgcaaggcctatctgagtgcgatcatcatctatctttacgcacatgattttcagcaagctcaagaatgctacaatgactgctcagaggttcaagccttcctcaatagcgaccagaatcgatgtgcaacgaagctattgtctgcttatgaggaaggtgatgctgaagaaatcaaacacattgctcaatcaagtgccttcaatcaccttgaccatgtggcaaaatctcaggttggagaaaaaatcatggttaaagtagtgttcatttcaatctccatgttgttgcagagcgataggtcaaagtaa

SEQ ID NO: 99576 - DNA, 2354 bp, Zea Mays
cgcacgactttcattggcaggccggctggaacagcggaacgcaggaagattcccagctcgttcctgccactttcccgccatcttctcgcccggcatctataacagcgcgtactcctcccgttgctttgttcttgttcatcacccgtcttcccccaatggctccgccttcctccgccaggcgcttcccatggtcagggacgaccgacgacactggcggcagcgagctctccctgccccgcaggcgctggcagtcagttgggctgcaggttaggagaacgaggaggaagccgacggaggggctgtttggattcagacggatcatggaggcggagttcatgggcatgttcctcccggtctttgggtcgatgcttcggagagtggtctcagaggaggtagagaaagcaatgttcagacaattcagtgcacaaccagcacctcgaaggttactggtggacaggaatcagcaccctcggtatcagctgatgttcttgaatggactgagacccgtttacacaatgacaaagctagaaccagatgacggaaaggcgctgaaggtagctgtagtcgaaaggctcgaaaacggtcggacggacatcgtcagatacggccctctttcttctgctagggttgaagtcgtagctctccatggcaacttcaacgctaaagacgaggaatcctggagccctgaggagtttcagaagcacatcgtgtccggtcgagagaaaagcgcccagctcctcactggcaacctggcactcaagctcagtggaggcgaggctgtccttgagaatgcaaccttcaccgataactccagcttcaccagcaccaagatgttcaggctggggctgaggcttgtcggttcttctggagagagagttctcgaaggtgtcaccaagccttttcgcgtgaaagagcgcagggtagaaggattcgaaaagcactaccctccaatgctggacgacgaagtgtggcgtttgaaaaagattggtaaaatcggcgcttaccaccaggcattgtcagacaatggaatcgattcggtgcaagagttcttacgggcttacatgaaggatgaacagaagctcataaagattttcaacaagatgccacagtcgacatggaaatccatcgtagagcacgccatgacgtgcagagttggcgacagtctttacctctacgaagctcaggacaaggatgcgggtcttttctttgatgagttataccagctcgttggggcgaagtttggtgactgttacaagcccattgaccagcttaatgaaatagagaagaatctagtggaagccctgaagcatggggcctaccagaatatagatggcctgcagcctaactacaagatggtgaacaactaccctgtgctcagcagtttccctgctgctcagggtacttccctgtttagcgctcttcatccaaatcagcaggcactcagctatggtgacagctcgactggtgtagggtttggaacaaggccttcaagggagactttcaacacatcccttggatccagtaatgagccacaaacttccaactatatggagttaagacatgagcaaacaataaacagggttctaccatatgatccaagcaatggaaccttgttacccagaccgagaatcacccagttgcagataccaaactctgagagaacattttttggtcctcctgctgttattccaaacaacattctggttggtcacggtgttgcgctctctgaaggatcacacagtggttttcctgtccacagtttatcgtctacggatgtggtcatgtcactgatgcaatccccattccagcttccgacaaacagtgaccattctgaacagcaatgcaatggtcaaacatcaacgcagttacaacagtttgtcactggatgccagccatcaagaacaaacagtttcgacttgaactcgtgcgacgaactcatacagaacttcatttcccagatttctaacagtggaggggcatctacgccactttcaccccgcaaatgggtcaagatcagagctgcgttgaagctggcatctgtagggaggctctcaaggaggggtccgcattgcaacccaccaaggccaaggcttgtaccgataccatgagcactcttaagaggcatcgatagttttttttttttgtaaaatatacaatctaggatcaaagatccatcaagatattgaactctatagtattgttaaatagatactccagagaaatctgtttaacttggagtagaatggatgttgtcgaacaattaggtatttgcacgtaaaggagctagtagtagtactttacatttataagtttagggtatttgcatgctgaagaatccatgtatctttgttact

SEQ ID NO: 99577 - DNA, 1056 bp, Zea Mays
caatctccaggcccaggaaaaacaaccccggaccgcgtgcgtttcgcttccgcccctgctgtttctgtttcttggcattcaccccctctttctctcgtggcgacgacggcgaccgtcgccttcccctacgcgctaggtgccagggtccgtcgggtccttcgctggcgacgagcaactaccaggtaacctagtggtgtgttcgggaacgtttccgcgggcgggcggcggcccccagtggcgaagatgatccgactaccgacgtacgcagcaggaggcgtccgttgccatcttcttctcctttgagtatatgatactagcaacatccacagtatcaacattcgtgaagtatatattctatgttagtgacatgctaatggaaggtcaatgggagaaaaaggcagtgtatacattttacttggttcatgagctatatgtgactttccgcaacttcagaattcgcattacagattatgtgcgctacagaaagatcacttccaacatgaatgaacgctttccagatgctacatcagaagagctcgatgtgagtaatgctacatgtattatttgtcgtgaggaaatggctacagcaaagaaactgctcgatgggcatctgttccatgtgcattgtctaagagaaataggagaacaggctgaagaagaggttcctctacggcttctccatgggagcttcagctccacaggaaggatcctctctactgggactgtgccgtgctgcttgccccaatgtgcaagccaacagtagtgtcgaaggagcacaagatgatgtgtgagcacaaagtggccagcaagaatggagtcatggaacatcgacaggaggggtgcgacagcggcaaccgatgtatcgatcccttggacaatctggttttgacatgatgcaaatcaatctgctgtacattgtattctgcacttgcacagattgtttggctaattacatgattatctcaatgttttggtttggatttagagtacacttatgtatgaaatatttattggtactcatctatattatattaattatattattattaaatatat

SEQ ID NO: 99578 - DNA, 969 bp, Zea Mays
caatctccaggcccaggaaaaacaaccccggaccgcgtgcgtttcgcttccgcccctgctgtttctgtttcttggcattcaccccctctttctctcgtggcgacgacggcgaccgtcgccttcccctacgcgctaggtgccagggtccgtcgggtccttcgctggcgacgagcaactaccaggtaacctagtggtgtgttcgggaacgtttccgcgggcgggcggcggcccccagtggcgaagatgatccgactaccgacgtacgcagcaggaggcgtccgttgccatcttcttctcctttgagtatatgatactagcaacatccacagtatcaacattcgtgaagtatatattctatgttagtgacatgctaatggaagattatgtgcgctacagaaagatcacttccaacatgaatgaacgctttccagatgctacatcagaagagctcgatgtgagtaatgctacatgtattatttgtcgtgaggaaatggctacagcaaagaaactgctcgatgggcatctgttccatgtgcattgtctaagagaaataggagaacaggctgaagaagaggttcctctacggcttctccatgggagcttcagctccacaggaaggatcctctctactgggactgtgccgtgctgcttgccccaatgtgcaagccaacagtagtgtcgaaggagcacaagatgatgtgtgagcacaaagtggccagcaagaatggagtcatggaacatcgacaggaggggtgcgacagcggcaaccgatgtatcgatcccttggacaatctggttttgacatgatgcaaatcaatctgctgtacattgtattctgcacttgcacagattgtttggctaattacatgattatctcaatgttttggtttggatttagagtacacttatgtatgaaatatttattggtactcatctatattatattaattatattattattaaatatat

SEQ ID NO: 99579 - DNA, 693 bp, Zea Mays
gttattatattttgcacatatttacaaacactttacaaaatcattcacaaaagtaccaacgcttcaagtgagtcacaaaagccttcacaaaagcactccaacttcttgtatcctcttgttttaaggcacaagcttgtaggggttgtgatgttggcacttacttgatgtttctctcttcaaaacttgttcatatggcagtggttgccccagatcttgatcatatggcagtggttgccccagctataaagttctgtagctgttcaaatcttgttcatgcccataatgagttctcatggcgccctgatcaccacactcctctatatgcatgtttaacctgtcgaccaatacatctccatagatcacttcacacaaaacatgactgaaatgaaatactaagcatgatttgagtaaaaggtgttaggtagatgcctcgatcatatacgtttgtgacaaaccaacaattagtcaattacaaagcaactattcactagttacgctactcagaagccaagattccacgttaagaaaggaaacataaacttacagatttctttatctcggccatcttgattgattggattgtttttaatccttgaaatcgcatcctgctcccgctgccttattaggagtagaggatcagagtggagttttctccatgtatcatttgcagattggggtttatcctcaaataaa

SEQ ID NO: 99580 - DNA, 1400 bp, Zea Mays
aacctcgaaagattaccaaagctgaccctccagaaaaccaagaaagctcactcctcttccctctctctttcctctcttgcctccgtcgccatgacccaccgcctccttcccctgctcctgctgctccctttgctagcgccgcctgctgcgtctgcacgccagggcgcggggcaggatttgggacagttcccggggctggagtacggcctgccgccgttcgccgccgctctccgggcaagctgccccgtctcgacggaggggtactcgccccccgaggaggttgttaatggggaagaacttctcaggttgttggatggcaaggaagagcacacagctgtccttttctatgcatcatggtgccctttctcagaaagaatcagaccagtctttgatgatctgagctcaatgtttccacgggttaagcacttggctatcgaagagtccaatgtcacgaaagccattttgtcgagatatcatgtccgtgcactaccttccataataatagctcgcagctcatacatattctgggcgctcggttcgaaagatctcgactctctagtcaacctttacactgctgctacgggtcaagaaccagtcgcatatattggtactcgcaagtggagggccacgcaaagcacagactatgctaagatttggaacagctcgattagtgaaacagtgaagcaagaaccctgcctagcattcagtatcctgtttgtttgcctgaggatattcatcttcttcttcccaaagttctttgctctcgtccaagacttctggacccaatactatgagcaaatcaaccttggaatcctcgccaaattgacccagctgcttgaatgtgtgcctcatgctgtggacgtgagaaagatgtggagcaagttgaggctcatggttggagctaagaacggtaggatatgggcatcatctctaacttcggtgtcacttggtgggcagccttccaggcgagttgctgttggactgatgggctcgaccatctaacggcaacaagagaacgtgctgattcattgaattgctcctgttaaggttgtaactcacatgagcatatttagacagaaattgaattgctcatgttaaggctgtaactcacatgagcatatttagacagaaaaggtctctggctttctgcttagaaacatacatcctgtttgtagcatgtaaatcttagcgatacttgtagcctttgtaagtcatgttgtaacattagtcgtcagtgccccgatcaggcaggctgcctttggcaagagaaaatgcagcacaagcttggtcttcccctccccagaatacatggtcaaatgcgccgttttatcatgtaatctgcaatgatcaatggacatccttcagagatcagtgtcattttctgatggctttgaatttca

SEQ ID NO: 99581 - DNA, 719 bp, Zea Mays
aacctcgaaagattaccaaagctgaccctccagaaaaccaagaaagctcactcctcttccctctctctttcctctcttgcctccgtcgccatgacccaccgcctccttcccctgctcctgctgctccctttgctagcgccgcctgctgcgtctgcacgccagggcgcggggcaggatttgggacagttcccggggctggagtacggcctgccgccgttcgccgccgctctccgggcaagctgccccgtctcgacggaggggtactcgccccccgaggaggtgcgtgtctccgagctctagctccggccgtctggttgtctagttggccgcaagattgatcatctctcggggagagcgaagccgaatcgggcagttcggcgtacggttctggcggatctcacacttgcgcgcgcgttccggtgctcatgtcgagaaatccatgtgatgttcagacttgttgatcgatgctgtattgctgtttccatcccagaagattctcactgattagcgtggattctcccggggagccatgggcagataatttgttttcgaagtttttacgggatggttagaggcgtctgaattaagctgtgcattagtagatcagttttgattcattttttagttaggatcgctttctagatccccttcctttgttgttgacggaatttacatgttcttgtgtgtttttcaagtataaatataattcaactagtcaa

SEQ ID NO: 99582 - DNA, 171 bp, Zea Mays
ttatgttgttgtttaatttttgttcatgataagatcatattgttaactggaacatggagaaccacccggaaaaacagtgctaccacaagggtggaatgggacgcccttggccaagtaattaggaaagctagggagagattaccttacccgagtaagggcaagaggggaggc

SEQ ID NO: 99583 - DNA, 3196 bp, Zea Mays
ggggtggcctcccacactgccccttccccgccaacaatggaggccgcggtggttcgcctgcgccgctgccggaacggcagcctcgttctcgtatacctcgccgccattctgctcgcggcgaccgcggcggccgcgctctccgacgccgaggcgtccgacattgcacggcggcagctgctttcccttcgggagggcgacggcgacctccccgacgacttcgagttcgacatccacgtggacgtcaccttcgccaacgagcgcctgcgccgcgcgtacgtcgcgctccaggcctggcgccgcgccatgtactccgaccccaagaacttcaccggcggctgggtaggagccgacgtgtgctcctacttcggcgtcacgtgcgtcccggcactcgacgacgctaacaccaccgtcgtcgcgggcatcgacctcaacggcggcgacatcgcgggttacctccccgcggagctcggcatgctcaccgatatcgccttcttccacattaactccaaccgcttctgcggcatcatccccaagagcttcagccgcctcacgctcctccacgagctcgacgtcagcaacaaccgcttcgtcggcgggttcccggacgtcgtactgcagatccccgtgctcaagtacctcgacctccggttcaacgacttcgacggcaccctgccgccgcacctcttcgacaaggaccttgacgctatcttcgtcaacagcaaccgcttcgtcgggttcatcccggagaatttcggcaactcgacggccaccgtggtggtgctcgcaaacaacgccttcatcggatgcatccctcgcagcgttggccgcatggccgacacgctcgacgaactcatgcttctcaacaaccgcctcgacggctgcatcccgcctgaacttgctgagctcgtcaactccacggtggtggacgtcagcgggaacgcgctcgttggcacgctgccggaggggctcgtcaacatgatcaggctggagcagctggacgtgtcgcggaaccagctcgccggcgccgtggcggagaacgtgtgcaagctcccggctctcgccaacttcagcttcgcgcacaacttcttcagcgtcgaggcagaggcgtgcgtgccgtccgaggactcgccggtggcgctggacgatagcggcaactgcctcgatggcggacgcccggggcagaagccgttgcctgagtgcgcgcttgtgctcgcgcaccccgtcgactgccgcacgaacgtctgttccaagatgcctgcgccaccagcgaagaaggttcctaggccaccagacgttagtccacatccgttgccaccagcgccatcaccggagaaccaaccaccaaagaagtccccagcaccacagccagtgagcccacagccgtcgccgccaccatcagtgaaatctccacccgcacccgcaccagcaccagcacctattagctcgcctcccccacttatcaaatctcctcctccaccggttccggttagctcaccaccaccactactaaaatcgcctccacctccagtatctatgagtttaccacctccatctgtgaaatctccaccgccgttgccaccaaggtcacctccagcgccagtgaaatcaccacctcctccaccaccagtaagttcgccgccaccaccagtaccggtgaggtcaccaccaccgccaccgccatcaccgattagttcaccaccgccatcaatgaaatctccacccccaccagcacctattagctcgcctcccccacctaccaaattccctcctccaccggtttcggttagctcaccaccactagtaaaatcacctccatctccagcatatgtgagtgaaccgcctccaacggtgaaatctccttcaccaccatcacctccaccgatgattaaatcaccgccaccaccggtgccggtgaggtcacctccatcgtcagtgaaatcaccacctccttcaccactgttaagttcgccgccgccaccagcgccggtgaggtcacctccaccgctaacgaaatcatcacctcctccaccaccgataaggtcgccacccccaccacaagcaaactcacctcctccatcagctctaataagctcacctcctcctccgatgcaatcccctccaccgcctgctccagtcagctcaccaccaccacctataaaatcaccaccaccggctccagtaagctcaccacctcctctggcgcaatcccctccaccacctgctccagtcagctcactaccaccacctgtaaaatcacctcctccaccggctccagttagctcaccaccgcctcctgtgaaatactcttcaccacctactccagtcaactcaccgccaccacctgtaaaattacctcctccactagctccaatggtttcaccatcgtctcccatgaaatcccctccaccaacggcacccgttagctcgccgccaccgcctgtaaaatcacctcctccaccggctcctgtgatttcaccatcacctcctgtgaaaatccttccaccaccggcaccagttagctcacctcccccgccagttcccgtgagctcagcacccccatttgcaaaatccccaccgccacagttcaaatcacctgcaccaccaacttcgagaagatctccacctccactggtgaagcccccgccaccaccgccacttgtaagctctccaccacttccaccaatgacctccccacctccaccaacactggcgagctcaccgcctcctccagtgaggtcccctcctccaccggcgccaatcaactctccacccccaccggtcaaatccccaccaccacctgctccggtgagctcgccacctccaccagccgtcccatcaccacctccacccgcaccatcatcacctccaccgtcggcacctgaggagttcatcttgccaccaatcatggcgcagcagtatgcgtcgccaccgccgcctctgttccaaggatactaagcggtgatcacagcgcgctctactgacgatgagagtaatcgcgacgagggaggccaggagaagcagtgacaagtcgatcgcaccatgcaatgctctagcgacctgaattgaatgctatcggataagcgcatgtacgtttgtgcgtaagggtataacagcataggtaatgtaacgagtgtgtgcacatgtaacatgatgaccgagaagagaaacatgcaaatggagaaggaattgtttctgc

SEQ ID NO: 99584 - DNA, 3069 bp, Zea Mays
atgagcaagaacttgatgcaagcgttgctcttctttctcctgctgctaattaaattcttcccttctcatactagcgtgcctcacgcaatgaatgccatgcaggaccttccatccattgccatgtcgtcaaaccagaacgagagcggcggcggcggcggcgcgggaccgccgctgccgacggcgttcaagagcccgtccacggacggcaagagcggcagccgccggagcacgcggttcaaggacgaggacgagtacgtggaggtcacgctcgacgtccgggacggcggcggcggcggcgacgacgtcgccgtcctggccatcaaggacgacgtccgcgacgacacgcaggacgccgcgtcgctcctggaccgcccggcgcccggcggggcggggggcggcctgtcctccaagctcagggcagcgcgcgcgcgcctcggccgcatcgcgtcggggaagcgcgccgcggtgccgctctcggcgctgctccgccgcgaccccgaccgcgccaggctcgacaggagcgtcgtcaccgcgctcaggggcctccagttcctcaaccaggccgccgtcaccgagggctggcccgaggtcgagaagcgcttccaccgcctcgccgtcgacggcttcctcctccgctcgcgattcggccagtgcatcgggatggtcggatccgaggagtttgcggcgcagatcttcgacgccctggcacggcgaagggggatcacggcaatggtgctcaccaaggatcaggtccgggagttctgggagcagctctctgatccaggattcgatgccaagcttcagaccttctttgacatggttgacaagaatgccgatggtcagatcactgaggaggagctcaaggaggtcctcactctgactgcctctgcgaacaagctgtccaagatcctggagcgtgtggacgagtacacggcgctgatcatggaggagctcgatcctgacagccttggctacatcgagatcgcgaacctggagtcgctgctgctgcagccgccgtcgcaggcgccgacgaggttggtgacgcacagctccaacatcagccagctgatcagccagaggctggcgccagcgcgcgacgacggcccgctccggcgcggcgccagggccgtgctctacttcgcggaggacaactggaagcgcgtctgggtgatggcgctctggctggccatcaacgccggactcttcacctggaagttcctcgcgtaccggcgccaccccacgttcgacgtcatgggctactgcgtctgcgtcgccaagggcggcgccgagaccaccaagttcaacatggcgctcatcctgctccccgtgtgccggaacaccatcacgtggctgcggtcccggaccaggctcggcgccgccgtcccgttcaacgacaacatcaacttccacaaggtggtcgccggcggcgtggcggtcggcgtggcgctgcacgccgtgacgcacctcacgtgcgacttcccgcggctgctgcacgccagcgccgccgcgtacgagcccatgaaggcgtacttcggccagcgccggatccccaactactggtggttcgtcaggggcgtggaggggatcaccggcgtcatcatggtcgtgctcatggccgtcgcctacacgctggcgcacccgtggttccgccgggggaagctcagcgagggcaacccgctgcgccggctcagcggcttcaacatgttctggtactcgcaccacctcttcgtcatcgtctacgtcgccttcgtcgtccacggcgtctgcctctacatcaacaggacgtggtacaaacagacgacatggatgtacctcgccattcccatccttctctacgccggcgagcggcttctccgggcgctgaggtcccatggcctcaccaccgtgaggatcgagaaggttgccctgtaccccgggaatgtcatcgccattcacatgagcaagccgcatgggttcagctacaagagcgggcagtacatctacgtcaactgcggcgaggtctcgcccttcgagtggcacccgttcaccatcacctcggcgcccggcgacgactacctgagcatgcacatccggtgccgcggcgactggacggccagcttcagggcgctcttcgcgcaggtgtgccggccgcccgccgccggccagagcggcctcctgcgggccgacttcgcgtcctccacggcggccggcggcggcgggaagctgccgaagctgctgatcgacgggccctacggcgcccccgcgcaggactaccgcaagtacgacgtgctcctcctcatcggtctcggcatcggcgccaccccgctcatcagcatcgtcaaggacgtgctcaacaacatctcggacaacaaagacgaagagcagccggcggagttcatgacgcggcgcgtgtacttctactggtgcacgcgggaggagggctccttcgagtggttccgcggcgtgatgaacgaggtggcggagcgcgacgcccgcggcgacgtggtggagctccacaaccactgcaccagcgtgtacgaggaaggcgacgcgcggtcggcgctgctggtgatgctgcaagcgctgcaccacgccaagagcggcgtcgacgtggtgtccgggacgcgggtgcgcacgcacttcgcgcggcccaactggcgggacgtcttcaagcgggtggcctgcaaccaccagggccagcgcgtcggcgtcttctactgcggcgaccagaaggtcacgccggagctccgacgcctgtcgcaggacttctcgcacaagaccaccaccaagttcgtcttccacaaggagaacttctgatgtggaccaccacgaagcaggacatgatagtttcattcgtgaagcaagttattcctggtgtgttttagggtaggacaaaaacgcttgacatatgtatatgtggataataacgtatgtagtatctagtaattaagcagcttttgtttttatcttttgcgttttggaaaaaatagataggagtatacagtacagcattgttcattagtgatgttcaaagtatatactgcccgcaagtacaaaatacaaagcaaaaaaatgacttaattttggtgg

SEQ ID NO: 99585 - DNA, 808 bp, Zea Mays
tatatatatatatataatgttgaatggatcaggatatgttgtttgcaaggcgataactgataccaaataaccactagtccactacaacacttggatgtacctaaataattacgctaactgttgaggaacagttggagacgattttatttttgtttcagtatattgacataaatatccaatgctgaaccgatcaggatataaccagtaaccactacaaatagggtaggccatcttcctactatcttcgaagaatatacttgattgatcagcgtattttctgttgctatgatgtctctaaaatttaaaattgtttattatgctatgcaggggtgaagaaaaggcttggattcaatgtctataccgagcttcagctagggtcctgcgatggatatgtcactgaacgaatttgatgcatggggtttttgttatggcgtttgggggtgctcatttgctttctgcagcctgcagctgcaatatggattcgtcacgaatttttgttattatatttgggagacgtacgttcatttggttgctgcagccagaaaattagaaatgctgtttctggtgcacttacccctctactgtatctgtatgagacctgagctttgtgattggaacaatgtgaatacaaggcttagcaccatggtaacacttctttgttgtacgaagtagttggctgtgtaaaatcttttcgttgactacacaatataggacagtgttgatacagttacatctcctttgaggggacaagatggtgaactggttagccttggattggagattgctgggtagaatcttgtgttttggt

SEQ ID NO: 99586 - DNA, 208 bp, Zea Mays
ccattccgtgttctgccattcccattccgtcctcactgcaaagcccattcccattcctagctgcctgtctttctcattccccctccctgcaaagcccattcacatttccattcccggctatcacgtgtctttctcattctccctcccacaaagcctattcccattcccacgtgcatcccacgcctagctaaaattaaattaaaaaaac

SEQ ID NO: 99587 - DNA, 1864 bp, Zea Mays
atgaggacaattggtgatcatgagcaggacacaccacattctccaaagccatatcaacgattggtaccgaaggtcggtatgacatttactaatgtggacaagacgtaccaattctatagccgatatgcatatgaagttggatttccgttgaagagatatagggagagaaaaaattgcaagtggttgaattgttcaatagaaggcaagcgtgccggaagaggatctggtaatccaaaagtgcgtaatacaagttccaagcgaacacaatgcaaagctagaatgaaacttaaaaaaaatctatgacgatgccaaagagaatattatttcggtgcagattgatctgattcatttggaacataatcatgagttcttcaggaaggatacagaaaagaatcagttacagtgcaacaagacacatgatcccaaatacatggagttccttagtgcgatgcaagaaagcaggattccgcaacactgtattatggattttgtttcggaaatgcatggtggaccagagaatatcccgttaactgcacaagacgtgaggaacctgaagaaagcgcgacaaagagaaagaaatgccaatgatgtgtctaagctcctctttctttttgcattgtgtaaaaaagataacccacaatttttatctgacttccagctggacaaagaaggaaagattttgagcattttttggtcccatgatagccagcaagcggattacattgactttggtgatgcagttacctttgatacaactcataagacaaatctttatgataaacccctgggaatgtttgttggttgtaaccaccatctgcagtgcaccgtatttggtttcacgttgttgggagacgaagacgaaactgtagacacattcgagtgggttttcaatgcattcaaaacgtgcatggggcctgaaggaccacgggtaatactgacagacccagcaatgccagttgcactaggcagggtatttccaaacacaatccatcgtttgtgtttgtggcatgttcagaacaggtatatgccttatttaaatgagttgtacgctagattcgaggaagaggatttcaaatcaagatctcaatctataatacatcatcctttgactgtaactgagtttgaggctgcctgggcaatgatgcttgatgatttccacctgcatgataacatcagtcttaccagaatgtatgaaattcgcaaggattggatactcgcttttttgaaacaggattattgtgggttgatggtctctacacagagtagcgagagcatgaacaagctcgtaaagagtgctcatgtcgatgcaaacacgccacttcatcaattcgcctagcaaatgttgaagcttctgcacggtaggaagatgaaagaggcaaaagaggcactaggatgcatgggtcaaaaggaaacaaatacactgtatatgtttgagatacgtgtagcgaggacatacacaagggctgtaatgaataggttccacgagtctttgaaatatgctactgcatacaggatagcacatgatctagatggtggtgtgaatgattgggtggtgcatcatactacaaggtcgaataagattgtgtgggggcaacaccaattcaaagtaagcttgaggagaccagataacataaagccaaagggcagaacaatcagtgagacagaaaaaagagttatgaagttgggcgcaaaaggagtcaagaagaacagaaagtgccaaaggtgtgacattgctgatggtcacaacagtcgcacttgtctatctttggaggagaataggcttcggttggccagccttactggtcggaagagagggcggccccttggttctaggaacaagggttcatctgatgctccaagttga

SEQ ID NO: 99588 - DNA, 698 bp, Zea Mays
ggtcgggtagtgggggtgccatgcttgttcactgggatcgtggtggggtcgcgcgtggggttgagccgtgtttatggtgttgtaacacaattggcaggtaatcgtaaccgtgtcgactcacggaaatctcgcaacatgcgaatcgtgcgggatatttggaacatgccatgaatatcgacaaggacggttttggcgaatatagtaggataactccaaaaaaactgggctacgcaccgtcgccgctttgtttgatgacctaggagaggtagggtatacacgatggcgacgactagtggatcggtgcagtgtggagaggctacagcgacgacgttaccttgtgggtctgatggtcgtcatgctgtaactccactggctgcgttaccggcgccatgattccttgatgacagcaacacagttcatccaagtttggtgggagcaactcaccggatacccatgaggacaattggtgatcatgagcaggacacaccacattctccaaagccatgtaagttcagtaagataatgtcagaatttgtgcatatttgatatactgtccgtgcaagttatgaagtcctagaaattcagcatgctataaaattattttgtatatgtgcaatgcatgatgactccattaattcaataggatgatagtatagatcaacgattggtaccgaaggtcggtatgacatttactaatg

SEQ ID NO: 99589 - DNA, 1324 bp, Zea Mays
gtcgacgccgactccaactcagtagtctatccccaccgcgaaccgccgcaggaatctctgacgatggccccgccggccgctgcggttgccgccgtccgccaccacagcccgcacctgctcctccgccgcgggggcgggggtctcctatcatcgccttcgggccccgccacgctccctttcgcctcgcggggtgcggcctccgcgcccgcgcgcctgcgcctgccgccgccgcagttctctctctcccccgtcccgaagagcctctccgccgcctcctcctcccacgtcattgtacggtccctcttcaccggcattgtcgaggaggtcggccgcgtgcgccgcctcggcccgccgctcgcgccgtctgggggtggcggcggcgaggctcttggccttgacttggaggtcgagaccaaggacctcctcgccggtactcagctcggtgacagtgtggcggtcgacggcgcctgcctcaccgttgcggcgatcgacccggccgcgtccacgctcaccttcggagtggccccggagacgctccgccggacgtccctgggagagcgcgccccaggcgacggcgtcaacctcgagcgcgcactcactccgtcgtcccgcatgggcgggcacttcgtgcagggccacgtcgacgggaccggggagatcgttgcgttccggccggacggggactcgctctgggtcaccgtgcgcgccccgccggagatcctccggctgctcgtgcccaagggcttcgtcgccgttgacggcactagcctcactgttgtcagtgtggacgacgagggcggctggtttgacttcatgctcgtcaggtacacgcaggacaacatcgtgctgccgaccaagaaggtcggagacaaggtgaacctagaggcggatatactgggtaagtacgtcgagaagctcctcgctgggagggttgaggccatggcgaaggttgattcttgatctaccattgctgagctgctggatcaatggtcattctacaggtatttcagcaatgttatgttcatcaataatagcagttcattccattttgttgcaattggcttgttgtttttttatttcagactttcagtgagacagtaataaaacataagtgatcgaggaaatgacttatcatttcttttcatccgttgagataaatgtacaagtatccatactctaatatgcagccaaatttagaagtttgttttgttgctgatgaatattagcaaagggtgaacaagagcagcatagcagcatccagaaactaagtgactaatgttgctgccaaataaatgataaggccctccagaacaatcatatccaa

SEQ ID NO: 99590 - DNA, 127 bp, Zea Mays
ggtgcttagatggaaactaaaatattttatgcatttattataacactaactaaatgttatttagtctacagtaacatatccactggatacccgatatccggtggatacccgatgggcacgggtacag

SEQ ID NO: 99591 - DNA, 627 bp, Zea Mays
atggagcagtacgttgtattcaagtataggctcactgacctttacaagctcgccggaggggatggtcatcagcgcgatttggcagggcgaagctccggcctgcacgccgacgcacgcgggggtctggtgcatggtggatacggcgaagccaagcgattcttcctccttgtgaagaccggcagcagccgatccggctcgccacggcgccatggttggccatacgtgccgtttccacagcaacaggcgccacgcacggcccgcgtcaatactccacggctagcacacaacgcgacccctctctctttctctctcttcgatgaagctcggtgcgattttcccaatggcagcgcgccccacaccaccctggcgcgaatcacctggtgctggcgctcatggccgaggctcttgctatttatagaagagcaggcgcaaattttacggagggcaaggggtaaccgaatccgccattacaggagcgactgctacgctagcaaatcaccgatagcgatggccacggcgagatctccgttccgcggttcagttgtagccatcagggggaagatggctcctggcgacaaggcccacaagtcagccaccaatgagggtggggccactggtcagcgataa

SEQ ID NO: 99592 - DNA, 291 bp, Zea Mays
gggggcaaaagccaaagccaaaagtcaaaccaaacacaccctaagtctgtacttgcatttatgtagtaactagtaagtctgcaactctgcatcatatgaattagtgagttagtgactaccgagtagtaactgatgttcaattgttcatgttctgaaatctgcaatctgaattctgtccagtattcatatttgctttgtttggtaactggtattgcttcctatatgctatattgctatatataattgagtttgactaatgttcatgttctgaaatctaaattgtccagttcc

SEQ ID NO: 99593 - DNA, 1302 bp, Zea Mays
acgtaaatgacttccgtggggacgggccgaaaacccaacacgtcgcgcccaaaaccgccgaccaaggctcgcacacgccgtggccgccccgcgcgctcgcccgccgcgtcgtccctgtccctgatccatccccagtccccagcagtccagcggccacctcccgctcgccgccgcttgtggccggaggaccggaggtacatgggccaggctctgcgccgcgcctcggggcgcgtgaagccccctcccgcgccctcgccgcccgcgaggcaaccccaccctcccccgcctccgccccaggcgtcgccggcgcccgctggcggcgcgacgcaggaccggctcgacgggctatctggtgacgatatcacggctccaacagaacacggtcatggtgtacttgaggaacgtgatccaagttacgacgagatgctcaagcacatggttgggagaatcactaccaagcccggaggaaaaccagaaatgggtgaagcttccgttgtccagcggtacaacaggccgctcccaaaggtcagaacgtcaaaggccgaacctgggcaaggtgggggaaggcagctaccgtcaggcgctctgaacgtccagcacatccaggagatcatccgactgtaccaagggaagtcgactaaccaccagggcccgatgagcgtggatgacatcgcctcgaggttcggagtcgaagcctctgccgtccaaaacatcgtgcggtttgtttcgctgccccaggacgagggcgtcgagaagaaagaggagcactgagggtccacgtggccgtgtagctacctctgagcctttggtcttgttcccaagctcatagataactgctgcttgaatgtgattttgatagtgttgtttaggttttctcctgctcctgctatccaggataatgaagttagtatggaagggctctgttccataagcacctgctgctatgatcagtggacgctaatatctgtttctggccagctccccaaaccacgccataaggagtccattttggttttcttggctgcctcatttcactttggctcatttagtgacctgttgcctatgatgactgcagcacagtggttcagcagaagatgtatgtctttgctctggtggaaaccacacaatggtcgttaccttgatgacattcaggtagatcgctcctctagatgttgtatttgtttgcagctgcatttatgggcagggattctcacaaccatcttcagttgagatgtactgagcccagcaccttcaatataaatggaaaaaaaatctctaagggctgatttgatagtcaggaaa

SEQ ID NO: 99594 - DNA, 2894 bp, Zea Mays
cccgggccgaagccgaagaggacgaaaaggcagcctgctgccgccgccgccgctgttgcagttgcagatcacacacactaccctttccgcgacccttctttctgcatccatccaccctccccctttgtcctgtctctctccctcccacgcacacagacacatcacacagctggagagcaggtgcttctctcacacacacctcggcccacgccgccgttgccagccaagagcagtcgcggggcagcgctgaatcctgattaggtgaaaaagagggtggcgaccatcgttttcgctgctgattctggctgcggctcatctgccccagtgctgtgctcctgcaccgtaccgcaaacccagcccaagactgcaagaggtggcataggctcatgtcctgcccagcggttcgcttcaaatttctgagctgaacgcagctggagagaccgcgcagtcctgaatatgtttggtttctcgcggcgccgggtgaaacttggaaggtcgaagggtgacccaagtgatcctttgaacagctccaggagttctgttggtcccagtaaacacctcagtctgcccaatgggaatgacgcgactatgacgtcagtaagtggccacgcagatgatctttcctaccgttgctcgtccgatacgtttgatccccaaggacgcactttcgatatttcagaaaattggactgtgctgtccacagagggagacaaacctattcctcgtttctatcatgcagcagccattgtaagtagcaagatggtagtgtttggtggtgattctggtaatcgcttattagatgacacaaagatattgaatctagagaagcttacttgggattctgcgcctcctaaagtttgcccatcaccaaacggatgttcgatgaagttgccagcctgcaaaggtcattgcctggttccttggggaaatagtgtcatccttgtcggaggtaaaactgagcctgcttctgatcatttatcagtatggactttcaatacagaaacagagctttggtcacttattgaagccaagggtgatatccctgcagctcgaagcggacacacggtgattagagctggtgctacattgatactttttggcggtgaggacacaaaaggaaagaaacggcatgaccttcacatgtttgatctgaagtcatcaacatggcttccattgaactataaaggcactggaccttctccaagatccaatcatattgctacactgtatgatgatagggtccttttaatttttggaggccactcaaaatctaagacacttaatgacttgtattctttggatttcgatacaatggtttggtcaagagtgaagacccatggtcctcacccatcacctcgagctggttgcagcggaactctctgtggaactaagtggtacatagctggcggcgcaagcaagaaaaaacgacatgctgaaacttgggtttttgatgttctacaatgtaaatggtctgtttgtgtagtgccccctagttcatcgattactacaaaaaaaggttttagcatggttcctttctaccacaaggacaagattgctcttattgcatttggaggaaacaaaaaagagccatgcaacaaggttgaagtattagtggtactgcaaaatgagcattcttttagttggcgctcagccccagaagtggacaccatggtgtatgagtattctccaagcaataaggagcttgctgatcatctccacaaatgtgcccccttgtactctaatagttccatcgcaaggcatagtctcacttctgtgatagaacaccctcctagaagggaacccctctctgagtcattgttgaagcagtccagtttgggcacttcactccatacgcagttggatcacgcagaagagtgcagcctaggtcagaaactgcagaaaccaatcgatgatgacagatatgatgacgtagatgactcttcttcatgccaagatagcactgtgagtattgcacctacaattcttgttcttcatttagggaacagctatgagcaaatggacatgttatttgtttctctacataacagattgtttcttacagccaaaagggccctacagcaaaaggacagggcctggttttcagaatggcgcggaaaacatggtgactggaggatcaaaagtgagaaggatagctagatgctcttcagatgttggccagagccacttgtacaacacaaaaatagcagacttgatcagaagaaacaccacgctcgaagaccagcttgcgaccgcactggcaagcaaagatcagctagacaagagcttagcatcggtcattcacagcagaggacagctggagaagatgcttgccaacaaagataaggaggctgagatgctgaaagagaagatagcatgcttagagctggcgcaagaagagtcgaacagcctctcgaacacagtgcacgctgataatgtgcgcctggagcgtgaagtggcgttcctgaaggccgtcacaggcgaaacccagaaggagctgcattccactcgtagagttttagcaggggaacagtcgcgcgcgttccagctccaggttgaagtgttccatctcaagcagaggctgcagatactggagggaagatcaggaacacccaacaaacaaccgctataggctatagtggtcacatttctacatttctgcacatcgatcgttgcaagtttgcaaccccccaccccccaatgtaaatgattgtgtggcgagctttatggtaccatgttagtacatgcgctgatgttgatctgtaatttgcagggtatggtaaaactataaatagctgacggattgaaccatgctaatatgtgtagatattgatctgtaatttgcagggacatggtaaaaaaataaaaatgtgcaagctctacctgaatgtgtcaaa

SEQ ID NO: 99595 - DNA, 2694 bp, Zea Mays
cccgggccgaagccgaagaggacgaaaaggcagcctgctgccgccgccgccgctgttgcagttgcagatcacacacactaccctttccgcgacccttctttctgcatccatccaccctccccctttgtcctgtctctctccctcccacgcacacagacacatcacacagctggagagcaggtgcttctctcacacacacctcggcccacgccgccgttgccagccaagagcagtcgcggggcagcgctgaatcctgattaggtgaaaaagagggtggcgaccatcgttttcgctgctgattctggctgcggctcatctgccccagtgctgtgctcctgcaccgtaccgcaaacccagcccaagactgcaagaggtggcataggctcatgtcctgcccagcggttcgcttcaaatttctgagctgaacgcagctggagagaccgcgcagtcctgaatatgtttggtttctcgcggcgccgggtgaaacttggaaggtcgaagggtgacccaagtgatcctttgaacagctccaggagttctgttggtcccagtaaacacctcagtctgcccaatgggaatgacgcgactatgacgtcagtaagtggccacgcagatgatctttcctaccgttgctcgtccgatacgtttgatccccaaggacgcactttcgatatttcagaaaattggactgtgctgtccacagagggagacaaacctattcctcgtttctatcatgcagcagccattgtaagtagcaagatggtagtgtttggtggtgattctggtaatcgcttattagatgacacaaagatattgaatctagagaagcttacttgggattctgcgcctcctaaagtttgcccatcaccaaacggatgttcgatgaagttgccagcctgcaaaggtcattgcctggttccttggggaaatagtgtcatccttgtcggaggtaaaactgagcctgcttctgatcatttatcagtatggactttcaatacagaaacagagctttggtcacttattgaagccaagggtgatatccctgcagctcgaagcggacacacggtgattagagctggtgctacattgatactttttggcggtgaggacacaaaaggaaagaaacggcatgaccttcacatgtttgatctgaagtcatcaacatggcttccattgaactataaaggcactggaccttctccaagatccaatcatattgctacactgtatgatgatagggtccttttaatttttggaggccactcaaaatctaagacacttaatgacttgtattctttggatttcgatacaatggtttggtcaagagtgaagacccatggtcctcacccatcacctcgagctggttgcagcggaactctctgtggaactaagtggtacatagctggcggcgcaagcaagaaaaaacgacatgctgaaacttgggtttttgatgttctacaatgtaaatggtctgtttgtgtagtgccccctagttcatcgattactacaaaaaaaggttttagcatggttcctttctaccacaaggacaagattgctcttattgcatttggaggaaacaaaaaagagccatgcaacaaggttgaagtattagtggtactgcaaaatgagcattcttttagttggcgctcagccccagaagtggacaccatggtgtatgagtattctccaagcaataaggagcttgctgatcatctccacaaatgtgcccccttgtactctaatagttccatcgcaagttggatcacgcagaagagtgcagcctaggtcagaaactgcagaaaccaatcgatgatgacagatatgatgacgtagatgactcttcttcatgccaagatagcactccaaaagggccctacagcaaaaggacagggcctggttttcagaatggcgcggaaaacatggtgactggaggatcaaaagtgagaaggatagctagatgctcttcagatgttggccagagccacttgtacaacacaaaaatagcagacttgatcagaagaaacaccacgctcgaagaccagcttgcgaccgcactggcaagcaaagatcagctagacaagagcttagcatcggtcattcacagcagaggacagctggagaagatgcttgccaacaaagataaggaggctgagatgctgaaagagaagatagcatgcttagagctggcgcaagaagagtcgaacagcctctcgaacacagtgcacgctgataatgtgcgcctggagcgtgaagtggcgttcctgaaggccgtcacaggcgaaacccagaaggagctgcattccactcgtagagttttagcaggggaacagtcgcgcgcgttccagctccaggttgaagtgttccatctcaagcagaggctgcagatactggagggaagatcaggaacacccaacaaacaaccgctataggctatagtggtcacatttctacatttctgcacatcgatcgttgcaagtttgcaaccccccaccccccaatgtaaatgattgtgtggcgagctttatggtaccatgttagtacatgcgctgatgttgatctgtaatttgcagggtatggtaaaactataaatagctgacggattgaaccatgctaatatgtgtagatattgatctgtaatttgcagggacatggtaaaaaaataaaaatgtgcaagctctacctgaatgtgtcaaa

SEQ ID NO: 99596 - DNA, 2779 bp, Zea Mays
cccgggccgaagccgaagaggacgaaaaggcagcctgctgccgccgccgccgctgttgcagttgcagatcacacacactaccctttccgcgacccttctttctgcatccatccaccctccccctttgtcctgtctctctccctcccacgcacacagacacatcacacagctggagagcaggtgcttctctcacacacacctcggcccacgccgccgttgccagccaagagcagtcgcggggcagcgctgaatcctgattaggtgaaaaagagggtggcgaccatcgttttcgctgctgattctggctgcggctcatctgccccagtgctgtgctcctgcaccgtaccgcaaacccagcccaagactgcaagaggtggcataggctcatgtcctgcccagcggttcgcttcaaatttctgagctgaacgcagctggagagaccgcgcagtcctgaatatgtttggtttctcgcggcgccgggtgaaacttggaaggtcgaagggtgacccaagtgatcctttgaacagctccaggagttctgttggtcccagtaaacacctcagtctgcccaatgggaatgacgcgactatgacgtcagtaagtggccacgcagatgatctttcctaccgttgctcgtccgatacgtttgatccccaaggacgcactttcgatatttcagaaaattggactgtgctgtccacagagggagacaaacctattcctcgtttctatcatgcagcagccattgtaagtagcaagatggtagtgtttggtggtgattctggtaatcgcttattagatgacacaaagatattgaatctagagaagcttacttgggattctgcgcctcctaaagtttgcccatcaccaaacggatgttcgatgaagttgccagcctgcaaaggtcattgcctggttccttggggaaatagtgtcatccttgtcggaggtaaaactgagcctgcttctgatcatttatcagtatggactttcaatacagaaacagagctttggtcacttattgaagccaagggtgatatccctgcagctcgaagcggacacacggtgattagagctggtgctacattgatactttttggcggtgaggacacaaaaggaaagaaacggcatgaccttcacatgtttgatctgaagtcatcaacatggcttccattgaactataaaggcactggaccttctccaagatccaatcatattgctacactgtatgatgatagggtccttttaatttttggaggccactcaaaatctaagacacttaatgacttgtattctttggatttcgatacaatggtttggtcaagagtgaagacccatggtcctcacccatcacctcgagctggttgcagcggaactctctgtggaactaagtggtacatagctggcggcgcaagcaagaaaaaacgacatgctgaaacttgggtttttgatgttctacaatgtaaatggtctgtttgtgtagtgccccctagttcatcgattactacaaaaaaaggttttagcatggttcctttctaccacaaggacaagattgctcttattgcatttggaggaaacaaaaaagagccatgcaacaaggttgaagtattagtggtactgcaaaatgagcattcttttagttggcgctcagccccagaagtggacaccatggtgtatgagtattctccaagcaataaggagcttgctgatcatctccacaaatgtgcccccttgtactctaatagttccatcgcaaggcatagtctcacttctgtgatagaacaccctcctagaagggaacccctctctgagtcattgttgaagcagtccagtttgggcacttcactccatacgcagttggatcacgcagaagagtgcagcctaggtcagaaactgcagaaaccaatcgatgatgacagatatgatgacgtagatgactcttcttcatgccaagatagcactccaaaagggccctacagcaaaaggacagggcctggttttcagaatggcgcggaaaacatggtgactggaggatcaaaagtgagaaggatagctagatgctcttcagatgttggccagagccacttgtacaacacaaaaatagcagacttgatcagaagaaacaccacgctcgaagaccagcttgcgaccgcactggcaagcaaagatcagctagacaagagcttagcatcggtcattcacagcagaggacagctggagaagatgcttgccaacaaagataaggaggctgagatgctgaaagagaagatagcatgcttagagctggcgcaagaagagtcgaacagcctctcgaacacagtgcacgctgataatgtgcgcctggagcgtgaagtggcgttcctgaaggccgtcacaggcgaaacccagaaggagctgcattccactcgtagagttttagcaggggaacagtcgcgcgcgttccagctccaggttgaagtgttccatctcaagcagaggctgcagatactggagggaagatcaggaacacccaacaaacaaccgctataggctatagtggtcacatttctacatttctgcacatcgatcgttgcaagtttgcaaccccccaccccccaatgtaaatgattgtgtggcgagctttatggtaccatgttagtacatgcgctgatgttgatctgtaatttgcagggtatggtaaaactataaatagctgacggattgaaccatgctaatatgtgtagatattgatctgtaatttgcagggacatggtaaaaaaataaaaatgtgcaagctcta

SEQ ID NO: 99597 - DNA, 1046 bp, Zea Mays
cacccactgttttcctcttcctctgatctattggatgaacactataaaagggcatcatatccatcccaaccctgcactcgcaacaaagcacacacagcaatagctagcccacagaaacacacttgagctgatcgagcagcactagctacagctagcaggctagcgctcattgttcgctagctgatcgatcgaccgaaggagccaagaagagacggtggtgccgcgccgtacgtgatggcggagagggtgtcgagactatcgacggagaaggcggtggtgatcttcacgacgagccagtgcccgatgtgccacacggtgtcgagcctcttctccgagctgggcgtgtgcgcggcggtgcacgagctggacaaggacccgcgcggccgcgacatggagcgcgacctcgcccgccgcctcggacgcgcgccgcccgtccccgccgtcttcatcggcggcaggctcgtcggctccaccgacaagatcatgtccctgcacctcgccggcaagctcgtgcccatgctcaagggcgccggcgccatatggctctgaattcgcgattattcgctggatcgaacgtaaacccccggaattttgcacctatatctatatattcccatgcatgcaactaattaaatactcctaatggggggtcttaatataaattattaagagctatatgtacgtacgtatactctcgtgggtatagcctagctatatatagagcgcgtccataaattaaatcgttaagatatatgaagcggcctatatatgtggaccgtccgatcacaacgggtggttaattaggttgagagagaacttttcttttttgatgagagaagttttttgccgctagcagtgctgaaaagggtgccaataaaggaacttgtaaacatcccttttccagtttttcaatgagatatatgaatttttgaagtaccactctctggcactctcctatattcttggattgttcttgcatacgtgtgtatgtatgtatatatatatatatatatatatatatatatatatatatatatatatatata

SEQ ID NO: 99598 - DNA, 450 bp, Zea Mays
acgctataaaagggtttgtcaaagcacagaaccacacacaaaataaacacacagccacacacactactagagtcccggtgttcgctaggcagctcgaccaagaagccaagaaagactgtgatggcgaagagggtgtcgagactatcgaagaaggcagtggtgatcttcacgacgagccagtgcccgatgtgccacacggtgtggagcctcttccaggagctcggtgtgtgcgcggcggtgcacgagctcgacaaggacccccgcggccccgagatggagcgggagctcgctcgccgcctcggacgtgcaccatctgtcgtccccgccgttttcatcagcggcaagctcgtcggctccaccgataagatcatgtcgctgcacctcgacggcaagctcgtgcccatgctcaagggttccggctgggacatatggctctgaatccacccgccc

SEQ ID NO: 99599 - DNA, 1498 bp, Zea Mays
atgacgtcgctactcttccgggatggaccaataacattttatatctggacgccccttatcgccctcgttatttacatctctgccaccctcctctccgccgtcgccgccgccgccggggatggggggagcgcaattccccggcgacaacgacgtcgcggaagtagacgcggcccgcgacggagaggtggaccgccgtgacgtgggcaagatgaagcacgggtgcgagcattaccggcggaggtgcaagatcgtggcaccgtgctgcaaccaggtgttcccctgccgccactgccacaacgaggctacggcttccggagataggcatacaatatgtcgtcaggatgttgaaaaagtagtttgcctactctgtgaaacaaaacagccggtgtcacaagtgtgcataagctgtggagtcaatatgggagagtacttttgtgatatatgcaaattttatgatgatgatacagacaaagggcagtaccattgcatcgattgtggcatatgcagggttggtggcaaggaaaacttcttccactgtgtgaagtgtggatcctgctattctgttatactccgtgataaccatcagtgtgtggagaactcaatgaggcagaattgcccaatctgttatgagtatctatttgactcattacaaggaacaagagttcttaactgtggacacacaatgcacttgacatgttttgaagaaatggtggcgcataacaaatacacttgtccaatatgctctaaaacagctcttgatttgacacatcattgggaaatgttggatcaagagatcgaagccacgatcatgcctcttgtgtatcgctacaagatttgggtgctttgcaacgattgcaacaaggtctcagaggtgaactttcacgtgattggccacaagtgcagccactgcagatcgtacaacacccgaacaacatcgcgccctgcagatttatccggaagcagctcaccttcaacagactcatccgacaacaacatatagagaagaaaccattgacagagccaatatgattgaagaaccggaggaggaaacattgtttcggggcgtgcgtgcttgccaaacttgaagactcccagccgtttattggccctcatcttgtctagattcagttcattccatgagtctttgctgttgtggcaacttccagcttgcgcatcgctgggtcaacaacccacatggccggcgtagctgtccctttgaatcttgttcgcagccgtgattttatcactgtggatgaaacgtaatcacatacttactgtaatctactatggttgaagatgtgtgcccccctgactcatgccttgtgtgcttgtgctgaactgtttatgaattcccatgctgttccgtaacactatattgccatttgtgtttccttatctgtcaagtaccgccaagtgtgcggtgaaattgtaattatttgcaatgaatagaatcttatatctatacctaataataaagactcaacatttctacggtgtt

SEQ ID NO: 99600 - DNA, 1608 bp, Zea Mays
aggaaactaatttctctgctgcaatggcattggaagaagggcacagttagcaatcaaagcggtgggcctccacgcctccatgtcccatgacgtcgctactcttccgggatggaccaataacattttatatctggacgccccttatcgccctcgttatttacatctctgccaccctcctctccgccgtcgccgccgccgccggggatggggggagcgcaattccccggcgacaacgacgtcgcggaagtagacgcggcccgcgacggagaggtggaccgccgtgacgtgggcaagatgaagcacgggtgcgagcattaccggcggaggtgcaagatcgtggcaccgtgctgcaaccaggtgttcccctgccgccactgccacaacgaggctacggcttccggagataggcatacaatatgtcgtcaggatgttgaaaaagtagtttgcctactctgtgaaacaaaacagccggtgtcacaagtgtgcataagctgtggagtcaatatgggagagtacttttgtgatatatgcaaattttatgatgatgatacagacaaagggcagtaccattgcatcgattgtggcatatgcaggtgagcacaaaagagactttcaccaatatataaattgagcttatttctgatcatgtatccactcaattcaaccagggttggtggcaaggaaaacttcttccactgtgtgaagtgtggatcctgctattctgttatactccgtgataaccatcagtgtgtggagaactcaatgaggcagaattgcccaatctgttatgagtatctatttgactcattacaaggaacaagagttcttaactgtggacacacaatgcacttgacatgttttgaagaaatggtggcgcataacaaatacacttgtccaatatgctctaaaacagctcttgatttgacacatcattgggaaatgttggatcaagagatcgaagccacgatcatgcctcttgtgtatcgctacaagatttgggtgctttgcaacgattgcaacaaggtctcagaggtgaactttcacgtgattggccacaagtgcagccactgcagatcgtacaacacccgaacaacatcgcgccctgcagatttatccggaagcagctcaccttcaacagactcatccgacaacaacatatagagaagaaaccattgacagagccaatatgattgaagaaccggaggaggaaacattgtttcggggcgtgcgtgcttgccaaacttgaagactcccagccgtttattggccctcatcttgtctagattcagttcattccatgagtctttgctgttgtggcaacttccagcttgcgcatcgctgggtcaacaacccacatggccggcgtagctgtccctttgaatcttgttcgcagccgtgattttatcactgtggatgaaacgtaatcacatacttactgtaatctactatggttgaagatgtgtgcccccctgactcatgccttgtgtgcttgtgctgaactgtttatgaattcccatgctgttccgtaacactatattgccatttgtgtttccttatctgtcaagtaccgccaagtgtgcggtgaaattgtaattatttgcaatgaat

SEQ ID NO: 99601 - DNA, 774 bp, Zea Mays
aggaaactaatttctctgctgcaatggcattggaagaagggcacagttagcaatcaaagcggtgggcctccacgcctccatgtcccatgacgtcgctactcttccgggatggaccaataacattttatatctggacgccccttatcgccctcgttatttacatctctgccaccctcctctccgccgtcgccgccgccgccggggatggggggagcgcaattccccggcgacaacgacgtcgcggaagtagacgcggcccgcgacggagaggtggaccgccgtgacgtgggcaagatgaagcacgggtgcgagcattaccggcggaggtgcaagatcgtggcaccgtgctgcaaccaggtgttcccctgccgccactgccacaacgaggctacggcttccggagataggcatacaatatgtcgtcaggatgttgaaaaagtagtttgcctactctgtgaaacaaaacagccggtgtcacaagtgtgcataagctgtggagtcaatatgggagagtacttttgtgatatatgcaaattttatgatgatgatacagacaaagggcagtaccattgcatcgattgtggcatatgcagggttggtggcaaggaaaacttcttccactgtgtgaagtgtggtatgctttgcttcaaccaatttgattatgtgtttgagttgaatgttcttctataatgcacggtggtgattgaatgctactcctgttagagatatgtgtgtggttgtatatttccactgtataggggttcatttgcatgt

SEQ ID NO: 99602 - DNA, 2247 bp, Zea Mays
acctggagcgcgcgcttccctcggaaaaaaatccagacaaaacaatctcgaaatccagttaaccaatcaaccccacgccgccgccggctgcgcctcgttggcctcgccccacgtcacatgccaaattccgcggcgagaggaagccccgagcaggaggccacgcgacgagcaggcgggacgcgcgggaggaagggagacacagaggagggagcgagaacctccggcgtccggcctcgtcggctccccagcgatcaccggcggcgagggggcgcggcgatcggacggagcaggggggcggagggcggagccgagcgagcgccaagcgttgcagatttgggggccgggcctcgggctcgcccggttcttgtagtgaccaaaccggcccgtgaaccctgtgcccgggcccgacccgcggctgaaccagcacgcggcagaggcatctcgtaagcagcagcagagagctgaaattgagagaggcgaggggcctttgcggcggctgcggagacggcgatggcaggcgcggaggggagaggtccgaggcggagccgcgtggcgttcgtgctggtggacgggatcggggacgtgagcgttccgtcgctgggcgggcgtacgccactggaggcggcgtgcacgccgcggctggacgcggtggcggcggtcggggtgaccgggctcatggaccccgtggagccggggctcgcctgcggcagcgatacggcgcacctatcgctcctcgggtacgaccctcgggtgtactaccgcggccgcggcgcgttcgagtccatgggcgccgggctcgccatggcgcccggcgacatcgccttcaagtcaaacttcgctacactggatgagagcactggagttatcatcagcaggagggcggatcggcattttgaagaggaaggccctatcctctgtgcggcgttggatgggatgaggcttccgtcatttcctgaatatgaaattagagtaagatatgctactgagcacagatgtggtgtggttgtcaaaggaccaaagctgagtgggaacatttctggaaccgatcccttgaaggacaaccgcttgcatctgaaggctgaaccgttggatgactcgcaagaagctaaaaacagtgcagctgtgatcaatgagctttctaaagagataacgcacatactggtttctcaccccatcaatgcacagcgtgcagctgaggggaagaacatcgcaaacgttgtgctgttgcgaggctgtggtattcggattgaggtgcctgcctttgaaaccaagcatggacttgcaccttgcatggttgctcctactaagatcatagctggcttggggttgtcactggggattgatatccttgaagcacctggagcaactggagattaccgtactctcttaacttctaaagctaaagctatagccaaggcattatcttcccctatgggtacaccacctcgtgtttttgtgcctggagaggatgaatacaaagctggaaaagaaaatggatatgactttgggttcctgcacataaaggccattgatgatgctggtcatgataaggctgtcaagttaaaggtacggggtctagaagctgttgatcgagcttttggtcagcttgcaaggcttctttgggaagctgaaaatgccggacactaccagtactttctgtgtgtcactggagaccattctactcctgttgaatatggtgaccatagcttcgaacccgtcccatttgcaatatgcagactgagagattatgcaggagccgttggggttgataatattataaatacacagcttgatgctttccccctcccttcagtaaaatccggagaagatttgcttgacaatatagaatcacttgatcacaagcctgatcaacttaaagctttcagtggtgacactgtgtgtgagttcaacgagattgccactgcgaggggctgccttggacgattccctgggagtgagatgatgggcattattaaaaagtttatcaaggcgaagaatgattaatgctggttgaagtgctaaccttttgcgtgatctgtagaccataaggcttttctatgtaataaacttgttggcgcttgtttggacaaacactaaccatccctaggtcgccctcgtagtgagtccggaccttgaagatgatccctaggtttcgcccacagatggtcgagaggagggagataataaataatatgtaagacaaataacactacctcgaatgtgatcttgaaagaaaaccttggaacc

SEQ ID NO: 99603 - DNA, 880 bp, Zea Mays
gccaagacaaagatcaaacgaacccacgcgtccccttccctctcgtgtcgtgcagaagcagaaacccacccgtcgttccgccatggctggagaaggaggaggacggcttccgctcgacctgtccctggccaccgcggggccgtcggctggcgagcggcggccgagggcgcggccgaaccggcgcaccctgtcctcgctctatgctgagctgggcgcgatgctccccaacctccccatcgaccggccggcgagcaaggaggagatcgtggacgccgcggcggcgcgcgtgaaggtcctggaggacacggtggccgtgctggagacgtaccactcggtgcgcagccccctccacggggccggcgccggcgccggcgccgctgctgcccggcggcccgaggtgtccgtggccgtcggcgcggtgtgcttctgcgcgcggctgccggcgcggagccccggctcgctgacgcgcgtgctggaggcgttccaccgccgcggggtggaggtcctcgtggccacggtggggcctcacggccacggcggcgccgccgtggtcacggtcaccgctgccgccgcgccgcccgaggtcctgcagatgatcagggccgacatcaccggcatctgctgatccatgggtaatcaatggcttctgctgctcgcggcgattgcaccttttgctacctctcatccgacggccatggcctccaactttttttttggtacgaaatcagctagataggtgaaatggctagtgctgtaataacaccggcaaaagcagacatttccgattctgtagcttcaatctgcggcgccagcgttatccaacgatagagatgttcttgtttccgtatcttttggcatcttttatttgcatttaacgaaa

SEQ ID NO: 99604 - DNA, 735 bp, Zea Mays
atgggcgccaaatctgaggctgtcgtcgcggctgggaaggcgaagaaaccgccggcggccaattcgaccgcggatgccggtgccaagccgaccaaatcaggcaagaaggcaccggtgattgccgacgccaaggcaaaagccaatgcgaccgtcgtcagcaaggagtcggcggcggaggttgaggttgaggaggacgtgcacttgaaggcgtacctgtccgcggtgaacgctgggatcaccgacggcgtgcgcccgatcctcggcggccggtgggcggcggtgctgctgccgctcttcatgctcaccgtgctggtgtggcgcatgggcccgtacctgccgctcctccaccacgtgctgctgctggagcaggcatacctcgccatctactctgcgacgctcgcgctcaccgcgaccgccacggggctggagccgccgcgcttcatccacgcggcctcccccgccgcctacgcctggacgcatgctgcacagtcactcgacttcatggcctacctcgtgctccagatgatggtggtcagcctcgccgccggcgtgcactgctatgtcgccatcttccaccgcgccgcggcaggggccgcaccccgcgccaactggcgcgtgtacgccgtgtacgcggcctgcttcgcaatcgtgtgcgcatgcacacgcgccgagaggaggaagaaggcctaccttgcgggcaccgaccgcgtcgccgaggagtggaagaagagctga

SEQ ID NO: 99605 - DNA, 339 bp, Zea Mays
aagggatattggggaagtaatcttctatttcttaattgccaaatgttcgaatacaagagataaatatgcattatgccttctaacaaacatagatgaaaaatctcctcaaattgagacaatggtttctggctgcagtgactcggtctccatcaatgatttgttgcaactcaatgttcagcaccttgagatagtggtttctagctgcggtgactcagtctccatcgatgatttgttgcaactcaatgttcagcaccagattaaattgactttcgctaacatcgttcctggagatgatgacttggtgaggctttctcttccaagaactggtgtagaattcaa

SEQ ID NO: 99606 - DNA, 2515 bp, Zea Mays
taataattgtcttctcccacttcgaggcggctagggccagcgcatccttctcctcttctgtccaggcggcgtctctgtcgatcaattgtgcgccgccttcgcctgcatagcccggagagagccgtcatccttacctgcgccgaccgacgcctctgcagcttctccaggggttgcccgttgaggaggggttaggcttcgtcatgtcgaagtcggacctggatgatctgcttcttcaggctgccggccggacggggaagaaccagtcccggccgagcaatccgcggtggaactctggggggagcggctccgacggcttcgacgacgacgacgacgacgactctgacgccgcgccgacctactcgaggaagaagccttcgtcgcaggtaccgctcaagaagcggcacaagccggagaagggcggccggcgtggcggtggtgggtggaacgacgaggatgatgaggacgaggatgggcgtcggagtggcggggaggactcggacagcgccccttcagtggggagtgacctatacaaggatgaagacgacaaggagcgtctggagaacatgtctgagttgcaaagggagttgatcctagctgagcggggcacccgcctcgacgactacaagctcaagcagcgggcacgtgcgtcctcctccaagacggacaaggtgggtgcgccaaaggatagcagcccacccccaccgcctagccggatgcggtcttctacccgaactgacaagtctgggtccgccgctaagagcgcgctggacgagctgcgggcaaagcagcggatgcggcaacaagctccggaggcacgcaggatcacggacctactcccacatagtggctcatccattaggcgcagggctgggagcccaccaagtgatgggagcaacgatggcaataacagggggaggatgaatgaccatgggaggattgctggtgatggcagggatgatgaatttgatgaatcgccgagtaggcttgatccactcaagtttgatgatgtgaagagtattaccctcaggaggtcaaaactggtgaaatggttcatggagccattctttgatgatctaatttctggttgttttgtgcggctaggtattggtaagacaaagaatgggacccccagttacaggctgtgcatagtgaggaacgtggatgcaagcgatccagatcggaattacaaactggaaaactactcgacatgcaaatatctcaatgttgtgtgggatagtgaggctaatgctgctcggtggcagatgactcaggtatcggactccccacccaacgaagaagagttcaaggactggctgcaagcggcagagaagaatggtgcacgcataccgactcggcaggaagtcctggataagaaagaagccattcagaatgcctataactttgtgtattcagcagcaactgtacaacagatgctgcaagagaaatcagctgtgagacgacctatcaatattgctgctgagaaggatcggttgaggagtgaattggagatggctcttagccgtaggaacgaacatgaagctgagaggattcgtacgaagctgaaaaatctgcaaaacagggcacaaccagtgtcaaaagataataaggctgcaaagttggaggctatgaaccggaagaaccgcgctgataacttcaagaacgcttcagaactgaaacctgtaaatacatctttgaaggcaggagaagctggttatgaccctttctcgaggaggtggacaaggtcaagaaattattatgcatcgaagccaggaggaaataatgttgaagaaactgccaatgggtccagtagtaatgtagcgcctagcaatgaagatacaaagagcaaggctcaaactggtacagcagccacaacagcagctcaagtggcagcagctgatgccgggaagctcattgataccaatgcaccagtggatctgggaacagaatcaaatatgctgcatacatttgagcttcctatatcattgtctgctctgcaagaatttggtggagccaagggcctgtttgatggttacatggcaaggaggcagaagatagaagctacaatggggtacaaagtgcctgacaacgatggaaggaggcatgctttaaccctgagtgtgagtgattacaaaaggcgacggggtctcctctgaagtgtatctgtgattgtgctgggtgctcagcggattcaaatatctgcctggcttcagcgcctctgcattgctgtgacaattgtccagatcatctgcattttgccttatcttcctataagtaacataaaacatgcgataaaacatgcggagtatacaatttctttcataaatattacctgatgtatgactgattatgttactgacatcatgtttatatccgtggattgtgtcgttgtcatcatcatcatcgtatccttgttagctgcaaaaactggattccataattagttcaattaaaataaatgcagctttcatttttcggattcatgttttacatggttggatgtgtgtgtgatcatctt

SEQ ID NO: 99607 - DNA, 203 bp, Zea Mays
gatctgagcgcggaatgaatgaacgattggtgattctgcaggtgctgaaggcgagcacggaggaagatggggctcatgttcgggaagctcttcagtcggctctttgccaagaaggagatgcgaatcctcatggtcggtctcaacgccaccggtaaaaccaccatcctctaggggagatcatcacaaccatccccaccatcggt

SEQ ID NO: 99608 - DNA, 471 bp, Zea Mays
atgagcttctcgataaggtccgcagcgtcctgcactgttgcgatgtcctgtgcgcttgtttcgtcgactgttatgttgaacgcctcctcgaggcccatcacaatctcgaccttatccagcgaatcagcgccaagttcagcgaattttgattcggcagtgatggcggtcccatcgggaagagccagctgctccttcactatactgcaaaccttgtccactgtctctttcttagccgaacagcaaatcttaaacccaagagacctttgtcttgagcggatggatacagaagtcatcctgtggctctggaaggaaaccgaggtccagcttggaatcacatttgtgacctggcgccgggcggcggccggcgagaaggaggcggcgagagagtgcgccatgctcgctctcggatcgggggtgacggcgggagtaagaaggctagctgaagcttgtgggagtggaaggcggccgtga

SEQ ID NO: 99609 - DNA, 213 bp, Zea Mays
atggcggggttggaggagcggctgctgctgcaatttctgggcgtcacggctgggagcagggggctcggcctccatggggaagaaggcagggcagagatgaggcgtcgagctgctgctgctgggcggccatggagcaggaaggtggaggtcggccggaggtggaagaaggacgccgagcacaggggctggaggtcgcagtggcgctggccgtag

SEQ ID NO: 99610 - DNA, 1866 bp, Zea Mays
caccaaggcaccaacccgacgcaaagccgccggctttccccgatggcgacggcgatgtcagtttcggcggtgtccccgcccgccgcggcggtcacgcggccgcggacgatggtctgcgtgccggcgacggcgcgggcgccgcgggagatggcggcggagctggccgccgccgccgcgctcggcgctgacgtggcggagcttcgcctcgactgcctcgccgggttcgcgccgcgcagggacctgcccgtcatcctcgccaagccccgcccgctccccgccctcgtcacctacaggcccaagtgggaaggaggcgaatacgaaggcgatgacgaatcacggtttgaggctctgctattggcaatggagctgggagctgaatatgtggatgtcgagcttaaggtggctgacaaatttatgaaacttatttctgggaggaaacctgataactgtaaacttatagtttcatcccacaactatgagaccactccatcgtccgaggaacttgcaaatttggtggctcagattcaagcaacgggggctgatatcgtgaaaatagctacaaccgctactgaaattgttgatgtggcaaaaatgtttcaaatacttgttcactgccaggaaaagcaggtgccaatcattgggctggtgatgaacgacagaggttttatttctcgggttctttgcccaaaatatggtggattccttacttttgggtcactcaagaaaggaaaagagtctgcacctgcacagccaactgctgcagacttgataaatctgtacaatattaggcagatagggccagacactaaggtctttggtataattggtaaaccagttggccatagcaaaagcccaattttgcataatgaagctttcagatctgtgggtttcaacgctgtgtatgtgccatttttggtggatgacttggctaaatttcttgatacatactcttcaccagactttgctggcttcagttgcacaattccacacaaagaagctgctgttaggtgctgtgacgaggtcgatcccgttgccagggacattggagctgttaacacaattgttagaagacctgatggaaagcttgttggctataatactgactatgttggtgctatatctgctattgaggatggaataaaagcatcagaatcagaaccaacagatccagacaaatcaccactggctggaaggctttttgttgttataggggctggtggtgcgggaaaagcactagcatatggggcaaaagagaaaggagcaagagttgtaattgcaaaccgtacctttgcacgagcacaagaacttgccaacttaattggtgggcctgcattgactcttgcggatttggaaaactaccatccagaggaagggatgattcttgcaaatacaacagccattggaatgcatccaaatgtgaatgaaactcctctatctaagcaagcactcagatcttatgctgttgtgtttgatgcggtctacacaccaaaagagaccagacttctccgagaagctgcagaatgtggagccacagttgttagtggtctggagatgtttatacgccaagctatgggccagtttgagcatttcacgggcatgccagtggacgattacaaattccgagcaattgcaagttcattggacaatcctaacaccatgaagcctcgtctgtgagagattcatccatgcccacaaacttccttgtttttcctttttagattcggattcagtgatcagtttgcctctcagccattgtaaattaatttgatgttccgagctgaaacattttggtgtgccttatttgtatcagcatgaacagcagtcatcgtgggtttgaatcagtctcttagcatttgcgttccaaga

SEQ ID NO: 99611 - DNA, 1914 bp, Zea Mays
caccaaggcaccaacccgacgcaaagccgccggctttccccgatggcgacggcgatgtcagtttcggcggtgtccccgcccgccgcggcggtcacgcggccgcggacgatggtctgcgtgccggcgacggcgcgggcgccgcgggagatggcggcggagctggccgccgccgccgcgctcggcgctgacgtggcggagcttcgcctcgactgcctcgccgggttcgcgccgcgcagggacctgcccgtcatcctcgccaagccccgcccgctccccgccctcgtcacctacaggcccaagtgggaaggaggcgaatacgaaggcgatgacgaatcacggtttgaggctctgctattggcaatggagctgggagctgaatatgtggatgtcgagcttaaggtggctgacaaatttatgaaacttatttctgggaggaaacctgataactgtaaacttatagtttcatcccacaactatgagaccactccatcgtccgaggaacttgcaaatttggtggctcagattcaagcaacgggggctgatatcgtgaaaatagctacaaccgctactgaaattgttgatgtggcaaaaatgtttcaaatacttgttcactgccaggaaaagcaggtgccaatcattgggctggtgatgaacgacagaggttttatttctcgggttctttgcccaaaatatggtggattccttacttttgggtcactcaagaaaggaaaagagtctgcacctgcacagccaactgctgcagacttgataaatctgtacaatattaggcagatagggccagacactaaggtctttggtataattggtaaaccagttggccatagcaaaagcccaattttgcataatgaagctttcagatctgtgggtttcaacgctgtgtatgtgccatttttggtggatgacttggctaaatttcttgatacatactcttcaccagactttgctggcttcagttgcacaattccacacaaagaagctgctgttaggtgctgtgacgaggtcgatcccgttgccagggacattggagctgttaacacaattgttagaagacctgatggaaagcttgttggctataatactgactatgttggtgctatatctgctattgaggatggaataaaagcatcagaatcagaaccaacagatccagacaaatcaccactggctggaaggctttttgttgttataggggctggtggtgcgggaaaagcactagcatatggggcaaaagagaaaggagcaagagttgtaattgcaaaccgtacctttgcacgagcacaagaacttgccaacttaattggtgggcctgcattgactcttgcggatttggaaaactaccatccagaggaagggatgattcttgcaaatacaacagccattggaatgcatccaaatgtgaatgaaactcctctatctaagcaagcactcagatcttatgctgttgtgtttgatgcggtctacacaccaaaagagaccagacttctccgagaagctgcagaatgtggagccacagttgttagtggtctggagatgtttatacgccaagctatgggccagtttgagcatttcacgggcatgccagctccagatagcttgatgcgtgatattgttctgacaaagacatagtgagtggacgattacaaattccgagcaattgcaagttcattggacaatcctaacaccatgaagcctcgtctgtgagagattcatccatgcccacaaacttccttgtttttcctttttagattcggattcagtgatcagtttgcctctcagccattgtaaattaatttgatgttccgagctgaaacattttggtgtgccttatttgtatcagcatgaacagcagtcatcgtgggtttgaatcagtctcttagcatttgcgttccaaga

SEQ ID NO: 99612 - DNA, 2326 bp, Zea Mays
caccaaggcaccaacccgacgcaaagccgccggctttccccgatggcgacggcgatgtcagtttcggcggtgtccccgcccgccgcggcggtcacgcggccgcggacgatggtctgcgtgccggcgacggcgcgggcgccgcgggagatggcggcggagctggccgccgccgccgcgctcggcgctgacgtggcggagcttcgcctcgactgcctcgccgggttcgcgccgcgcagggacctgcccgtcatcctcgccaagccccgcccgctccccgccctcgtcacctacaggcccaagtgggaaggaggcgaatacgaaggcgatgacgaatcacggtttgaggctctgctattggcaatggagctgggagctgaatatgtggatgtcgagcttaaggtggctgacaaatttatgaaacttatttctgggaggaaacctgataactgtaaacttatagtttcatcccacaactatgagaccactccatcgtccgaggaacttgcaaatttggtggctcagattcaagcaacgggggctgatatcgtgaaaatagctacaaccgctactgaaattgttgatgtggcaaaaatgtttcaaatacttgttcactgccaggaaaagcaggtgccaatcattgggctggtgatgaacgacagaggttttatttctcgggttctttgcccaaaatatggtggattccttacttttgggtcactcaagaaaggaaaagagtctgcacctgcacagccaactgctgcagacttgataaatctgtacaatattaggcagatagggccagacactaaggtctttggtataattggtaaaccagttggccatagcaaaagcccaattttgcataatgaagctttcagatctgtgggtttcaacgctgtgtatgtgccatttttggtggatgacttggctaaatttcttgatacatactcttcaccagactttgctggcttcagttgcacaattccacacaaagaagctgctgttaggtgctgtgacgaggtcgatcccgttgccagggacattggagctgttaacacaattgttagaagacctgatggaaagcttgttggctataatactgactatgttggtgctatatctgctattgaggatggaataaaagcatcagaatcagaaccaacagatccagacaaatcaccactggctggaaggctttttgttgttataggggctggtggtgcgggaaaagcactagcatatggggcaaaagagaaaggagcaagagttgtaattgcaaaccgtacctttgcacgagcacaagaacttgccaacttaattggtgggcctgcattgactcttgcggatttggaaaactaccatccagaggaagggatgattcttgcaaatacaacagccattggaatgcatccaaatgtgaatgaaactcctctatctaagcaagcactcagatcttatgctgttgtgtttgatgcggtctacacaccaaaagagaccagacttctccgagaagctgcagaatgtggagccacagttgttagtggtctggagatgtttatacgccaagctatgggccagtttgagcatttcacgggcatgccagctccagatagcttgatgcgtgatattgttctgacaaagacatagtgaggtttgtccaaagagcaagcttcccttccatcgtaatttctgcgcaattgattccagttgtgtcccctcctcgtccttcccgcatcttcctcaacctgtagaatccacatttttttttatctcaggtgtggacataggtttcatcttataacatgtttcttattacctaccaagattcagtttcattctctttgaagtatttgaatgttgtttattcagcaaacaatacaccatttcaacaatgtttaagagttcttactcctctcatcaaggctgcaaggattgttagatctttgatttgtgcaaacagtgtgtgacgcagtcagttttacgtggccaaagtatgcgcatccactgactaatcataatgaatggcagctacttctacttaatagttcttcccttactttcagtggacgattacaaattccgagcaattgcaagttcattggacaatcctaacaccatgaagcctcgtctgtgagagattcatccatgcccacaaacttccttgtttttcctttttagattcggattcagtgatcagtttgcctctcagccattgtaaattaatttgatgttccgagctgaaacattttggtgtgccttatttgtatcagcatgaacagcagtcatcgtgggtttgaatcagtctcttagcatttgcgttccaaga

SEQ ID NO: 99613 - DNA, 303 bp, Zea Mays
atgcagagctcagcttcttggttgccatgtcccgtggaggtcctctgccagcatcacctggtgctgatttggtctctctaccgcgcccagtactgggtgctcgccgatggctcccatggcaagtttagattggagcacgatgatgccagccctgcacttggtgatgtgccaccgctactactgccaatagagaatggagtcagtggtggtccgtcagagaatggactcgtcgttggcctgctggagagttgtgtcgatgcccctgcccctgtactgcttcagtcatatcctcttggaccctaa

SEQ ID NO: 99614 - DNA, 2304 bp, Zea Mays
tcttccccaccgacactccatctctccctgcatccacactccatcccttgtctctccccacgtttcttccctctggctcatggagtcatggacactttatcctcagacctcagctgaggcagcttcaggcttcagcaggtctgcaggtgtatatatattcctctgctccgggactggtgcacagcaaagcgtcttccatttctcagaagagtgtgtgacaacagcggcaaccgacagacatgtcttcgccgacatcgccttggtttgcggatctcttcacagatgacagggtgaggaccctatcgcaccaggtctccacacttggggacagggtgtgggaactggagcacaaaattacccagctgatgggcgagaaggccaagctggagaagcaactggaggaggcaaaggcgatctcaagccacaaggaagaggtggggagaagcttgaaggctgaaaatgataagcttcagtcggaggttttggttgcggaggaaaagtgtagcaagtctgcagcggaggttgagaggctgacgaaggaattaggcgcgctggcggaggcaaaggaggcagctgccaaggaattcaacgacgagagagagaaaatcacgctagaatcggaggatctcaagatgaggctggaggaaatgctggccatcaaggatttgacagagagcgagaatgacaagcttcggtccgaggctttgatcgcagctgaaaagcaaaacatgtctgaagcagagattgagaggctcaagaaggaactgagtgggttgttggaggcgaaggaggcggctgccaaggctttcgacgtacaaaaagcagaaatcaccaatgaattagaggaactacagaggaagctgaaggaaatcgaagctaataaggatttagtggagggagaaaacagtaagcttcagtctgagattctcacagcacaggagaaatatagacagtctgaagcagaggttaagtgcattaaacaagtagtgtgttcagtggtggaggcgaaggaggcagctgcaagggcatctgaagctgagaaggcagaaatcatggaggaaatggacaaccttaagaggacaatcgaggagatcaaggccaacagggatttggtagagagtcagaaccaggagcttcggtcaaagatttcgagtgcagagcaagagcgtagcctatttgaaggagagattaagagcgtcaggatggaattgggggcagtagaggaggccaagcagatccttacgagggagttcgatgctgagaaggcagagatcctgaaggaactggatgaccttgagaagaagctagaggaattgcagaccaacaagggtttgctggaggctgaaaacgacaagcttcagctggaggttttgaccgcacagcacaaacaaagcatgtccgaagcagaggctgagagccttaagatggaactgggagcattggtggaggcaaaggaggcggctacaaaagcatttggtgccgagaaagcaaagaccacgaaggaactggaggatcttaagaggaaggtggaggaaatccaaaccaagaaggatctggtggagggcgaaaaggataagctccgtttggagattttaatagcggagcagaggcatgccatggctgaattagaggttaagcgcctcaagatggacttggctgcatcggcagaggcgagggagacagttgtgaggtcatgtgacgctgagaaggccaagttcatggcagaaatagagaacctcaggaggaagatagaggaaatccacgccagcaaggaagcggccgagaaagcagcgcgcaacaaagatgcagaggctgacaggctgaaggatgagctggcgaggatccggctctctgtgtcacagctgcaagcgtcctgcgacgaacttgatgccaagcagtcgcgcctgaacgacgagaagaactctgtccagaaagcactagtgtccgagaaggtcgaaggtaacaagctcaagttaaaaatcgaggaactcgagaatcacattgctggcaaggacggtgagaaagggaaactgaaggcggcgttggaggaaaagatgactgagatcaatgctctcagcaaagacaacgcgatgctacatcgcacaattctcgaggcgcaagagaagaataaaggtagcattttatcgttcttgtcaccgtgcggctccaagtaacttggttgtaatgtgttgcattactaatgcaatggtgaaggtaccatgcaatgaaataaaaatttcagtttgctctgtgacatgtgatgtcttcttgttacattcattgggatgtagtttgtggcgcctc

SEQ ID NO: 99615 - DNA, 432 bp, Zea Mays
atggcacttgcagcattccgagcagcacgtggtgttgcagttaagcatgaagcgaaactgtttctggactggcatttggcaaatctggtgtatgctgttgctgcctcccttactgatctctccatggccttatgggatctgtatgatccatacgaagtgagcagagaccactgctatgttcctgagggcagttctcattttgttcgtgcatttactaatggaatcttgatagtctacgagcagaacgtaccaaggaaacaatatggaggtgatgagttgagggtgcacggtgataagatggcattccatgatgatatggtcctatgtacggtccctcttggcatgcttcttctttggataactagaccttgggattcaggcattttgtctgcattgcatgtcagtgttgcttggggacaagcaacgctttga

SEQ ID NO: 99616 - DNA, 1398 bp, Zea Mays
aacacagcagtaacattcacagtccgcaggccgcagcagctgaatttcgaaggagactgtttcataaacaggagccaggcaccggactttccaggaggataccacctcccgaacatggtgcgtcgacgacccgccaccggggcagccccgagaccccacctcgccgccgtcggtcgcgggctgctcctcgcgtccgtcctcgcggccgctgcctcctccctcccagtagccgagtcgtcctgcccgcgagacaactcactggtgagagacataagccgaatgcagcagcgcaactacgggagggaaggattctcgcatataactgtcacaggtgctcttgctcacgggacgaaggaggtggaagtgtggctacaaacatttggtccaggtcaaaggaccccaatccacaggcattcttgtgaagaggttttcattgtcctcaaggggaaaggcacgctcttactcgggtcgagctcgctgaagtacccaggacagccgcaggaagttcctgtctttcagaataccacattttcgatccctgtaaatgatccacatcaggtaaaagagaagggttgtcatttatatgcacttttactttgtctgatacagtgatatctcgtgtcctgatttgcacaactctgctgattatatggtactgtacctttgctagttttaagatattgttggagcttgggtagggcctatttgttagtgtctatcatctttctctttcttgcaggtctggaattctaatgagcacgaagatttgcaagttcttgtgatcatatcgcgcccaccggtcaagatatttatatacgatgattggagtatgcctcatacagctgcaaagctgaaattcccctacttctgggatgaggactgcttgccagcaccaaaagatgaactctaggttaagtggttcctgcaatttgtcagcttcgtgttcatccacaatcctggtggactacgactcacatctacaagttgaaaaccattagtgtactcttcatgtgtagttttgtgttgtgactctgggaaatccatattgacaacgtttataaaattaagcacttctggagctgagctactgtggtctatattctagatttttgaagcagtattggtttgtttcgacaaaagatttctgctctttattgtgatatcccagtgttaatcatatgggttttaagtaatcattcattctaagcattcaaatgtagggcttccgtatagtattattgtattaagaaaaacctttatgaacaggttttatgtcaaatagataagtgaacctgaaattctgaagtaatctctactatataaagtaccagttttcataattctatagtcgccgtgcatcaatccttctcatctcgctttatataaaaataagataaa

SEQ ID NO: 99617 - DNA, 1235 bp, Zea Mays
aacacagcagtaacattcacagtccgcaggccgcagcagctgaatttcgaaggagactgtttcataaacaggagccaggcaccggactttccaggaggataccacctcccgaacatggtgcgtcgacgacccgccaccggggcagccccgagaccccacctcgccgccgtcggtcgcgggctgctcctcgcgtccgtcctcgcggccgctgcctcctccctcccagtagccgagtcgtcctgcccgcgagacaactcactggtgagagacataagccgaatgcagcagcgcaactacgggagggaaggattctcgcatataactgtcacaggtgctcttgctcacgggacgaaggaggtggaagtgtggctacaaacatttggtccaggtcaaaggaccccaatccacaggcattcttgtgaagaggttttcattgtcctcaaggggaaaggcacgctcttactcgggtcgagctcgctgaagtacccaggacagccgcaggaagttcctgtctttcagaataccacattttcgatccctgtaaatgatccacatcaggtctggaattctaatgagcacgaagatttgcaagttcttgtgatcatatcgcgcccaccggtcaagattggcatctcctgttacagatttatatacgatgattggagtatgcctcatacagctgcaaagctgaaattcccctacttctgggatgaggactgcttgccagcaccaaaagatgaactctaggttaagtggttcctgcaatttgtcagcttcgtgttcatccacaatcctggtggactacgactcacatctacaagttgaaaaccattagtgtactcttcatgtgtagttttgtgttgtgactctgggaaatccatattgacaacgtttataaaattaagcacttctggagctgagctactgtggtctatattctagatttttgaagcagtattggtttgtttcgacaaaagatttctgctctttattgtgatatcccagtgttaatcatatgggttttaagtaatcattcattctaagcattcaaatgtagggcttccgtatagtattattgtattaagaaaaacctttatgaacaggttttatgtcaaatagataagtgaacctgaaattctgaagtaatctctactatataaagtaccagttttcataattctatagtcgccgtgcatcaatccttctcatctcgctttatataaaaataagataaa

SEQ ID NO: 99618 - DNA, 1217 bp, Zea Mays
aacacagcagtaacattcacagtccgcaggccgcagcagctgaatttcgaaggagactgtttcataaacaggagccaggcaccggactttccaggaggataccacctcccgaacatggtgcgtcgacgacccgccaccggggcagccccgagaccccacctcgccgccgtcggtcgcgggctgctcctcgcgtccgtcctcgcggccgctgcctcctccctcccagtagccgagtcgtcctgcccgcgagacaactcactggtgagagacataagccgaatgcagcagcgcaactacgggagggaaggattctcgcatataactgtcacaggtgctcttgctcacgggacgaaggaggtggaagtgtggctacaaacatttggtccaggtcaaaggaccccaatccacaggcattcttgtgaagaggttttcattgtcctcaaggggaaaggcacgctcttactcgggtcgagctcgctgaagtacccaggacagccgcaggaagttcctgtctttcagaataccacattttcgatccctgtaaatgatccacatcaggtctggaattctaatgagcacgaagatttgcaagttcttgtgatcatatcgcgcccaccggtcaagatatttatatacgatgattggagtatgcctcatacagctgcaaagctgaaattcccctacttctgggatgaggactgcttgccagcaccaaaagatgaactctaggttaagtggttcctgcaatttgtcagcttcgtgttcatccacaatcctggtggactacgactcacatctacaagttgaaaaccattagtgtactcttcatgtgtagttttgtgttgtgactctgggaaatccatattgacaacgtttataaaattaagcacttctggagctgagctactgtggtctatattctagatttttgaagcagtattggtttgtttcgacaaaagatttctgctctttattgtgatatcccagtgttaatcatatgggttttaagtaatcattcattctaagcattcaaatgtagggcttccgtatagtattattgtattaagaaaaacctttatgaacaggttttatgtcaaatagataagtgaacctgaaattctgaagtaatctctactatataaagtaccagttttcataattctatagtcgccgtgcatcaatccttctcatctcgctttatataaaaataagataaa

SEQ ID NO: 99619 - DNA, 75 bp, Zea Mays
cttgcagtatttaatagtgtatgttggttagtcagtgtatggtggctattcggaaatttaggaatttgtgtgaag

SEQ ID NO: 99620 - DNA, 2602 bp, Zea Mays
gaatgtcgagtttaactgcctgaaatcctgcagtttctaaagaaattagaaaactgaccccatgcatactttagaaactgttgcaaaaagtacataaaagtataaaatacacttgcgaaactgttgtccaagcactgttgcaaaaagtacataaaagttgccttgcgaattgcgatccatgaggtgtcgttcgtttctttcttcatccttctgcattctactgattcattcttgccacagagattcttcacctttttcaatgttcttatatcaaacaaaacctatatgtacccatccctcttccccagcgacactccatctctccctgcatccacactccatcccttgtctctccccacgtttcttccctctggctcatggagtcatggacactttatcctcagacctcagctgaggcagcttcaggcttcagcaggtctgcaggtgtatatatattcctctgctccgggactggtgcacagcaaagcgtcttccatttctcagaagagtgtgtgacaacagcgacaaccgacagacatgtcttcgccgacatcgccttggtttgcggatctcttcgcagatgacagggtgaggaccctatcgcaccaggtctccacacttggggacagggtgtgggaactggagcacaaaattacccagctgatgggcgagaaggccaagctggagaagcaactggaggaggcaaaggcgatctcaagccacaaggaagaggtggggagaagcttgaaggctgaaaatgataagcttcagtcggaggttttggttgcggaggaaaagtgtagcaagtctgcagcggaggttgagaggctgacgaaggaattaggcgcgctggcggaggcaaaagaggcagctgccaaggaattcaacgacgagaaagagaaaatcacgctggaatcggaggatctcaagatgaggctggaggaaatgctggccatcaaggatttgacagagagcgagaatgacaagcttcggtccgaggctttgatcgcagctgaaaagcaaaacatgtctgaagcagagattgagaggctcaagaaggaactgagtgggttgttggaggcgaaggaggcggctgccaaggctttcgacgtacaaaaagcagaaatcaccaatgaattagaggaactacagaggaagctgaaggaaatcgaagctaataaggatttagtggagggagaaaacagtaagcttcagtctgagattctcacagcacaggagaaatatagacagtctgaagcagaggttaagtgcattaaacaagtagtgtgttcagtggtggaggcgaaggaggcagctgcaagggcatctgaagctgagaaggcagaaatcatggaggaaatggacaaccttaagaggacaatcgaggagatcaaggccaacagggatttggtagagagtcagaaccaggagcttcggtcaaagatttcgagtgcagagcaagagcgtagcctatttgaaggagagattaagagcgtcaggatggaattgggggcagtagaggaggccaagcagatccttacgagggagttcgatgctgagaaggcagagatcctgaaggaactggatgaccttgagaagaagctagaggaattgcagaccaacaagggtttgctggaggctgaaaacgacaagcttcagctggaggttttgaccgcacagcacaaacaaagcatgtccgaagcagaggctgagagccttaagatggaactgggagcattggtggaggcaaaggaggcggctacaaaagcatttggtgccgagaaagcaaagaccacgaaggaactggaggatcttaagaggaaggtggaggaaatccaaaccaagaaggatctggtggagggcgaaaaggataagctccgtttggagattttaatagcggagcagaggcatgccatggctgaattagaggttaagcgcctcaagatggacttggctgcatcggcagaggcgagggagacagttgtgaggtcatgtgacgctgagaaggccaagttcatggcagaaatagagaacctcaggaggaagatagaggaaatccacgccagcaaggaagcggccgagaaagcagcgcgcaacaaagatgcagaggctgacaggctgaaggatgagctggcgaggatccggctctctgtgtcacagctgcaagcgtcctgcgacgaacttgatgccaagcagtcgcgcctgaacgacgagaagaactctgtccagaaagcactagtgtccgagaaggtcgaaggtaacaagctcaagttaaaaatcgaggaactcgagaatcacattgctggcaaggacggtgagaaagggaaactgaaggcggcgttggaggaaaagatgactgagatcaatgctctcagcaaagacaacgcgatgctacatcgcacaattctcgaggcgcaagagaagaataaaggtagcattttatcgttcttgtcaccgtgcggctccaagtaacttggttgtaatgtgttgcattactaatgcaatggtgaaggtaccatgcaatgaaataaaaatttcagtttgctctgtgacatgtgatgtcttcttgttacattcattgggatgtagtttgtggcgcctc

SEQ ID NO: 99621 - DNA, 610 bp, Zea Mays
gaatgtcgagtttaactgcctgaaatcctgcagtttctaaagaaattagaaaactgaccccatgcatactttagaaactgttgcaaaaagtacataaaagtataaaatacacttgcgaaactgttgtccaagcactgttgcaaaaagtacataaaagttgccttgcgaattgcgatccatgaggtgtcgttcgtttctttcttcatccttctgcattctactgattcattcttgccacagagattcttcacctttttcaatgttcttatatcaaacaaaacctatatgtacccatccctcttccccagcgacactccatctctccctgcatccacactccatcccttgtctctccccacgtttcttccctctggctcatggagtcatggacactttatcctcagacctcagctgaggcagcttcaggcttcagcaggtctgcaggtgtatatatattcctctgctccgggactggtgcacagcaaagcgtcttccatttctcagaagagtgtgtgacaacagcgacaaccgacagacatgtcttcgccgacatcgccttggtttgcgggtgtgcgccaagtcatcatctttccttttctttatctgcgcg

SEQ ID NO: 99622 - DNA, 300 bp, Zea Mays
cggcatgtggtggtctttttggtcggcggcgtcgtgggcagctggttgttgccgtcgaagctcgaaagaagcctcgattcgtcgaaaggttcatcagcttgttcccatttcttttcagcatgcatagatctgtgacatgttttgtttccgttgcttgaatccaatggctatgctgctgccatgaatatttaggagtccctggtttaggatttgttgtctaaatctgacgaactgtattcctgtttatccaccagcgatggccttcaaacaagttgtaaatataaatttgggttacaaatt

SEQ ID NO: 99623 - DNA, 228 bp, Zea Mays
gacatcgttttcaaccagtttttggacaaagtttgtcggttgagacaggtggttgtagatgttgcaccacatggtgttgaagtgacgttaggcatggcacttgcagcattccgggcagcacgtggtgttgcagctaagcatgaagcgaaattgtttctggactggcatttggaaaatctcgtgtatgctattgctgcctcccttactgatctctccatggccttatgg

SEQ ID NO: 99624 - DNA, 590 bp, Zea Mays
catttggcgtgtacgacgtccaccccacaagctcccacggcgctccccatggaccccatcccctcccccatggccgatgagctcgttcgtcgccccatatatggagtgaggttcggctcaccctatccggccatttccatgaggaagatcctccacatccagggcgggcagtgcggcaaccagattggggcgatctgcgacgagcacggggtcggcgccacgggccgctacgtggggaattcggacctccagtttgagcgcatcaacgtctactacaacgaagccagcagcggccatttcgtccctcgtgccgacctcatggatctcgagtccgagaccatggactctgtgcgctccagccccttcggccagatcttccaccccgacaacttcgtcttcggacagtccggcgccggcatcaactgtgccaaggggcacgacaccgagggcgcggagctcatcgactctgtcctcgacgtcgtctgcaatgaggccgtgaactgcgactgcctcagggcttttgacattacagctccaggaggtgacgtgatctctggtggttttgacgactctgctagttggaacaacaa

SEQ ID NO: 99625 - DNA, 903 bp, Zea Mays
atggaggccgaggtgaaggcaaagttggaggaacaagaggtcctaagtgctaagaaggcagaggtggattcgagggtgcagattttggagttggctgctgccaacaacttacccacatttaaactatactctacaaacaatacaatctacagtacaaaatattgcaaaagctcgtctcttgcaaatgttcaagttcccagggttgaattaagtgcattggtgaaggagaaagagtctactgctaagacatttgatgctgaaaaggctaggatcactacaggaatccaattaattcccatcggcttagaaccgacggggattactaattcccgtcggtcagagttagtcaacaggctgaagaataaggtggaggaaatccgggctgataaggaaacaactgagggagctactcatgagaaggatgctcatgcgagtaagatgagggcccaattgaaggaccttcaggcttggatgtcccggctccaagcctgctgtgatgaccttaacacccaacgctcccacctacatgatgagaagaattcagtcgtgaagtctcttaatgttgagaaggatgaagtagcaaagttgaggttgaaaattgaggagctagagaactacaatggtgagaaagatggtgacatcaggaagctgaaggcagcattggatgaaaagaagggaaaaatcgataccctaggcaaggagattgagttgctgcagctcgtagtggctgaggatcagaagaagggtggcatctggacatgtctatatgctgcaaccacaacaatggtggctgccatctctttcatctatgccaccaggtccaacttaaggactgctttctttcatttctctttcatttttttgtatgctctatgttccttatatccacttaacaacgtgtaa

SEQ ID NO: 99626 - DNA, 976 bp, Zea Mays
atttcgtcgaaaccagttctgccgtgtttcataatctcaataatctctcgaggaggataccacctcccgaacatggtgcgtcgacgacccgccaccggggcagcccagagaccccaactcgccgccgtcggtcgcgggctgctcctcgcgtccgtcctcgcggccgctgcctcctccctcccagtagccgagtcgtcctgcccgcgagacaactcactggtgagagacataagccgaatgcagcagagcaactacgggagggaaggattctcgcatataactgtcacaggtgctcttgctcacgggacgaaggaggtggaagtgtggctacaaacatttggtccaggtcaaaggaccccaatccacaggcattcttgtgaagaggttttcattgtcctcaaggggaaaggcacgctcttactcgggtcgagctcgctgaagtacccaggacagccgcaggaagttcccgtctttcagaataccacattttcgatccctgtaaatgatccacatcaggtctggaattctaatgagcacgaagatttgcaagttcttgtgatcatatcacgcccaccggtcaagatatttatatatgatgattggagtatgcctcatacagctgcaaagctgaaattcccctacttctgggatgaggactgcttgccagcaccaaaagatgaactctaggttaagtggttcctgcaatttatcaacttcgtgttcgtccacaatcctggtggactacgattcacatctacaagttgaaaaccattagtgtactcttcatgtgtagttttgtgttgtgactctgggaaatccatattgacaacgtttataaaattaagcacttctggagctgagctactgtggtctatattctagatttttgaagcagtattggtttgtttcgacaaaagatttctgctctttattgtgatatcccagtgttaatcatatgggttttaggtaatcattc

SEQ ID NO: 99627 - DNA, 848 bp, Zea Mays
gtcgaagcccacgcctacacctccatttcgtcgaaaccagttctgccgtgtttcataatctcaataatctctcgaggaggataccacctcccgaacatggtgcgtcgacgacccgccaccggggcagcccagagaccccaactcgccgccgtcggtcgcgggctgctcctcgcgtccgtcctcgcggccgctgcctcctccctcccagtagccgagtcgtcctgcccgcgaggtggaagtgtggctacaaacatttggtccaggtcaaaggaccccaatccacaggcattcttgtgaagaggttttcattgtcctcaaggggaaaggcacgctcttactcgggtcgagctcgctgaagtacccaggacagccgcaggaagttcccgtctttcagaataccacattttcgatccctgtaaatgatccacatcaggtctggaattctaatgagcacgaagatttgcaagttcttgtgatcatatcacgcccaccggtcaagatatttatatatgatgattggagtatgcctcatacagctgcaaagctgaaattcccctacttctgggatgaggactgcttgccagcaccaaaagatgaactctaggttaagtggttcctgcaatttatcaacttcgtgttcgtccacaatcctggtggactacgattcacatctacaagttgaaaaccattagtgtactcttcatgtgtagttttgtgttgtgactctgggaaatccatattgacaacgtttataaaattaagcacttctggagctgagctactgtggtctatattctagatttttgaagcagtattggtttgtttcgacaaaagatttctgctcttta

SEQ ID NO: 99628 - DNA, 1122 bp, Zea Mays
gtcgaagcccacgcctacacctccatttcgtcgaaaccagttctgccgtgtttcataatctcaataatctctcgaggaggataccacctcccgaacatggtgcgtcgacgacccgccaccggggcagcccagagaccccaactcgccgccgtcggtcgcgggctgctcctcgcgtccgtcctcgcggccgctgcctcctccctcccagtagccgagtcgtcctgcccgcgagacaactcactggtgagagacataagccgaatgcagcagagcaactacgggagggaaggattctcgcatataactgtcacaggtgctcttgctcacgggacgaaggaggtggaagtgtggctacaaacatttggtccaggtcaaaggaccccaatccacaggcattcttgtgaagaggttttcattgtcctcaaggggaaaggcacgctcttactcgggtcgagctcgctgaagtacccaggacagccgcaggaagttcccgtctttcagaataccacattttcgatccctgtaaatgatccacatcaggtaaaagagaagggttgtcatttatatgcatttttactttgtctgatacagtgatatctcgtgtcctgatttgcacaactctgctgattatatggtactgtaccttggctagttttaagatattgttggagcttgggtagggtcaatttgttagtgtctacatctttctctttcttgcaggtctggaattctaatgagcacgaagatttgcaagttcttgtgatcatatcacgcccaccggtcaagatatttatatatgatgattggagtatgcctcatacagctgcaaagctgaaattcccctacttctgggatgaggactgcttgccagcaccaaaagatgaactctaggttaagtggttcctgcaatttatcaacttcgtgttcgtccacaatcctggtggactacgattcacatctacaagttgaaaaccattagtgtactcttcatgtgtagttttgtgttgtgactctgggaaatccatattgacaacgtttataaaattaagcacttctggagctgagctactgtggtctatattctagatttttgaagcagtattggtttgtttcgacaaaaga

SEQ ID NO: 99629 - DNA, 355 bp, Zea Mays
gtaaacatctatccttctgcaaaagctccagctgaatactcaatgcaggcttcttctggagattacatactgtggaacaccttaggaaaatgtccgacagcagcgttgcctagagaattatgactgttttccagcatacgatgccatcacatttttgtgcctgtcttttgctgcttgtacagacttcagagctgtccacgttgttcctcctaccagatctgtgatgggaagtttttgacatttgtatttagttctcttttaccgaggagaaaatctatgaacctacagatcttgttgtctgaagcccaatgacgagatacttatcttgaagccataaccataatcttatcagcaa

SEQ ID NO: 99630 - DNA, 156 bp, Zea Mays
atgggagaaatggaacttcatggaccggtttctcgttttccactaggaaggattcactcgatcttcagttccacatacgctgcctttctgcactgttcattttgcccagattttcgatatagcaacaacaaatgccctaagcacaagccagaatag

SEQ ID NO: 99631 - DNA, 489 bp, Zea Mays
atgggggccgaggcggccagagcccagatgggtggtcgcgtcagtctgattcgaaatgaattcgggcggaaggggtggggtttgacgcgttttgaggaaatttgggcaggattcggggatggtttggttggatttgcgtttggaagtggatttggaggcgcgggcgacacgggcggcggggagaggtgcggactgaggagcacagagaggaggagggtaagcgaggcggttttgctgatgggtctctgcgtgagtagggttttctggacaaggtctctctgtggggcaaaggcggctagcgcgtggttctgcgagattttgcgtggagactcccgaaagatgcgattttttggtaaaggctcaagcacgcaatctgggagtatgagccccacatcagactgggctcgtgcgggttctgcatataaagggtccttcgttttgggctttcgtagcatcagcccattctcggagctccaaatgcgaagctga

SEQ ID NO: 99632 - DNA, 2946 bp, Zea Mays
atggcgtttcacgtcgcgtgccccatcacttgcaggagggtgtgcgactgcgagctagggttcggcgcgtcggcgtcgaggaagggaggaggtggcgcgttggcggcggtatgggcgggcacggcggcggctctcgaggattttctcgcggatccgtggttgctgcggccggcaggggccgttgacgcggatgcggcgacggtgcaggtggaggtgccgccccttgagccggcccctgaggatggggaggacgaggcccgccgggcggcagcgcagcgcggcgccgccgcggcagaggacctcgccaggcgcttcgagagcggcgcctacggatcgccggaggcagaaggagatgaagacgagtgggatcgagaggatcaaggaaatgctgctgtcaaggttatgtgccgtttatgcttttcaggagaaaatgagggcagcacgaaagctgccaaaatgcttccttgcaaactctgcagcaaacgatatcatagaaactgtttgaaaagctggggagaacatagagaccttttccactggagctcatgggtctgtccttcttgccgcagttgtgaggtgtgccgacgtcctggcgaccccaacaagttgatgttctgtaaaaggtgtgatgacccttatcactgttattgtcagcaaccatcgcacaagaatgttacccatgggccatatttatgtccaaaacatacaaggtgccacagctgtggatctggtgtgcctggtagtggccatagcacaaggtggtttttggggtacacatgctgtgatgcgtgtggacgattgtttgtgaaaggaaattactgtccagtttgcttgaaggtttatagagactctgaagtgatacctatggtttgctgcgatgtttgtgaaaagtgggtgcatattgagtgtgatggcatcagtgaggaaaagtaccaacaattccaagctgatcaaaaccttcagtatacatgtgcagcatgccgtggcgaatgctcccagatcagggacactgaggatgcaatccgggagctttggaagaggagggatgttgctgatcatgagctcatgattactttgcgggctgctgctaaactgccttctcttgaagatgtgtcaccgctttatccaaactcggatgatgagaaacttggtgcatacgtattgaaaagtgagagtagaaatacactaaaattttcattaaaaagtaacagtagtaagcctccaccggatacacctgagcaagagaaggttgtttttaagagctctggatcaaataaaaagccttccaaaaagaaaggtggtcagggtaataaaacaaatgatggccatgatgaaatatttctggagaggaggcatgatgttaaatcatcaaatagccgtttgggagatcaaagtatagatggcaatcatgatatgagcccttttaagaatgatgataatgcctatatttcatcttcaactcgaagttcagaaaagaatttgaaatctccatccatgaaagctgtgacaaacaatgctgatatgatacccaaagtcaagattaaaggcagtaaggtttcgagtttgcattacaaagatggtgaagaaaatacttccaaggctgacactggaaaagctaccaagttggttatccatcttggttcacggcataaaactaggagtggctctcctaagtcggagctgtccaattatcaaagagagcaagatttaggatcaatacatggacggaaattagatgtcacaagccagctgaaaggttcaagaagcgaggtaaaagagagaagtgtaatgaagttagttagagagactggggtacaacaaagaaatagccttttgggtgatcttggtacctcaaaaaagcatgcaactgggaaaaggagcaatgctctaatttctggaatggagaatggaaatgaaactggtactagaaaccggccatttgcacagaaacaatctcattctagtcaggtggacgagaaccagggaactgctgactctcctgataacttgaagccatcattgctcaaactcaagtttaagcgtccacattatgagcagctaaacacccaggcctctcaaccagaggagccgacctcctgggtttctcagcaagaagaccagttcaatgttgctaaaggccagagatcaaagaggaagaggccttcgatggagaaggcagatggtttggatggtacgactccagccaagaggcatcatcagagcactgatgatgaagtgatggacgcaaattggatcctacgcaagttgggcaaggatgctatcggaaagaggattgaagtccatctaacttctgatggcaaatggcatcaagggatggtgtcgaatgtcatgggtggcacactgtgtattcagttagacaatggcaggtctgagaacgtggagctggggaagcaggccatccgcttgattgcttcaagatcaaagggccggaagcgatgaaacctttttccccatgtgcagcttaggacctgttctcgctcaacccattgccgtgattatggcaggtagagttctccccttgaggtttgacatccgctgaagcacagcagtgaccacctgctgttcatgtggggaaacgcgctgcctctcagcctttgctgctgactggacgagataccgagcgcaacgtcatctgttgcgccatgtttcgctagcctagcgtgtaacagactttgttgccggaagcccatttgctttccattagaatctgctagggtagggaaaccgaggaggttttagattaccttggatgtaaaagaagcaggtaacgccgctgtatctggggtgttttgtacatgtggttttcggacgagtttctgaacaactcgttattgacttatttggtggcgttatttgctggccactggccgggattttgttgtcttgttacatatactgacagtaataatttgtctacatatataa

SEQ ID NO: 99633 - DNA, 3016 bp, Zea Mays
attagcgtcatgtccggcaccactccgacccctacacctacaccgccgcctctcccgccgccgccggccgctcgccccgtgcggtacgacttcctcaactcgaagccgccggccaactacgtcgcggggctcggccgtggcgcaaccggcttcaccacccgctcggatatcgggccggcccgggccgcgcccgacctacccgaccgctcggccgccgccgccggccctgccgtcggccgcggccgcgggaagcctcccggcgaggatgacggcgacgacgacggcggcgacgaggagaagggatacgacgagaaccagaagttcgacgagttcgagggcaacgacgccggtctcttctccaacgccgattacgacgacgacgaccgcgaggcggatgctgtgtgggagagcatcgaccagaggatggactcgcgccgcaaggatcgccgcgaggcgcgcctcaagcaggagattgagaagtaccgcgcgtcaaaccctaaaatcaccgagcagtttgctgatctcaagaggaagctggctgatctgtccgcgcaggaatgggagagcataccggaaattggggactactcgctgcgcaacaagaagaagcggtttgagagcttcgtgcccgtgccggacaccctgcttgagaaggctcggcaggagcaggagcatgtcacagctcttgaccctaagagccgtgcggctggtggcacagagacgccatgggcacagactcctgttactgatctgacggctgttggcgagggtcgtggcactgtgctctcgctcaagttagataggctgtcagattcagtttctgggctcactgtagttgatccgaaagggtatttgacagacctgaaaagcatgaagattactagtgatgctgagatttctgacatcaagaaggcgcgtctattgctcaagtcagtgacgcagacaaatcctaagcatccccccggttggattgccgcttctaggctcgaagagattgctggcaagcttcagattgctcgacagcttatccagcgtggctgtgaagagtgccccaagaacgaagatgtgtggcttgaagcatgccgtttggccagtccagatgaggcaaaggctgtaattgcccgtggtgtgatgtcaattccaaattctgtgaagctatggttgcaggcagcaaaattggagagcagtgatctgaataagagcagggttttgaggaaagggctggagcacattcctgattcagtccggctatggaaggctgtagttgagcttgcaaatgaagaggatgcaaggttgttgcttcacagggctgtggagtgttgcccgttgcatgtggaactttggcttgcccttgcaaggctggagacctatgaccaagcaaggaaagtacttaacaaggccagggagaagctccccaaggagcctgccatttggattacagctgcaaagctagaggaggctaatgggaacacacaatcagttaacaaggtgattgagagaggtatcagatctctacagagagaaggaatggatattgatagggaagcatggttgaaggaagcagaagccgcggagcgtgctggatctgttttgacttgccaggctattgtgaagaacactataggcattggtgttgatgatgaggatcggaagcgcacgtgggttgctgatgctgaggaatgcaagaagcgtggttcaattgaaacagcacgcgccatctatgcacatgcgcttactgtgttccttactaagaagagtatttggctgaaagcagcacaacttgagaagagccatgggactagggagtcacttgatgcgctcctcaagaaggctgttaactacaatccacgagctgaagtattgtggcttatggctgcaaaggagaaatggttggctggagatgtgcctgctgctcgtgcaattcttcaggaagcttatgctgctatccccaattcagaagagatctggctggctgcattcaagctcgagtttgagaacaatgagccggagagagcaagaatgctcttggccaaggccagggaaagaggagggacagagagggtttggatgaaatctgccattgttgagagggaattggggaatgttggtgaggaaaggagattgttggaggaaggtttgaagctattccctgcattcttcaaattgtggttaatgcatggacagatggaagaccggcttggtaatggagcgaaggccaaggaggtttttgagaatggcctgaagcagtgccctagttgcatccctctttggctctctctagctaccctagaggagaagattagtggcttgagtaaatcacgtgctgttctcacaatggctagaaagaagaaccctgctacacctgaactctggctagcggcaattcgagctgaattgaggaatgggaacaaaaaggaagccgatgctctactggccaaggcattgcaagagtgtccaacaagtggtattttgtgggctgcagctattgagatggcaccacgcccacagcgtaaaggaaagagcacagatgctattaagcgaagtgatcatgatccacatgtcattgcaactgtggccaaacttttctggcttgacaggaaggttgataaggctaggagttggttaaacagggctgttactcttgctcctgatattggtgatttttgggcattgtactacaaatttgaacttcagcatggaaatgtggacacacaaaaggatgttctgaaaagatgtgttgcagcagaaccaaagcatggcgaaaaatggcaagcaataaccaaggctgttgaaaactcacacctgcctgttgaggctcttctgaagaaagctgttgtcgtgcttgatgtagaagaaaacgccaatccgggaggagcctagactctcttttttataagttgtttggtgaacatattttgtggcttacaatttactcagcaagtctgcatctttaaatctgttgttgattcttgctttttgctccactttactaaaaagggatggtacatactctttc

SEQ ID NO: 99634 - DNA, 1623 bp, Zea Mays
gcaaaagtcgtataaagacaccgggacctcgtcgtcgcttccccccactgattccgagtccatctttccccgccgccggccgtgatccctcctcgccgctgaccgccccgcctgccccggcattctcccgctccagatccagggccctcatagagcctccgctcgatctgcccccggatcggattggccgccgcgcatctcatgggtgaggaagctgtccacttcagcgtcgtcgacgccaaggactgcaaacagagtgcctttgaagtcggcgataagacgtatgttatttgtagatcagatgatgatttgaaaacatctgctgttaaaattcacgacaagctcactcagacttggctctcacccacaatacttggggaacagccacttctaaccaagtcacagtctgtgattcctgtcagtgatgagaagatattagttatcgagaagggtgttcccttgaatgagtccatctggttccttgagatagacaccccctttgttaagcaacaacggaaaatcaaggaaacagaagttgtttcttggagcaagggagtaatcggcgttggccaaaaaccagttgtgattagtggtccttctggtgttggtaaagggacattgattgcaaagttgatgaaagactatccatcgaagtttggtttttctgttagccacactacaagatctccaagggaaaaggaaatagatggtgttcactaccacttcacagaacgaatcaagatagagaaagatataagcgagggcaaatttcttgaattcgctcatgttcatggaaatgtgtatggcacaagtatcgaagcagtcgaatctgtaactgatgagggaaaggggtactgaaacagaggagcaaatccagaaacgactcagaaatgctcaggctgaacttgatcagtccaatgaaccaggtctctttcatcatcttttggtcaacgatgaccttgagacatgctatgagaatttgaagaagttgctttctctggatgatgaccaagaagattcagatgatttttttaacaaggaggacaaagaaactgcaagttactctatcgtgtccaaaactgactcagaaattttgttgcaatctgagactaacgaaggcaaaaatggagccatacacttgctggcacttgatttgtcgtctctctcaggcggtgcgcctggacgaacaaggggccttaagattggctcagttaactccttttgacaagggcttatattggcgttttagatgacccaaagcattcttcaaaatgatacagcagaagcactgacttgaattttggatcaattcccatgagctgatatcttcaaaaacatcttagttaggaaaaagaaggaaacgaaaatggaatttatttccatttgttatttgtttgggtgccacaaggaggcaaaatcatagcaaggaattgtaccttattttttttagggattgtgtacttttctgctgttgagaggtatttggtggttggataatgtgatggagcctatctaaatgttctttcatagtggtctgaataacattgagctcattgctggattatgttgtgattctttcaactcttgggtcatgttgcacagaactaactcgtagttctgacc

SEQ ID NO: 99635 - DNA, 1745 bp, Zea Mays
gcaaaagtcgtataaagacaccgggacctcgtcgtcgcttccccccactgattccgagtccatctttccccgccgccggccgtgatccctcctcgccgctgaccgccccgcctgccccggcattctcccgctccagatccagggccctcatagagcctccgctcgatctgcccccggatcggattggccgccgcgcatctcatgggtgaggaagctgtccacttcagcgtcgtcgacgccaaggactgcaaacagagtgcctttgaagtcggcgataagacgtatgttatttgtagatcagatgatgatttgaaaacatctgctgttaaaattcacgacaagctcactcagacttggctctcacccacaatacttggggaacagccacttctaaccaagtcacagtctgtgattcctgtcagtgatgagaagatattagttatcgagaagggtgttcccttgaatgagtccatctggttccttgagatagacaccccctttgttaagcaacaacggaaaatcaaggaaacagaagttgtttcttggagcaagggagtaatcggcgttggccaaaaaccagttgtgattagtggtccttctggtgttggtaaagggacattgattgcaaagttgatgaaagactatccatcgaagtttggtttttctgttagccacactacaagatctccaagggaaaaggaaatagatggtgttcactaccacttcacagaacgaatcaagatagagaaagatataagcgagggcaaatttcttgaattcgctcatgttcatggaaatgtgtatggcacaagtatcgaagcagtcgaatctgtaactgatgagggaaagaggtgtattctcgacattgatgtccaaggagctcgatccgtgagggcttcttctcttgaagcaatattcatctttgtatgccctccatcgttcgaggaactagagaagcgccttcgggcacggggtactgaaacagaggagcaaatccagaaacgactcagaaatgctcaggctgaacttgatcagtccaatgaaccaggtctctttcatcatcttttggtcaacgatgaccttgagacatgctatgagaatttgaagaagttgctttctctggatgatgaccaagaagattcagatgatttttttaacaaggaggacaaagaaactgcaagttactctatcgtgtccaaaactgactcagaaattttgttgcaatctgagactaacgaaggcaaaaatggagccatacacttgctggcacttgatttgtcgtctctctcaggcggtgcgcctggacgaacaaggggccttaagattggctcagttaactccttttgacaagggcttatattggcgttttagatgacccaaagcattcttcaaaatgatacagcagaagcactgacttgaattttggatcaattcccatgagctgatatcttcaaaaacatcttagttaggaaaaagaaggaaacgaaaatggaatttatttccatttgttatttgtttgggtgccacaaggaggcaaaatcatagcaaggaattgtaccttattttttttagggattgtgtacttttctgctgttgagaggtatttggtggttggataatgtgatggagcctatctaaatgttctttcatagtggtctgaataacattgagctcattgctggattatgttgtgattctttcaactcttgggtcatgttgcacagaactaactcgtagttctgacc

SEQ ID NO: 99636 - DNA, 1749 bp, Zea Mays
ctcaccttgcggccagctgcttgcgtgcctctccagccacttcactggccgcgcgcgagctcctctgcgcgctcagccgttcttccctgcagtgcccctgcgcaagcttcggtgccttctccgtcgccccccgtggaagcctgctcgcccagctctgttgccgcgcccatggccggtgctccctgctcgattccgtttgtcgcgccctgcgctcgtcgcggtgctccagctcggattcagtcctgcgcgtagccgcttttcatctccctgctcagctcgtcgtgccgaactgcccagcgccgcgcgcccggctcggccgtctctagctcgccttgctccctgctgctcgcccggtcgagctccctgaccgtcgcgccgcgaatttttctgcgcgcgcgtgtctccttgcgcacgcgtcgccgtcgagttctatggtgtttgcgcgccgtgatctgcagcttgtctgctccagctccagctcgctgcgcgctgagctcagcgtcccttgttatccccatggcacatccggctctgttgctgcccgccagagtttgccgatggcctatgtcgctcctgcgcgctgtggtcgtgtgcaactcgtgcacagctcgcggagctttttcctcgtcggccgacctcgcaacttagttcgtccgtcgtgctggtcgctgtctcatactgtacctattagctcggatcctgcccagctcgtcgtcgcgtcgtttgctatcgagtcgtcaaacacgtcatctcctgctcaaccctatctcgccagctcgctccagacataatctcgtcgtcgttccgcgcgtcagcaagaaatctcaagagtcgggtgaagacggagctagcagcgtggtgttcgccgagtgcgcgacaaaaagttcgtgtgacacctgccaagcactcgcaaattgttggaatcggaaaaatcactatcgatctcgcggattcaagtcagatattagaacggtgagctgatttgctatttttattgactggtttgatagatgaattgataggtatgtatgccgcgacgattattccgcttgtacactacacgacggttcacttacagcgacctacggttggttgctaaaacggccttcagcgacctacggttggtcgctaaaaacttttagcgacccataaggatggtcgctgtaagtgccgtcgctaaaggctttagcgaccgacatctttttagcgaccgaccgtccgttgctaatattgtatatttagcgaccaaccgtgggttgctgtactatagatttagcaaccaactgtaagtcggcatactatacatttagcaaccaacagaaagtcgccctttttacagttgttattaataatatatacatttaattaagcaccacaaatcacatatttttatacacaaatcataaagacatacacaattaatcagtataccacaacacataaacacaaaagcaccacaattatatattcacaaaagcatcacaattataatatcattcacaactagatcatttacagatagctagctagatcattcacaaaagcaccacagcgacatcactccagcttgaagtagttcaaaagccaacaactacatcactaatgtttcatatcactctagctattgttcaaaagcccacaactacatcactctagctgctccagagatgatcagtcacaaaagcatctgttcactctagtagcttttgatgctctattttcacacccatagcagaaccttgcaactag

SEQ ID NO: 99637 - DNA, 96 bp, Zea Mays
attttcttattattatttccttcggcgtgtttgtctgtgctgtctatagctgcaacaggcaaagaaacaataaaatgctgctctggacaactacag

SEQ ID NO: 99638 - DNA, 297 bp, Zea Mays
gcacatgatatgaagatatacctttcttttttctatcatggggaaaaggcacatattggtagcagacactaatctggttggtttagttgctctaaataaactatttcttgaggcaggtctcaatatatctgcaaatagttggatagcagaaagatatgacacataaaattgaatcacagagtcactgccatttaacaaccagtggaacaccagcttattcttttcacattggatgaaaacccaatgggaagttttgccatctcaagaaatctggaatctaactcatttccgatgtac

SEQ ID NO: 99639 - DNA, 2371 bp, Zea Mays
caaaaacctactcgttttgcccaaaaacccaaagccgaagtacgtttcccctccctcgcttgccttccctcttctgccattccgccgaacaccttccccaatcgtgcgcctccggccatgggggaagcctccgacgcggcggtagccgtatctgcgcggctcctggagctggcggccgaagacgactctgcagcgctcggggacctccttgcggcacacccgtcgcttgctgacgagcccgcgccgtggtactccccggcgcgcggcgcggagcctatgaccccgctcatggtcgcggcggcctacgggtccgtggcctgcatcgatgtcctactctctccgccccaccaggccgaccccaaccgcgcctcaccgtcgtccctctccaccgcgcttcatcttgcagccggcggcggcgcttccactgcgccggttgcggtatcccgtctcctagctgctggcgccgaccccacgttggtcgaccacctccatcgccgaccgtccgacgtcgtcactctcccacccaactcgctcccgctcaagaaccaccttctctccctcctcggagggcgcaaggagtggccgccggatccctccctccccgacatcaagaatggtgcctacgcctccgacgacttccgcatgtactccttcaaggtgcgcgcgtgctcacgcgcttactcccacgactggaccgagtgccccttcgtccaccccggcgagaacgcgcggcggcgggacccgcgcatgtaccactacagctgcgtgccgtgccctgagttcaagaaaggggcggggtgccggaggggcgacatgtgcgagtacgcgcacggggtgttcgagagctggcttcacccggcgcagtatcggacgcgtctgtgcaaggacggcgtcggctgcgcgaggcgcgtctgcttcttcgcgcacacgcctgaggagctccggccactctacgtgtcgtcggcagggtcgcgcagcgcgatggagatggcagcggcgatgggcatgggactgtcttcgccgggtgcgtcgttcacgccgccgctctcaccttgcgccggcggaagcggcgtggccggcgcgtggccgcagcccaacgtgcccgcgctgtgcctccccgggagcgcggggaaccttcacctgagccggttgcgtacttcgctgagcgcgcgcagcatggcagtggacgagctgctcgcctcagcggattacgacgggctcgtcggatcgccagcctctgtgcggtcggcgaggggaaagacgctcgcgccatccaatcttgatgatctgttctcggcggagatggcgggcgccgcggcatctcactcgcctcggtacgcagaccagggcggctctgctttctcgccgacgcgtaaggccgccatgctgaaccagttccagcagcagcagagcttgctgtctcctcgggccacggctatccctgagccagcgtctccgatgagctccaggctgctcgcggcccttgcgcagcgagagaagatgcagcagcagacgctgagaagcatgagctctcgtgaccttgcctctggcgcctccgtcctggttgggtcaccggttacctctagctggtccaaatggggaatccccccgagcacaccagattggggtgctgacgacgaggaacttggccgcctcaagcgatcctcgtcctttgagctccggagcggtgccaacggagatgagccggacctctcatgggtcaatacccttgtgaaggagccgacgccggagaagccatccatcaacgggacaactgcaaaggagaccattgcttctttgagtgaggccgcgagtcatgaggacatcggcggcgaggacgacacagccggggtcatcggtggctggcttgaacagctccagctggatgagatggtagtctagaacaaacataaacataaatcaaaggtgccattttttttgtttttttgctgtgattcaccagttgcttctacagctaactacatctaccaaccttcatatctcgctggtaattactggtgatacattctgttggagttggttagtgtaggtgttgagatttgcactaccatttataattccccgcaagtgagagaaatgaaggaaatggaaaccaatccaattatatggaatttcaggtttcggtaggtgaacattgtgtttctccttgtactttccacatccatatcctttgctcatcattccaaaggtgatttcctcgcccattgtgaattatgtatgttggtgatatcatctcctaagccccatcctctgcttctaatggctcatgattggtgtaaaacaccctactgttgttgtactactcaggattcgtgactgatgttgaatgccctactgttgtgttgtactc

SEQ ID NO: 99640 - DNA, 1559 bp, Zea Mays
tagctgggtaataactaacgtgtacgtcgtacccagctataggacggcaatgaggaaaccggagtgcccagcggcgaacagcagcaatgcgggggcggcggccgcgaagctgcggaaggggctgtggtcgccggaggaggacgagaggctggtggcgtacatgctgcggagtggacagggttcttggagcgatgtggcccggaacgccgggttgcagcggtgcggcaagagctgccgcctccggtggatcaactacctccggccggacctcaagcgcggcgccttctcgccgcaggaggaggagctcatcgtcagcctccacgccatcctgggaaacaggtggtctcagattgctgcccggttgccggggcgcaccgacaacgagatcaagaacttctggaactccaccatcaagaagcggctcaagaacagctcggcagcttcgtcaccagcagctacggactgcgcgtcgccggagcctaataacaaggtcgccgccgccggtagctgcccggatctttccgtcctagatcatcaggacggtggccaccaccacgcaatgacgacgacgactgcaggtttgtggatggtggactcatcctcctcttgtacctcgtcgacctcgccaatgcatcagtttcagaggccgacgacgacgatggcagcggccgtggccagcgggagctatggaggtctcgtccccttccctgaccaggtccgtggtgttgtggccgacacgggagggttctttcatggccacgcggcgccagcgttcaagcaccaagttgccgcattgcacggtggtggttattactacggcagcgctcctcgtcaccatggaatgacgacgacgacgacgacggtggcattggaaggaagcggtggatgcttcatatctggcgaaggcatgcttggtgtgccccctctgctgttagagcccatgtcagcagcgctagagcaagaccaaggccagaccttgatggcatcaagtggtaacaacaaccctaaaaacaacagcagcagcaacactactgatactacgactaccacgacactgagcaacaatgagagcaacgtcacagacaccaccaccaaggacaacaccaccaacaccatcagccaagtgaacagtggcagcaataatgtctactgggagggggcccgccagcagtacatgagcaggaatgtcatgcatggggagtgggacctggaggagctgatgaaagatgtgtcatccttgccttttcttgatttccaagttgaatgattgggagggccgtgttgcatctccagctggcgatcaatggaaggagtagtacatatatacatgcatatatatacaactatacatatatacttatacgtcaagattagtatttttgcatccttgacattgctattggatccaatgtaaaagatttttctcttcccacagctacttcacctcactttttggtccgatcccacacatgttttgggttattcatcctcttgtatacaaattaaaggcattcatgccatgcaaataattcaatcaagtcctgagctatactatatag

SEQ ID NO: 99641 - DNA, 858 bp, Zea Mays
atgtcgatacatatttacaagaacggttatatgccaggttatgaggtgtgggtgcaccgcggtgaggacccacctcctcgtattgtatcggaagttcagtcacatgaagaggaggactacgataggattgaagagatgcttgacgatgtacgccatgagcttctcaccgtcgattcggagaaccccggtcaacccaccgagtttgaggatccagctacacctgagttgccggacgatggatcatatgatatgaacgctcgttacgtgtttgagtataacacgaacgatgtcgttgcagatgcaatgtactatgcacgaattcaggctataaaggcatggtacagagcaaatgctgatgatcgaccgatgccaaataccaaggccgagtggtcatcaatttacttgacggaggagcaatacctagaggtgtcggtgctgtggatggccacccgatcagacggttatcgggcattgtgcagatggtgggcttcctttgagtttcgtgccatttccgaaaggaacaggggaaaccgtgggactgagtcgttccacaactatggcggtgatggtcatgtgcgcttggctaagcgaatggaagtcaaatccggccgtacgcccacggatgtggaggtgtatatgcaagggcataggggttctgatcctcagaatcctgatgtgttatgcactcagacggccaccgaccgtctactgcccgctgtaaaggatagccggtgtcctcgacgccgtgcccgcgtcgacttccctgctcgccgaacgccgcaagcccctctactcacctcgacgtcgctgtgccccatccgccctctgcgcaagtacagcaaggtgtataccgaataa

SEQ ID NO: 99642 - DNA, 1099 bp, Zea Mays
gaagcagctggaagcggtggagcgccgggcgaccgtcgaggcctttcttgtccctcgtggatctcgcgatgtccgcgttgcagaagcacgccactgacactctcgccgtgtccctgctccggttagccaccacccggtgctccacgctcttgaaccgcccgttgctgaccagctggagaaggtctccgacgttcaccaggagcgcgccggccaccggaggcacgtccagccacctggatgcgaggagcgcctgcaggccgccctgcgcatgcgagtcctgcagcagcacggtcaggaagctggggtccgagtgcctgctgcagcccagggtgaggtccggttccgggcacggcgggtagtagttgcacaccaggctgaggccctccgcgcaccccatccctgcgaggtgcccggggctcagccccagggcctccgagagcagccccagcacgcgcgccgccacctcccgcaccgcgccgccgtactccagcatcacgtgcctgacggcgaccggcagctcctccgcccgcggcggctccggcgctgcctcgcagaagagcgtgtcgcgccagttggccgccggcgactggaacagatcgaagttggagttgaaccgcaccttgcgacgtgcgtcccgcgtgtagtagggccgcttcacctcgtggggctcctcgttgaaccgcctcaccgacggcagcatctcgcacaggagctcgctgggaacgccgtggttcaccagctggaagaaccccaccgtctcggctgcagccttcaactgggcgaccacctcctcccgtgcgactgcgtccgccgccgagaggtcgatgaccgggataatgctaagactagtactgctgctactgctagaggacgataccttcggcccttcctgaaggagatggccgcggaagatggcagggatggtcgtgacgccagcgtccacgaggcccttgacgccggccttgctgtcgtcgaacgccttcagctcgctcaagcggtcatagtcgtcgccaccaccaccagcggcttcttccgtgggggacatggctaccggccggcgatcgaggcaaagctggatggatcaagatgagatgtcagt

SEQ ID NO: 99643 - DNA, 1151 bp, Zea Mays
gcgtcgcgtgtggcgccaccggcaggcgcaggctgtgcacacgacacggtcagtccgcagcgcactgcagtctgcgcgtggcggtgcacccattccttctggtcccgtgacaagcagcgcgctagacacacacgcgcgcgaacacgaacagggacacgaggccgcggcggccatggcgagaggcggcggcgatcggagtcgggaggatgatcccttctccgacggcggcaccaccgaaaccgactcggacgagtcctctccgcgtggggtgggggcccgcggtcccggctccacctccaacccgatcctgacacgcctcgcggtgtcgcggaactcgagcccgctggccgcggccaccgcggccccaggggtctgcctcctccgcttcgcctgggagtccgccgcgggctccctcgtcggcgccgtcgttggctacggtaaaggtttggttatgatgaaggggattaaaggatcatttgctgatgctgcgtcatctgctaagatatttgctgttcttgctggtgttcaaagtttagtagcctgctctttgagaaaactacgtggaaaagatgatggaatcaatgcaggagtcgcaggctgttgcactggccttgctctgagctttccaggtgcaccacaaactctgattcagagctgcttgacctttgggactttctcttacatcattgagaagctaaacaagcagcaacctgcgctggcgctcctgcctgcgacaggtgtgatggatccgaaggctggacaaagcgttcttccttccttcacacttcctcctctggataccatggacgaattttctaagttccaaaactttttgtcatccaaatttcggggaaactgagttatcctggtggagtgacgcctagttatctactctggaacgtgtccttgtaaatgcgtcaatggtcaatctgagttttttttccccttgtttattcttcgccaatgtatgtttccaaattccaaggtagtgttttggtagtgttgatgattctaccttgacatatcgaacacaatttgtaaataaggcgagcagcttgtcctttgttcaactgattggatcttcggagttttacccacagaccgtgccccgtaagaaggaagaacatgcaccttgattcttacgagtgtgt

SEQ ID NO: 99644 - DNA, 591 bp, Zea Mays
cacgacacggtcagtccgcagcgcactgcagtctgcgcgtggcggtgcacccattccttctggtcccgtgacaagcagcgcgctagacacacacgcgcgcgaacacgaacagggacacgaggccgcggcggccatggcgagaggcggcggcgatcggagtcgggaggatgatcccttctccgacggcggcaccaccgaaaccgactcggacgagtcctctccgcgtggggtgggggcccgcggtcccggctccacctccaacccgatcctgacacgcctcgcggtgtcgcggaactcgagcccgctggccgcggccaccgcggccccaggggtctgcctcctccgcttcgcctgggagtccgccgcgggctccctcgtcggcgccgtcgttggctacggtaaaggtttggttatgatgaaggggattaaaggatcatttgctgatgctgcgtcatctgctaagatatttgctgttcttgctggtgttcaaagtttagtagcctgctctttgagaaaactacgtggaaaagatgatggtgtgtatttgtctgtgttctgttcatttctttttttctattcctcttaattaat

SEQ ID NO: 99645 - DNA, 103 bp, Zea Mays
atgcaagttcagcctacaagtttaaccaaaaatgacaaaagcactacaatgatatcaaaaggtggaacatgtagtccactcccccatcactgaagctgagaaa

SEQ ID NO: 99646 - DNA, 407 bp, Zea Mays
ggtggacttccggatcgttcttagggattttgcccgaacttcggtaaaggcacctgatctttgctttgggaaggaagggatgtagcagcacggccaccacacttttaaataaaggaataactgattaataatgatgttaaacaggaagagtcaagtctagggaattattacattctaatctttcatggtagttgaactgtttagtttggtgggctgagatgtctatcttttgtctggtcatgaatgttcttttctattgttgcattttgattatactatgtcaattatctttcttttatatcctgtataaactatatgcttcccttgttatgctactttcaagggaggtgctgccggattttgcaatactttctttctctatgtgttgcataagttttgtagaaagg

SEQ ID NO: 99647 - DNA, 216 bp, Zea Mays
aagttatgctcatatgcttgtgattgtactaagcctatggttcactattgtaggttgggtatatttgattcttcaattgactctagggagatgagacatcaaggacgacgatccagagccttgccatcttattcttcccaggccatcaaccagatatatgtatctgcagttcaagagtacacctaccttatattgacaagaaaaaactacttttag

SEQ ID NO: 99648 - DNA, 565 bp, Zea Mays
acggtaaatattgatttagagaatgaaatttaagggacgcgcgcgttgctagaaacagctaccggataatcaacccattcaaatgacaagagtacaaaactattcgtcgacggcatcttggctgcttacaaatacactagcccctgtctaaccttgctacactgcacacctgacaacttcatgtcatcacgtgcttgttccttgcgtggacatgatgcatctgtgtactcggtgtctggaacgtcacgacaacgccgcccgtggcgacggcgcagcaccggcgtcgaagagtgcctccatctcctcgaggctcctccccttggtctcaggcaggcacgcgtagacgaacacccacgccgccgcggacatcgccgcgaagatgtagaaggtcccggccatgcccaccgcctcgtacatcgggatgaaggtcatccccacgatggcgctcatcacccggttgaccgccgtcccgacgccagtcccctgcgcgcgcagccgcagcggcaggatctccgacccgtacatccagatcacgggtccgaaccccagcgagaaggtcgccatg

SEQ ID NO: 99649 - DNA, 626 bp, Zea Mays
tgaaatttatagaatcctgctgtagatattgaagatatagaggatattgtaagtgtaaaggacggtaaatattgatttagagaatgaaatttaagggacgcgcgcgttgctagaaacagctaccggataatcaacccattcaaatgacaagagtacaaaactattcgtcgacggcatcttggctgcttacaaatacactagcccctgtctaaccttgctacactgcacacctgacaacttcatgtcatcacgtgcttgttccttgcgtggacatgatgcatctgtgtactcggtgtctggaacgtcacgacaacgccgcccgtggcgacggcgcagcaccggcgtcgaagagtgcctccatctcctcgaggctcctccccttggtctcaggcaggcacgcgtagacgaacacccacgccgccgcggacatcgccgcgaagatgtagaaggtcccggccatgcccaccgcctcgtacatcgggatgaaggtcatccccacgatggcgctcatcacccggttgaccgccgtcccgacgccagtcccctgcgcgcgcagccgcagcggcaggatctccgacccgtacatccagatcacgggtccgaaccccagcgagaaggtcgccatg

SEQ ID NO: 99650 - DNA, 990 bp, Zea Mays
ctgcaattggatgaacccatcagtatcattgagaacctgaagagcaagtgttccttgaacatcaaagttattaataccaccatctcttttaacaacaacattgagcttctcttctatagttactgtgacagggtcacttggaagagcagatgatcttgtagaaactgcacttggttgtacatcctccaaaatgacttctccttcggctttcaaagattcaaggaattgatttgtcttctgtgtcttgcctaatttcataccaaaacctttaccaggtgcagtagctgctgtagatggacggcctaaatgcacgagcctccttacctttgggcttgctagcaaatgagtccatgtcagtgctcagtccacctaatccagaaccactgatgctcatgtcactgaaagttttttcaatcacgcgtggaccagatattgatgagtatcctcctttgtcaagtttgcctctttccatcctcattttgtcaagctcattagccctcttcttcatgagatccttggtttcattgattttggtttgcatcatcagcttgtgtgccttctcttcatggctctccatctcacaatattgtttgacttgttgcactgttacattttccttgttcccaagagatatggcttcatcgaaagcaaatataatctcaaatgctgttttacaaataccctcctcatccaatgaaggggaagtaggatacgagcttggagaggagcctcaaagtgtccagatcttcaagaatattgctctgcttgtttgtgataagtagaagatataaaccttcaataggttgataaacatatcgcacattttcagtttcgacataagtgtgctgcttcccagttccaaccagttttgggaacgcagcaagtaatccttcaattcttatgcgagacatgtcaacaaactgtcttgaaacaagtgctgcaattgaaaacacaaaaaagaaaagccctcagctaagtctgttcactact

SEQ ID NO: 99651 - DNA, 2164 bp, Zea Mays
cgacgcccaaacctccccgctcaggcgatgccatccatggcgtcttccgcagccttctcacacgcaggaattagtcaccctcgttttctccatgccaagcctgcatgtcctcccaaaccagtccccgcgcagcgtccatcccgcccggagctcatcagcgccgcctccaccccccgcacgtcccaggctgagctccgtccggactccaagaacgcctccgcgctgtccgctgaactccgccgcctcgcgcgcgcggggcggctcccgtccgcgctctccctcctcgaccacctctcccaccgtggcgtcccggctaccgcctctgcattcgccacgctcctctcggcctgtcgctccctcctccacgcgcgccagatccacgcgcatctccgcatccatgggctggacaccaatgagttcctcctcgccaggcttgtcgagctgtacatcacgctcggcgccactgacgacgcgcgcggggtgctcgacgggatgcagcagcacggggcgaccgcctactcgtggaacgcgctgctgcacgggcacgtccgctggggacgcggggaggcagcgggccccgtcgccgacgcgtttgccgagatgcgcgccgcgggggccaacgccaacgagtacacgtatggctgcgtgctcaagtccatctccgggagcgtcaggccgtcgatgaccatggccaccgccacgcacgcgacgctcgtcaagaacgctttcgcaggcgcgcccgggatgctgatgactgggctcatggacgtctacttcaagtgcgggaaggtgaagctcgctgtgcgagtgtttgaggaaatgcctgagagggacgtggtcgcgtggggggcagccattgctgggttcgcacacaaggggatgaagcgcgaggccctggaacattttcggtggatggtggaggatggggtcaaggtgaattgtgtggtgctctcgtcaattgtgccagtcattggagagctgcgggcgcgcaacttgggtagagaggttcatggatttgtcttgaagaaattcggaaatcgtaaagatgttgcaaaggtccaggcggggttggttgacatgtactgcaaatgcggtgatatgatctcaggtaggcgagtgttctataacagcaagaagaggaatgctgtgtcgtggacagctttgatgtctgggtatgcatccaatagtagaccagaccaggcgctgaggtgcatagcttggatgcagcaagaaggaatcaggccagacctcattgctgtgggaacagttctcccagtctgcacaaagttgaaagcgctaagggagggaaagcagctccatgcatatgctttaaggaggtggttcttgcccaacgtttccttatgcacgtcactgatcaccatgtacggtacatgtgaccacttggaatactctcaccgagtattccatgatatggacaagaagactgtacaagcttggactgcattggttgatgccaacctcaagaatggagacccatttactgctatggatttgttcagatctatgctgctgacaaaccgcaggcctgatgctgttgccatcaccaggatgttgagtgcctgcactgatattggagcattacgagtcggcaaggaagtgcaccgtcaagtgctacagttgcggatggaacaactccctttggttgcagcagaagttgtaaacatgtatggtaggtgtggagacctcaaagcagcacagagggtttttaatcgaacagagtccaagggatccatgacctgcactgcgataatagaagcttatgcggtcaaccaacgccataaggatgcgctgcatctctttacttggatgctgtcaaataaatttgttcctaccaaggccacattcgatgtggttctgaaaatctgcgaagctgcagggttgcatgatgaagcccttggaatttttaactctatggtgcaagaatacaaactagaaacatcccaagagaattttgactgcatcatccgcctccttactgatgctggcagaatttctgaagcacaacgctttgctgacctgaaatctacactgtttaatttaccaactccgcttttgaactctgaacaggaatagttttgtacagattcttttccttctacactaacaatatttgttgtatgttttttcaaagagttactgttgg

SEQ ID NO: 99652 - DNA, 1621 bp, Zea Mays
ctctcaacggtcctagcaatcgcgtcaccgtcttctccatcgccggtgctcccttactctcgatggcatcctcggccgccgctcgccgccttctcctcctccgccaccgccatgggaaccttctccccaaacgccacttctcttcctcatccgctcccgacggcctcgacgacggcggtggccgcgtcaagatcttcgaccgcgacctgaagcgccggcaccgggaccgcgcggcgtgggtgatgcgtgagaccgatgggctcgtggatgcggtcgctgagaatctcctagaccgcctcgaggactgcaggaaagccttcccctccgcactctgccttgggggctccgccggcgccgtccgccgcttgctccgtggccgcggtgggattgagaggctgatcatgatggacatgtcagccgatatggtgaagaagtggcgagagtcagagaatgccactggtgatgggcctgagacccactttgttatcggcgatgaggagtttcttccaatcaaagagagctcacaggatttgataatgagctgtcttggacttcattggacaaatgatctacctggagcaatgatacaggctggcgttgcaacctgatggcctttttctggcagcaattcttggtggagaaacactgaaggagcttagaattgcatgcacagttgctcaaatggaacgcgaagggggcatcagtcctcgaatgtcccctttagcgcaagtccgtgacgcaggaaaccttttgacaagggcaggctttacccttccaggagttgatgttgatcagtataccgttagatacaataatgctttggaacttgttgaacatcttagagcaatgggggaaacaaatgctctctttcaaagaaatcctgtgttgaaaagggatacggccttggcaactgcagcaatttaccagtcaatgtttgggttagaagacggatctattccagcaacctttcaagtaatttacatgactggctggagggagcatccatcacagcaaaaggctaagagaaggggttctgcgaccatatcattcggtgatatacagaaacaatttggtcccagtgagaactgagcctcactgcttcagaaatgtgttcccaaaccccactcaggctttgtttgggtaaagaggaactgaagtggattgaggtgtattgaaaggactgaaagggaaattagttcatgttacacttcaatacaccccataccacctcaattcactccaataagagattacccaaacaggcctcatgtgagagcctccggagctgggtctaaccattttagtattcccaaacccttgatcgaaaattaaaaaaaaaaacaacatttgaggaaagaaaagaaatcctctggtggttccacccaacggctttgtattcctgaaggttgatgtttgtggtgggcttctgttgcctgttgtatgaacatactgagtttgatggaatccagcaattgtgaaattcatctgtagtgttactccacccacaaggttcgctagtggcgtgctgcaatgttacaagacaccaccactgttgtggtagacctgtgagtgcaaagaaacttagaaatttatttactcccttaacaaatgtgttcaagtt

SEQ ID NO: 99653 - DNA, 1626 bp, Zea Mays
caaatttctctcaacggtcctagcaatcgcgtcaccgtcttctccatcgccggtgctcccttactctcgatggcatcctcggccgccgctcgccgccttctcctcctccgccaccgccatgggaaccttctccccaaacgccacttctcttcctcatccgctcccgacggcctcgacgacggcggtggccgcgtcaagatcttcgaccgcgacctgaagcgccggcaccgggaccgcgcggcgtgggtgatgcgtgagaccgatgggctcgtggatgcggtcgctgagaatctcctagaccgcctcgaggactgcaggaaagccttcccctccgcactctgccttgggggctccgccggcgccgtccgccgcttgctccgtggccgcggtgggattgagaggctgatcatgatggacatgtcagccgatatggtgaagaagtggcgagagtcagagaatgccactggtgatgggcctgagacccactttgttatcggcgatgaggagtttcttccaatcaaagagaggatttgataatgagctgtcttggacttcattggacaaatgatctacctggagcaatgatacagtgtaggctggcgttgcaacctgatggcctttttctggcagcaattcttggtggagaaacactgaaggagcttagaattgcatgcacagttgctcaaatggaacgcgaagggggcatcagtcctcgaatgtcccctttagcgcaagtccgtgacgcaggaaaccttttgacaagggcaggctttacccttccaggagttgatgttgatcagtataccgttagatacaataatgctttggaacttgttgaacatcttagagcaatgggggaaacaaatgctctctttcaaagaaatcctgtgttgaaaagggatacggccttggcaactgcagcaatttaccagtcaatgtttgggttagaagacggatctattccagcaacctttcaagtaatttacatgactggctggagggagcatccatcacagcaaaaggctaagagaaggggttctgcgaccatatcattcggtgatatacagaaacaatttggtcccagtgagaactgagcctcactgcttcagaaatgtgttcccaaaccccactcaggctttgtttgggtaaagaggaactgaagtggattgaggtgtattgaaaggactgaaagggaaattagttcatgttacacttcaatacaccccataccacctcaattcactccaataagagattacccaaacaggcctcatgtgagagcctccggagctgggtctaaccattttagtattcccaaacccttgatcgaaaattaaaaaaaaaaacaacatttgaggaaagaaaagaaatcctctggtggttccacccaacggctttgtattcctgaaggttgatgtttgtggtgggcttctgttgcctgttgtatgaacatactgagtttgatggaatccagcaattgtgaaattcatctgtagtgttactccacccacaaggttcgctagtggcgtgctgcaatgttacaagacaccaccactgttgtggtagacctgtgagtgcaaagaaacttagaaatttatttactcccttaacaaatgtgttcaagtt

SEQ ID NO: 99654 - DNA, 1255 bp, Zea Mays
caaatttctctcaacggtcctagcaatcgcgtcaccgtcttctccatcgccggtgctcccttactctcgatggcatcctcggccgccgctcgccgccttctcctcctccgccaccgccatgggaaccttctccccaaacgccacttctcttcctcatccgctcccgacggcctcgacgacggcggtggccgcgtcaagatcttcgaccgcgacctgaagcgccggcaccgggaccgcgcggcgtgggtgatgcgtgagaccgatgggctcgtggatgcggtcgctgagaatctcctagaccgcctcgaggactgcaggaaagccttcccctccgcactctgccttgggggctccgccggcgccgtccgccgcttgctccgtggccgcggtgggattgagaggctgatcatgatggacatgtcagccgatatggtgaagaagtggcgagagtcagagaatgccactggtgatgggcctgagacccactttgttatcggcgatgaggagtttcttccaatcaaagagagctcacaggatttgataatgagctgtcttggacttcattggacaaatgatctacctggagcaatgatacagtgtaggctggcgttgcaacctgatggcctttttctggcagcaattcttggtggagaaacactgaaggagcttagaattgcatgcacagttgctcaaatggaacgcgaagggggcatcagtcctcgaatgtcccctttagcgcaagtccgtgacgcaggaaaccttttgacaagggcaggctttacccttccaggagttgatgttgatcagtataccgttagatacaataatgctttggaacttgttgaacatcttagagcaatgggggaaacaaatgctctctttcaaagaaatcctgtgttgaaaagggatacggccttggcaactgcagcaatttaccagtcaatgtttgggttagaagacggatctattccagcaacctttcaagtaatttacatgactggctggagggagcatccatcacagcaaaaggctaagagaaggggttctgcgaccatatcattcggtgatatacagaaacaatttggtcccagtgagaactgagcctcactgcttcagaaatgtattcccaaacccttgatcgaaaattaaaaaaaaaaacaacatttgaggaaagaaaagaaatcctctggtggttccacccaacggctttgtattcctgaaggttgatgtttgtggtgggcttctgttgcctgtt

SEQ ID NO: 99655 - DNA, 192 bp, Zea Mays
atgcagatcatgcagcaagaaattcactttcttaaaaataaggaaagcatacttaaatcagcaaataaaattcttcaacagaaggaatgcatcctgaaagcagcaaacgaagttctccaacagaaggaaaatgagcacaatgaatttataaacaacagattggtcttttctggtttcatctccattggctag

SEQ ID NO: 99656 - DNA, 393 bp, Zea Mays
cgccctcgcctgctgctgtgtcatcgactcaccggcatcgcccagctcgctttgcgcatggagcttgcgcgcgcatcgtcgatggtgccttggccttctctctgcttgctgcgagcctgctaacgccgcccctcgccacgccgtactgctcagtttcctacagcacctgttcagcccatcaatgtatctacttgttcgctggtcgcactcgtctcgtctagcgcctctgccgtccatttgtttgcgtcgttcgccgtcaacctgcttggacctcgcctcggtcaagcctttctgttcctgccgtcgtgggttgtcgtcgttcgtcttcgcgtcgtgtgtgcagcaacgtcgctgattcctccatagtgcttatcgacgaactttgcttcattg

SEQ ID NO: 99657 - DNA, 3897 bp, Zea Mays
atggggactatgtttggagcgtgtgttggcccaagtgagcttcacttgaggaaggaacttactgctttgcaaaaggcgcgctgcttgcaggaccctgacacttgctcaacatggagatcacctttgagttctaggtcactggtggcaacttcaaggattacatacaacggtggtatttctagtaatttagcaccaaagcacaatgagtcaccttgtgcacctccaaacactgataagaaaagaagaaaggtttatctctacaattggaggcagaattcttataaatctagtgaaagcggaatgaagatagatgaggatgtcaagcaaccatctggtgatctaagcctggacagtccatgcaagtctaatggggtaaagtccaaaggtgatgcatatctggatcctccagccagcatctacaatgttcagagttcaacatcatgtactcctgtcaaaagaatagctagaaggagaaatggtgttttgtccaagaaaggagcagtcagaaaccaagctataccgaagttgtcagatcttcaggttaactctggtgagccatctgaggatactgagaactgcaactcagaggctctggagatacttcgaagaggctacttatctcatcctgcatctccgctatttgctgcatgtggttgtgtcagctcttcaaatccttcaaaactactgaaaataggtagaagagagggatcttccttttcttgcacaccggtttctactagctcctattacaggcatgtaagaaggaacaccagcactgttggttcttgggatgctaggactgctacttctcttgatggtgatgagtctaaccaatcagcagttctgagaagtcagaggtcgcatgtcccttgctatgtatcaaagaggagaaaacatcaaggatctgaaggaagtaattattctccttcactatccgctatacttcgaagaaaaggtagcagcctaatatgtgggagccagacaatgcacaagaagaagaaatcatttggttcaatgaaatgggcacattcgaagaagtctgctcagggaatgccacttttgggtaatagctgtgattttggttcgtcgtcatttgattcatcaagtgatgatctctcaaccaatataggggagcttgatatggaggcttcaagccggttggatgggaaaagatggtcaagctgcagaagccaggatgggatggatctatctgttcattgtgctgatctgcacgagtcagacccgagaagcttgagccaaaaatatagaccaagagcattcccagaaattgttagtcaaaatattgcagtccaatcacttagtaatgctataacaagggaaaggatagctcctgcctatctttttcaaggtcctcgtggaacaggaaaaacatcgactgcaaggatattttcagcagctttaaattgccttactactggagataataaaccctgtggggtatgtaaccactgcactgacttcttcagtggaaaagctagcaatataaaagaagttgatgcaagtaacagaaagagtataggcataattaagcacttgctggaaaatttgccgccatctgcgcctttgtcccggtacaaggtgtttgttgtcgatgaatgccacatgataccttccaaattatggtcagcatttatgaagtttcttgatgaaccatttccttatgttgtgttcatatttattacaatcgacccgaacaacgtacctcgagcagttgtatcacgttgccagaaatatgtgttctctaagatcaaagatattgacactgtgtgccggctgaggaaaatctgtgtaaaggaaaatcttgatgttgagctagcagctttggatttgatagctctgaattcagatggctcgctacgagatgcagaaacaatgttagatcaattgagcttgttagggaaaaagataactccttcacttgtcaatgatttggttggtgttgtctcggaagagaaattgcttgatcttctggagatagctatgtcaggagacacggctgagacagtgaaaagatccagagagctgatggattctggcactgatccaatggcattaatgtctcagttagctgggctcatcatggacatcattgctggcacctacaaattggctgatgttgcttgttgtaatggctcagcagttggtggtcgaagtttaacggaagcagagttagaaagattacaacaagcattgaagattctttctgatgctgaaaagcagataagcctttcaagtgagcgtcccacgtggtttactgctgccttactacaacttgggtgtggtcatagttcagatgtgaaccaacaaaaaggcagtactcaagaacaccataaagtagccaatgatgctatgtctgagatagcaagggaatcatccagcagaactttttctcattcattatctgcctttggcatttctaagagaacgcttgactccaaaacaattagtgtgcactcgagtcctcaggtccttgcctcacattcatctcggttgagactgaatgacaacttggtttatggagagtgtaggtctgttgatagagttccactcaattctaatcaactgaatggcaactgttcccagcaaagggccctggtaaatggaatctcagatagccttgctcaggtttggataagatgcattgagaactgccactcgaagacattacagcacctacttcttgaccatgggaaactagtatcaatcaggcaatttgagggccacgcgactgcttttattgcaattgaggactgtggcataaaatctagagctcaaagatttttgagtagcattaccaattcacttgagacggtactgaaatgcaacgtggaagtcaagattggtccactagcagaattgatggacggagaagtaacattagaggctggtcctaatgtaagaagatacgagtctgacgtcttgagttgctcatcaaacagtgaccgactaaagggagctttagattcaaggagaagctctggtcatcctgatgaagtaaagaaagaactggaaacgtacaaagaagttcccatccagactacaaaagaaccaacaattgacgaccagcgactggaaagtgcatggctccaggttactgagaagcacacacctggtctggtggatcaggcactacacgatcaacatcaggttctgtctcaattttctggcaaccaacaccaaaggaagtcctcgatgtccctagttgtgccctcaagccatgtagatgaggatcttgctcatcagatagaagcgctgaagattgttgacagttatggttctcagaagcaccagagtggaagaagtgaaagcggcttttccgtttcaccaagcagaatgcacaggaaggatgacatggttgattgcgacaaagagagcgtatgctctgagcttggaaaatcgagatgccatggccttttcccttgttggaaatctcaaaaaccaaggggagtaaagacgaagaggcatatgcgggtgaaatcttcttcgtctggcagacttgtttaacatgccgatgatgatgtagcgagcctgggagtagaatacgtgttggaacggaattcgtgtttgaaatggttcttgtttttgcaaaatgacacattgttgtttcagaagaaaaggaaatttgaattgctagaacattaaattcagcatccttctctcgtggccgcatatttttggccttcatggggtagggcaggattcagggacggaggtcaatttctccagcaatcagctgcacgtgtaatcttgattttgtatttatatgtgtcctagtaaagttattatgtgctccttgttatcttggggaaaaagaaagagactatatcttcaggaacctcacatgaatgaaactgatgaatatagatttaagttacc

SEQ ID NO: 99658 - DNA, 704 bp, Zea Mays
gtccatcctctttctcaccgttgctgcacgccaggagcaggccctcgacctcccagccgagcggtccttgttcccatggcgcgtgctcgacttcagcctggaatccctttgccgttgccatgacagccgccggccgagtctcttcctgtcgtgtgtccagtcctctgcgcagcgcgcgcgcctggctcgcttctcttgcgcgcggtcctctgttcctgcgtgcctgcgcgcagctcgctccctggctcgactctgcccagttcgcgtcctgctcgccggtcgaattctttgcgtcgcgcgtgtagcgttttgttattcctgcgcgtgctgccgcaaagctccatgttcagttcacctccgtcgcgttgtcgtgcgcgcgaaactgtttgcagtcgatatcaagtccgtgacacgcgcgccggacactgtaaagcgttgtgtaggcttgtatccgagtccgctcgaccgtgacctcgctttgcttctcgtgtcgctactcgccaagtcctttccctagtccgcgccataaaattcactcggacacgatctcgtcgtcgttccgtgcgtcatcaagaaatcccgagaatcgggtgaagacgaagctagcagcatggtatttaccaagtgctcgacacaagagctaaaccagaatccttgccgtgttcgcggatagcgcgtcagatttagaatggtaagccgattta

SEQ ID NO: 99659 - DNA, 639 bp, Zea Mays
atggctgctgctcctctctccctcatctctgcaactccgcgcctcctctgctcctccacctgcagttcgccccatgttctggacgccaaccctcccatccccctaccctccagccatggatgccccagctcccttttgttgctcgctagggaccagctcggtgccctctcctcatttgaagccggcaacagcgccttggtagtggtcgagcagcacgtcgtcggctccgtgggttttttgggcagcccggttgcggtgtcgtcaaaccccgctacaactgcaaatagtacaagggacaacagtagagaaaacaaatgcggtgagaatgagaatcaaggattgtttgatttctcttgtgggattttggtggtgtcgatgctggagagtgaattcgaggaacgatgggccaatggagaaatacctggatggggaaataaaggcgcagaaaaaaggtctaaaatagatcttgattactacagcacagttgaagaacttgttgagcttggcctagaaaaattaaaacaggctttatctgctcaaggtttgaagagtggtggtactgttcaacagcgtgcgtatcggcttttcttgctaaaggtacttgaatgctatacagacaaatgcacaccatcttattag

SEQ ID NO: 99660 - DNA, 907 bp, Zea Mays
aattttctttgtataactaaagcagtctgatggagtcaccttctggtggttgcgttgcaggaaacgtctcttcaccatgatcaataatcttcccagcatatatgaggttgtcacaggaacagccaagaaagagtccaaagaaaaaactcctaaaagcagcaacaagactaacaaatctggctcaaagccttcacgccaggtagaacccaactccagggtcccaaagatgccacctccaaaggacgaggagagtgaaggggaggaaggtgaaccacaggaagaccatgagagtgcgctgtgcggcgcatgtggcctaggttatgacgacttctggatctgttgcgacttatgcgagacatggttccacggcaagtgtgtcaagatcaccccaaataaagcggagcacatcaagcagtataagtgcccctcgtgcacaggaagcaagagggccaaggcttgattctatctatctacgatatagatatgaattgcggacaatgctccaagaaccgaggagcctttgacgagagttgtaagatgaatcttccgggtagggcagctaatagatttgaatacttcgtgtggatactgtcggcattggtgcttgagatgcctcaaaatatagtgtcagtactgatcaactgttaactgttgtagtttgtggggccctcaggcatctatgttctgtagtctactgtgtggtggtttagataccgtctatgccatttgtgatgaagcagtcgttttaaagttagatcccagtaatttccctactatacatttgtcttcgtgtaatcgtgtttaggcagaatctagcagtgaaggtcaggtcccgattgtttatgcattcgaagatgtcggttaaatatgtggagtcgtagtggttctgcttgtttgtgtgctctcc

SEQ ID NO: 99661 - DNA, 1421 bp, Zea Mays
caaatagggccgcaaactatcggactcattggaaggcccgcgactgcggctgcgcctgcgcccgaccaaacgtaggagacccatctcctctcttttctttccaagaaaagtcttctcttctctgtctcagcgccgacgcttcccaactccttccaatcgattcttcgtctcgtcctcgtgtaatccccagcttgccctcctcgctcttccctcccaaaaccctacgcctccctgaccaagctccggggacgaatggacggaggagccggcttccctggcacgccggtcccgcgctcgccggaggacgttttccgggactaccgcgcgcgccaggccggcctaatcagggcgctcaccaccgagaaggataatttatgtttatatggacttcccaatgagacatgggaagtaaacttgcctgctgaggaggttcctcctgaactcccagagccagctctcggaattaattttgctcgtgatgggatgaatgaaaaagattggctatcacttgttgcagtgcatagtgattcttggctaatgtctgttgcattttattttggagcaaggtttggattcgacaaggaatccaggaaacgtctcttcaccatgatcaataatcttcccagcatatatgaggttgtcacaggaacagccaagaaagagtccaaagaaaaaactcctaaaagcagcaacaagactaacaaatctggctcaaagccttcacgccaggtagaacccaactccagggtcccaaagatgccacctccaaaggacgaggagagtgaaggggaggaaggtgaaccacaggaagaccatgagagtgcgctgtgcggcgcatgtggcctaggttatgacgacttctggatctgttgcgacttatgcgagacatggttccacggcaagtgtgtcaagatcaccccaaataaagcggagcacatcaagcagtataagtgcccctcgtgcacaggaagcaagagggccaaggcttgattctatctatctacgatatagatatgaattgcggacaatgctccaagaaccgaggagcctttgacgagagttgtaagatgaatcttccgggtagggcagctaatagatttgaatacttcgtgtggatactgtcggcattggtgcttgagatgcctcaaaatatagtgtcagtactgatcaactgttaactgttgtagtttgtggggccctcaggcatctatgttctgtagtctactgtgtggtggtttagataccgtctatgccatttgtgatgaagcagtcgttttaaagttagatcccagtaatttccctactatacatttgtcttcgtgtaatcgtgtttaggcagaatctagcagtgaaggtcaggtcccgattgtttatgcattcgaagatgtcggttaaatatgtggagtcgtagtggttctgct

SEQ ID NO: 99662 - DNA, 1416 bp, Zea Mays
tcggactcattggaaggcccgcgactgcggctgcgcctgcgcccgaccaaacgtaggagacccatctcctctcttttctttccaagaaaagtcttctcttctctgtctcagcgccgacgcttcccaactccttccaatcgattcttcgtctcgtcctcgtgtaatccccagcttgccctcctcgctcttccctcccaaaaccctacgcctccctgaccaagctccggggacgaatggacggaggagccggcttccctggcacgccggtcccgcgctcgccggaggacgttttccgggactaccgcgcgcgccaggccggcctaatcagggcgctcaccaccgatgttgagaagttctacgtgatgtgcgacccagagaaggataatttatgtttatatggacttcccaatgagacatgggaagtaaacttgcctgctgaggaggttcctcctgaactcccagagccagctctcggaattaattttgctcgtgatgggatgaatgaaaaagattggctatcacttgttgcagtgcatagtgattcttggctaatgtctgttgcattttattttggagcaaggtttggattcgacaaggaatccaggaaacgtctcttcaccatgatcaataatcttcccagcatatatgaggttgtcacaggaacagccaagaaagagtccaaagaaaaaactcctaaaagcagcaacaagactaacaaatctggctcaaagccttcacgccaggtagaacccaactccagggtcccaaagatgccacctccaaaggacgaggagagtgaaggggaggaaggtgaaccacaggaagaccatgagagtgcgctgtgcggcgcatgtggcctaggttatgacgacttctggatctgttgcgacttatgcgagacatggttccacggcaagtgtgtcaagatcaccccaaataaagcggagcacatcaagcagtataagtgcccctcgtgcacaggaagcaagagggccaaggcttgattctatctatctacgatatagatatgaattgcggacaatgctccaagaaccgaggagcctttgacgagagttgtaagatgaatcttccgggtagggcagctaatagatttgaatacttcgtgtggatactgtcggcattggtgcttgagatgcctcaaaatatagtgtcagtactgatcaactgttaactgttgtagtttgtggggccctcaggcatctatgttctgtagtctactgtgtggtggtttagataccgtctatgccatttgtgatgaagcagtcgttttaaagttagatcccagtaatttccctactatacatttgtcttcgtgtaatcgtgtttaggcagaatctagcagtgaaggtcaggtcccgattgtttatgcattcgaagatgtcggttaaatatgtg

SEQ ID NO: 99663 - DNA, 450 bp, Zea Mays
atgggtattgtaggcaagcacggccggaggaggagctcggtggctaggagagatggagcagcgtgcgcgggggaaggagatggagcgcggcgtggcgtgcacagggagcaaaggagatgggagccggagcatttgaagcaaacgcccaaggtggaagataaggctgaagctctggtggacgcaggggagatggacaccgcggtcggagaagataagacgcgcgcgagcagaaaaaaatcacggcagacaaatctacagcgagcgacgaggatagagattggctgtgggatattttccctggtgaaaagtccaagcacgttgaggatcagaccaagggaaggcgctgggaaaaatgcagctggtggagaccgtggcgaggagaagccagcacgagctacaccaggacgcacgacaaaagaaaatattagagagagagcgatggaaggatga

SEQ ID NO: 99664 - DNA, 531 bp, Zea Mays
atggcggacaacctccacggcgagctgagcgacggcacaggggcgagcagagaaatagaagccgagctgaggatccactccaaccagggaacggcggccatggcagggaccaggggctacggcgacgagcgagcagaggatatgggtgcgcgccataggaacaagcaggggaagcagagaagggagcgggcgccgcagggaaggagctggggactggcacacggctggaagaggctccggccatggggaaaacaaggggccggggaggaagctgtaggggaacttgcagaagatccaccaccgggagctcagctgccatggtcaggggagccctggccgggcgctcaagaagcgaggcgcgcgcgcacggagccggagggcagggagggagacgcgctggagaagatgggagggcgccaagctagggaggagaaggccacggcgctttccggcgaggtcgcgaccaggcatggagttctatggcgcggagctcggccaggcgtgaacacaggccggccatgggtattgtag

SEQ ID NO: 99665 - DNA, 1946 bp, Zea Mays
aggagccacgcagctctatttaaacacactcccggccgggctgcgctgccataccatccgtcgtcgagctcacatagatagatagcaatggcctgctctccctcggctccgctggctcgtgctgtaacggccattctcctgctggcctccatcatctgctgctgccgctcggcgccgccgggtgcgctcgtgacgcgtctccccgggttcgacggcgccaagctgccgtcgaagcactacgccgggtacgtgacggtggacgagcatgtcgggagcaagctgttctactacctggtggagtcggagcgcgacccggcccgggaccctgtcgtgctctggctcaacggcggccccggctgctccagcatggatggcttcgtctacgagcacggaccgttcaactttgagtcgggagggtcaagtggaaatctaccaaagcttcatctcaacccttatagctggtccaaggtgtctagtgtaatatacttggactctccttctggtgtcgggctgtcatactcaaaaaatgtttcagattatgaaactggtgaccttaagacagccgctgattcacatacttttcttctcaagtggttccagctctatccggagttccagaaaaatccattttacatagctggagagtcatatgccggagtttatatccctaccctcgcaaaccaagtggtccaaggaatccataaaggagataatccagttataaacttcaagggctacatggttgggaatggtgtgtgtgacgtcacctttgatggtaatgctcttgtaccgtttgcacatggaatgggcctaatttcagatgacatatacgagcaaacgaatactgcatgtcaaggaaactactggaactattcttatagtgaaaaatgcgccgatgcagtgtcgaatgtcgatatggtaatcagcggattaaatatttataacatccttgagccatgctaccatggcacaaacaccaaggaagtgatctcacgacgaagtaataataatagaatgccgcaaagcttcaaagatctgggtgtaactagcaggccccttcctgtaagaacaagaatgtttggacgggcttggcctttgagagctcctgtaagagatggccgtgttccatcgtggcaagagctagccgctactaataattttccgtcagttatgtgtatgaacgatgaagtagcgacggcatggctcaaccatgacagcgtcagatctgcaattcatgcagaaccagtcagtgcaattggaccgtggatcctatgcacagatcaattgttgtttcaccatgatgctgggagtatgatcatctatcacaaaaaccttacaagtcagggttatcgagctatcatttacagcggcgaccatgatatgtgtgtaccttacactgggagcctagcatggaccacatctttacgctatggtgtcattgattcgtggcgaccgtggtttgtcaatggacaagtttctgggtacactcaaggatacgagaatggcctcacttttgctactattaagggttctgggcatgcagttcctgagtataaaccacaggaagcattggctttctacagccgttggcttgctggttctaaactgtgaagctcatcaatgcagcagtgttgaatcaaatagagcacaagggatcaaagtacctagcgccaacgatgatgctgcattcttttatccaaataatcatatcgctaatgctgacgttcacatgtattgttgttcactcctttaaggtgtgacaaaatatttgagacaaatttcatttgttttcaaacctgaaaggttacaaacagttgaattaatgtgggtctggcctaaattaatattcaataatagtcaattctaaaggtccaatttaatgctacggtgtactagtactttagtgtcataccgtaagttcaagggataattcaatcaacttaaat

SEQ ID NO: 99666 - DNA, 960 bp, Zea Mays
acttctctctttgtctgcgcttccaacgcaggaggcgttgcggccatggcggcttcgaagcccatcttgtatagcgcgtggatcagctcctgctccttccgagtccggatcgccctcaacctcaaaggtgtggattatgagtacagggctgtgacaaggaacgatctagattacgaaaagatcaatccaatcaagtatgttccagcattggttgatggggattttgttgtttctgactccctggcaatcatattgtatcttgaagataaatatcctcaacaccctcttttgcctcaagatctcaaaaagaaagctataaatctgcagattgcaaatatagtttgttcaagcattcaacctcttcaatgttatgctgtaattggtctgcttgatggcaccttaggctctaaccagagccttcagattgttcggaattacaccgacaagggatttaaaggttgtgacagtaaatatgctactggagacgaagtccaactggcagatgtgtttcttgcgccccagatgtatgcaggcgtgacgcgcttcggaattgatatgtcaaagtaccctcttctggagaggttctacaaagcctatatggagatcccagcatttcaagtcgcggttcctgaaaaacagccggatgcgcctgcgtccccatactgaaacggaggcagcaaccatattgatattcaaattgatttggttatcttggaatcatgttgtatgtagcatgacatagaaggccacgatgtatgcctatttgtttcgtacacattctggtttgtccgaagaatttcacagtaaataaggcccgatgatttgtgtagtagtgttaatagaaaaaagaaacagaatgcatggctcctgttgtactacatatgctaaaaaaatctgcgatgccaaatgcaaatgactcctcgttggacagagatgaggcaccgaccaattcaaattaat

SEQ ID NO: 99667 - DNA, 1136 bp, Zea Mays
tccctacgtcatttcgtcaaaatcgagcactgtcgtgttcttatccggtcccgaacaaacaaccccgcttctgccggccgttttggtacttctctctttgtctgcgcttccaacggtagctaactccaaggcaagcatccttggtccattgttggcctcgctcatcaatcagctgtgtctcagcaggaggcgttgcggccatggcggcttcgaagcccatcttgtatagcgcgtggatcagctcctgctccttccgagtccggatcgccctcaacctcaaaggtgtggattatgagtacagggctgtgacaaggaacgatctagattacgaaaagatcaatccaatcaagtatgttccagcattggttgatggggattttgttgtttctgactccctggcaatcatattgtatcttgaagataaatatcctcaacaccctcttttgcctcaagatctcaaaaagaaagctataaatctgcagattgcaaatatagtttgttcaagcattcaacctcttcaatgttatgctgtaattggtctgcttgatggcaccttaggctctaaccagagccttcagattgttcggaattacaccgacaagggatttaaagcaatcgaaaaacttctggaaggttgtgacagtaaatatgctactggagacgaagtccaactggcagatgtgtttcttgcgccccagatgtatgcaggcgtgacgcgcttcggaattgatatgtcaaagtaccctcttctggagaggttctacaaagcctatatggagatcccagcatttcaagtcgcggttcctgaaaaacagccggatgcgcctgcgtccccatactgaaacggaggcagcaaccatattgatattcaaattgatttggttatcttggaatcatgttgtatgtagcatgacatagaaggccacgatgtatgcctatttgtttcgtacacattctggtttgtccgaagaatttcacagtaaataaggcccgatgatttgtgtagtagtgttaatagaaaaaagaaacagaatgcatggctcctgttgtactacatatgctaaaaaaatctgcgatgccaaatgcaaatgactcctcgttggacagagatgaggcaccgaccaattcaaattaat

SEQ ID NO: 99668 - DNA, 1038 bp, Zea Mays
tccctacgtcatttcgtcaaaatcgagcactgtcgtgttcttatccggtcccgaacaaacaaccccgcttctgccggccgttttgcaggaggcgttgcggccatggcggcttcgaagcccatcttgtatagcgcgtggatcagctcctgctccttccgagtccggatcgccctcaacctcaaaggtgtggattatgagtacagggctgtgacaaggaacgatctagattacgaaaagatcaatccaatcaagtatgttccagcattggttgatggggattttgttgtttctgactccctggcaatcatattgtatcttgaagataaatatcctcaacaccctcttttgcctcaagatctcaaaaagaaagctataaatctgcagattgcaaatatagtttgttcaagcattcaacctcttcaatgttatgctgtaattggtctgcttgatggcaccttaggctctaaccagagccttcagattgttcggaattacaccgacaagggatttaaagcaatcgaaaaacttctggaaggttgtgacagtaaatatgctactggagacgaagtccaactggcagatgtgtttcttgcgccccagatgtatgcaggcgtgacgcgcttcggaattgatatgtcaaagtaccctcttctggagaggttctacaaagcctatatggagatcccagcatttcaagtcgcggttcctgaaaaacagccggatgcgcctgcgtccccatactgaaacggaggcagcaaccatattgatattcaaattgatttggttatcttggaatcatgttgtatgtagcatgacatagaaggccacgatgtatgcctatttgtttcgtacacattctggtttgtccgaagaatttcacagtaaataaggcccgatgatttgtgtagtagtgttaatagaaaaaagaaacagaatgcatggctcctgttgtactacatatgctaaaaaaatctgcgatgccaaatgcaaatgactcctcgttggacagagatgaggcaccgaccaattcaaattaat

SEQ ID NO: 99669 - DNA, 1170 bp, Zea Mays
aagtaccatctccaaagtgtccccagcggctaatgggtagatcatgtccataccgacgtttgcggcatttggccgttgtcaacgtctccaaagtgtcaaagtcgttccctacgtcatttcgtcaaaatcgagcactgtcgtgttcttatccggtcccgaacaaacaaccccgcttctgccggccgttttggtacttctctctttgtctgcgcttccaacggaggcgttgcggccatggcggcttcgaagcccatcttgtatagcgcgtggatcagctcctgctccttccgagtccggatcgccctcaacctcaaaggtgtggattatgagtacagggctgtgacaaggaacgatctagattacgaaaagatcaatccaatcaagtatgttccagcattggttgatggggattttgttgtttctgactccctggcaatcatattgtatcttgaagataaatatcctcaacaccctcttttgcctcaagatctcaaaaagaaagctataaatctgcagattgcaaatatagtttgttcaagcattcaacctcttcaatgttatgctgtaattggtctgcttgatggcaccttaggctctaaccagagccttcagattgttcggaattacaccgacaagggatttaaagcaatcgaaaaacttctggaaggttgtgacagtaaatatgctactggagacgaagtccaactggcagatgtgtttcttgcgccccagatgtatgcaggcgtgacgcgcttcggaattgatatgtcaaagtaccctcttctggagaggttctacaaagcctatatggagatcccagcatttcaagtcgcggttcctgaaaaacagccggatgcgcctgcgtccccatactgaaacggaggcagcaaccatattgatattcaaattgatttggttatcttggaatcatgttgtatgtagcatgacatagaaggccacgatgtatgcctatttgtttcgtacacattctggtttgtccgaagaatttcacagtaaataaggcccgatgatttgtgtagtagtgttaatagaaaaaagaaacagaatgcatggctcctgttgtactacatatgctaaaaaaatctgcgatgccaaatgcaaatgactcctcgttggacagagatgaggcaccgaccaattcaaattaat

SEQ ID NO: 99670 - DNA, 1140 bp, Zea Mays
aagtaccatctccaaagtgtccccagcggctaatgggtagatcatgtccataccgacgtttgcggcatttggccgttgtcaacgtctccaaagtgtcaaagtcgttccctacgtcatttcgtcaaaatcgagcactgtcgtgttcttatccggtcccgaacaaacaaccccgcttctgccggccgttttggaggcgttgcggccatggcggcttcgaagcccatcttgtatagcgcgtggatcagctcctgctccttccgagtccggatcgccctcaacctcaaaggtgtggattatgagtacagggctgtgacaaggaacgatctagattacgaaaagatcaatccaatcaagtatgttccagcattggttgatggggattttgttgtttctgactccctggcaatcatattgtatcttgaagataaatatcctcaacaccctcttttgcctcaagatctcaaaaagaaagctataaatctgcagattgcaaatatagtttgttcaagcattcaacctcttcaatgttatgctgtaattggtctgcttgatggcaccttaggctctaaccagagccttcagattgttcggaattacaccgacaagggatttaaagcaatcgaaaaacttctggaaggttgtgacagtaaatatgctactggagacgaagtccaactggcagatgtgtttcttgcgccccagatgtatgcaggcgtgacgcgcttcggaattgatatgtcaaagtaccctcttctggagaggttctacaaagcctatatggagatcccagcatttcaagtcgcggttcctgaaaaacagccggatgcgcctgcgtccccatactgaaacggaggcagcaaccatattgatattcaaattgatttggttatcttggaatcatgttgtatgtagcatgacatagaaggccacgatgtatgcctatttgtttcgtacacattctggtttgtccgaagaatttcacagtaaataaggcccgatgatttgtgtagtagtgttaatagaaaaaagaaacagaatgcatggctcctgttgtactacatatgctaaaaaaatctgcgatgccaaatgcaaatgactcctcgttggacagagatgaggcaccgaccaattcaaattaat

SEQ ID NO: 99671 - DNA, 1122 bp, Zea Mays
aagtaccatctccaaagtgtccccagcggctaatgggtagatcatgtccataccgacgtttgcggcatttggccgttgtcaacgtctccaaagtgtcaaagtcgttccctacgtcatttcgtcaaaatcgagcactgtcgtgttcttatccggtcccgaacaaacaaccccgcttctgccggccgttttgcaggaggcgttgcggccatggcggcttcgaagcccatcttgtatagcgcgtggatcagctcctgctccttccgagtccggatcgccctcaacctcaaaggtgtggattatgagtacagggctgtgacaaggaacgatctagattacgaaaagatcaatccaatcaagtatgttccagcattggttgatggggattttgttgtttctgactccctggcaatcatattgtatcttgaagataaatatcctcaacaccctcttttgcctcaagatctcaaaaagaaagctataaatctgcagattgcaaatatagtttgttcaagcattcaacctcttcaatgttatgctgtaattggtctgcttgatggcaccttaggctctaaccagagccttcagattgttcggaattacaccgacaagggatttaaaggttgtgacagtaaatatgctactggagacgaagtccaactggcagatgtgtttcttgcgccccagatgtatgcaggcgtgacgcgcttcggaattgatatgtcaaagtaccctcttctggagaggttctacaaagcctatatggagatcccagcatttcaagtcgcggttcctgaaaaacagccggatgcgcctgcgtccccatactgaaacggaggcagcaaccatattgatattcaaattgatttggttatcttggaatcatgttgtatgtagcatgacatagaaggccacgatgtatgcctatttgtttcgtacacattctggtttgtccgaagaatttcacagtaaataaggcccgatgatttgtgtagtagtgttaatagaaaaaagaaacagaatgcatggctcctgttgtactacatatgctaaaaaaatctgcgatgccaaatgcaaatgactcctcgttggacagagatgaggcaccgaccaattcaaattaat

SEQ ID NO: 99672 - DNA, 1997 bp, Zea Mays
atattctcccaaaaaacccaacactccagtggcggcaaagacctaacatttcaaaatcaatggccaagaaccccaaggcgcccgacacccgcagtggccgttctcccaccagaaggccccgaccacgccgcgccaaggcggtgccagaagcctcctccgcagctgatatcgaagacctggctccctcagtgcctggggccgctgcccctggcgctgccgcacccacggccctgcgcgcacagctgctccggtggtatgacgcgcaccgtagggacctgccgtggcgatgcgtaagcggcagcgaggaagagagggcgtacgcggtgtgggtgtccgaggtgatgctgcagcagacgcgggtgcccgtggtcgtcgcttactacgagcggtggatggcgcggtggccgaccgtacgaagcctcgccgccgctacgcaggaggaggtgaacgagatgtgggcgggtcttggctactaccgtagggctcgatttctgctggagggagcaaagcagatcatcgaaaaggggttgtttccttgcacggcgttagcccttcgtgaggttcgtggcattggggattacacagctggagcaatcgcttcaattgccttcaacgaggttgtcccagttgtggatggaaatgtgatacgagtcatcagcaggctttacaccattgctgacaacccaaaggaatcctcaacagtgaagagattctgggacctcgtaggtcaaatggttgaccctttgagaccaggagacttcaaccaagcgatgatggagttaggagcaacattatgtagcaagacaaagcctggttgctctcaatgcccagtctctagccactgccaagcgcttgcgctttcccgtgaaaaatcatcggttcaagttacagacttcccacgagtggttccaaaggccaaacctcggagtgatttcgctgctgtttgtgtggttcagattgcacaaggcttggaggaagaggcggcagacccaaagggaaatgaccatctctttttgctgatcaagagaccagaagagggcctgcttgcagggctctgggagttcccactggtccttgtggaccaagggaaaaccgatttgctgaacagaaggaaagcaatggacaagtatctgtcaaagttgcttagcatcgacatggttcggaaacctgacgtgatcctccgggaggatgttggtgagcatgtccacattttctcccacattcgcctgacaatgcatgtggagctcatggttattaatctcaaagatggtgtggatcgactatgcaaaaagggtgctgatagcacaaagttgaaacttgtcaacgagtcctgcgtggagtccatgggattaacatcgggtattcggaaggtgtacaacatggtcagggctttcaaggagaaaagcctcgctgtatctgagataggtcatgtacccacgaggaaaaggactagacggttaaagcggtagcctaagcaattaggcagtagaggcaagaactagacggttaaagcaagtaaccgtaagcaaattagggagtagagactgctagctagtgcagtacaacatgcagcttgtgagatgttgatttctgtttcggtgcatgtatctggcgtgctgatgtccaaaactgctaattgttgcaagcttgctggaagaaagaaggctgattggtactcagggctcttgtttatcgcgcaattttcctgcatttccagacgtcaagtgatacacagcgttttagttttatgtacgctttggtttgttccgtttggggccctcttctgctttacgggagcggcaagctggtaatcaaccaacaatggcctttgtctagcgatgatattgtttgttccataacatggtggtacaactggcgaaagaacacaaacgaacccaacaggtttaaattcaatagttcgatgataacagacagctactgcattgaagcagtaacaactaactcattcataataaagtccaccatgttgagatgct

SEQ ID NO: 99673 - DNA, 1849 bp, Zea Mays
atattctcccaaaaaacccaacactccagtggcggcaaagacctaacatttcaaaatcaatggccaagaaccccaaggcgcccgacacccgcagtggccgttctcccaccagaaggccccgaccacgccgcgccaaggcggtgccagaagcctcctccgcagctgatatcgaagacctggctccctcagtgcctggggccgctgcccctggcgctgccgcacccacggccctgcgcgcacagctgctccggtggtatgacgcgcaccgtagggacctgccgtggcgatgcgtaagcggcagcgaggaagagagggcgtacgcggtgtgggtgtccgaggtgatgctgcagcagacgcgggtgcccgtggtcgtcgcttactacgagcggtggatggcgcggtggccgaccgtacgaagcctcgccgccgctacgcaggaggaggtgaacgagatgtgggcgggtcttggctactaccgtagggctcgatttctgctggagggagcaaagcagatcatcgaaaaggggttgtttccttgcacggcgttagcccttcgtgaggttcgtggcattggggattacacagctggagcaatcgcttcaattgccttcaacgaggttgtcccagttgtggatggaaatgtgatacgagtcatcagcaggctttacaccattgctgacaacccaaaggaatcctcaacagtgaagagattctgggacctcgtaggtcaaatggttgaccctttgagaccaggagacttcaaccaagcgatgatggagttaggagcaacattatgtagcaagacaaagcctggttgctctcaatgcccagtctctagccactgccaagcgcttgcgctttcccgtgaaaaatcatcggttcaagttacagacttcccacgagtggttccaaaggccaaacctcggagtgatttcgctgctgtttgtgtggttcagattgcacaaggcttggaggaagaggcggcagacccaaagggaaatgaccatctctttttgctgatcaagagaccagaagagggcctgcttgcagggctctgggagttcccactggtccttgtggaccaagggaaaaccgatttgctgaacagaaggaaagcaatggacaagtatctgtcaaagttgcttagcatcgacatggttcggaaacctgacgtgatcctccgggaggatgttggtgagcatgtccacattttctcccacattcgcctgacaatgcatgtggagctcatggttattaatctcaaaggtagagtttgttggtgtttgtcaccagataaaaagtaatctgtcatccttgaaagcccttcacaccttgcttgctaactaactacaatgtagatggtgtggatcgactatgcaaaaagggtgctgatagcacaaagttgaaacttgtcaacgagtcctgcgtggagtccatgggattaacatcgggtattcggaaggtaactcccaactgaagcatttatacagtatcaagttgcattaaactgaatcaagattgatacgtgagcctcaaaacaggtgtacaacatggtcagggctttcaaggagaaaagcctcgctgtatctgagataggtcatgtacccacgaggaaaaggactagacggttaaagcggtagcctaagcaattaggcagtagaggcaagaactagacggttaaagcaagtaaccgtaagcaaattagggagtagagactgctagctagtgcagtacaacatgcagcttgtgagatgttgatttctgtttcggtgcatgtatctggcgtgctgatgtccaaaactgctaattgttgcaagcttgctggaagaaagaaggctgattggtactc

SEQ ID NO: 99674 - DNA, 330 bp, Zea Mays
atgggagaaaagcagagccgagcggctggggattcagccagcgagcagaggggagatgggaaggagctgctcggctgcggcttgctgctgggcgtgcgtggagaagaaacctgcgcgctggagatttgtaggagacgggagaccaagggcggtggcgggataaggataggagcgctcggcggcgtgattttttttctaggggttgcgcggcgcggtacagaaaaatcaggcgacgagattaaagagatgcagtgagcagttcgacaaattcgtcggcatggatacaagctgacgacgacggccagcccgaccgcggcaaggtgaggggag

SEQ ID NO: 99675 - DNA, 135 bp, Zea Mays
ttttttttttgctattggcacccgtcgaacacacatgacagtcacggcagaggatcacaattcctcgttcctctgctgtcgactgcagagtgcatttgtcgtctacaggtgatctcaatcccaagaaccaagtac

SEQ ID NO: 99676 - DNA, 598 bp, Zea Mays
cctatgactcttctacacgtggtaccaccgtatatttcagatatttgaggagatacagtgtgctcttctggaacttcaccccaacatcatccttactatgatcttgtgcagtacttggcacttcagtgacggcttcaaatacagcattatcttctggattgtgactctgttttggggtcatggctatatcagtttgcatattatctggagccttctgaggcaactcttttattatagcatcaaaatatacagatgcagcttctgcaccttccccaatttgattcacatggacaattagctcaacatcaatatttcctgctttttttctgcaccaggtcaacttccatggaatccttaggagctttggacatattcaaacctagaggaaagacatgatcacatggcagaaacaatcatttacttttgtggaagttgtagagtagctttattaaatactccctccatttatttttctaaagtgtatttggattcgaaaaaaagaatgtagagtatactttgactatcaattactctcatgtaatatgccatatattgcagtaaaatcaacttgtgttgaactatatggtgaatgtgaatt

SEQ ID NO: 99677 - DNA, 2179 bp, Zea Mays
gcaagcgccgccgacctccccacctcggcttctgtctatccctcgacaaaccgacctctcccgccgccgaccgccgtcgatctaccgatcggccggacgaaagacccacctctccccaaaataggcggctgagacatacgttcctatctccccttcgctgccggagaaaagcctcgcagcctgcccctccctcaccttcacctcgatttctctgggcctccgaaccccgccgacaggagcgttccagcatctcctatcccgtgccgcgtacgtctgcacggattagcgttccttctattggtaagtaggtcacataatgtcttctgaagataaagcaatggctaatcgtgtcacttcacactcgccaaaagctatggtgtcggaaccagatcccaacaggatgatgatgtttagatcaaatatggagtattcacaaacaaatggccagacaaatgctgttcttggtcctgtggctatcttttgggacattgagaactgtcctgttccatgtgatgtacggccagaagatgttgctggcaatgttaggatggctttgcgcatgcatcctgttgttaggggtgcggtgacaatgctgtctgcttatggagatttcaatgctttcccaaggagactccgggagggatgccagagaactggagtcaaacttgttgatgttcctaatggacggaaagatgctgctgataaggctatactggttgatatgttcctttttgcacttgacaatcacccaccatcatccattatgctcatatctggtgatgtggacttcgctccggcattgcatatacttggccagcgtggatacaccattgtcattgctattccgtcttcagttaccgtctcatcagctctgagcagtgctgggagtttcgtgtgggactggcctagccttgcccgtggtgaaggtgttgtgatccctaggtccttggtgcgccgtctggctgattatccatgttatgtcaacagtgggaatatgggacagttccctgataatcagaatgaagaggaggccattgtatataccggaacatcaaggaatgaatatggtggcagacctcccgtcaatcaaatgtattgttataacacttcccagacaactagagaaccaagcaaagctttgtatactgttgaagatgtgaactgtggtacatcatcaaggcctcataatttatcatgtcgtcagagtgaaagtcctgagacagaccaaggtttgacagatgagcagtcatggtgggttcgtcctggtgatcttcaaggattgaagggtcaactaatacgtctgtttgaattatctggaggatgtgtcccacttgttcgtattccctcagagtatctaaaactctttggcagacatttatatgtatcagaatatggagctgttaagcttgttcatcttttcgagaagctggccgactcttttgttgtcgttggtaagggtcataaaaagatgatctgtctctgcaattctggtgataggaacctgaagaattatccaagtacgccaatcattctgacgaagaaaaacagaggaaattctgctcttgaagaaagcacgataggagcatgtcagcaattaggcagctcatcagatgaattatcagaggatgaaccaattatcaacccagatataaatgttgcatgtgtgttcaatgagcatctagacagcttcagaagggagattcaggagctccttgtttgctactcctgccctgttccgcttggtaattttgagagtttatatgagcaacggtataagaagatcattgactatgagagcttaggagtcaccggtctggaggagctagttgagaaggtgaaagacgtggtagatttgcacgaggaccaaaccagcaaaagcaagttccttattgcaaactacacaaccggttaggctctttctgttgtcttgatgtcctagttcagctcctaaagtacttcagctcgtgtttccttaacatgtgtcacacagggtcggcatctttttttaccgtgccggtatgataagtgtgaatggcatagtaagtatttgtaatggcttccctcatgcctcagctaatctgtgcaaacagggagttgtttcttgtatgcaaaaagatgattatactaaagaacagtgaccatttatttggcaaatacatctaattccagttcaagtcaa

SEQ ID NO: 99678 - DNA, 2342 bp, Zea Mays
ttttttaatttaattttagctagatgtgagagtgggaatgggaatgggcttttgcgggaagcgggaataagaaaaacaaggggaggggaatgagaacgacacactacagaatgacagcctacccctcgtccggaccgtcttgcagtgcaacgaccatacggacccctgtggtcggacccacagcgcagaaccggcacggatcctttccccaatcccatccataatccatcggccacgagctgatgcgcaagcgccgccgacctccccacctcggcttctgtctatccctcgacaaaccgacctctcccgccgccgaccgccgtcgatctaccgatcggccggacgaaagacccacctctccccaaaataggcggctgagacatacgttcctatctccccttcgctgccggagaaaagcctcgcagcctgcccctccctcaccttcacctcgatttctctgggcctccgaaccccgccgacaggagcgttccagcatctcctatcccgtgccgcgtacgtctgcacggattagcgttccttctattggtaagtaggtcacataatgtcttctgaagataaagcaatggctaatcgtgtcacttcacactcgccaaaagctatggtgtcggaaccagatcccaacaggatgatgatgtttagatcaaatatggagtattcacaaacaaatggccagacaaatgctgttcttggtcctgtggctatcttttgggacattgagaactgtcctgttccatgtgatgtacggccagaagatgttgctggcaatgttaggatggctttgcgcatgcatcctgttgttaggggtgcggtgacaatgctgtctgcttatggagatttcaatgctttcccaaggagactccgggagggatgccagagaactggagtcaaacttgttgatgttcctaatggacggaaagatgctgctgataaggctatactggttgatatgttcctttttgcacttgacaatcacccaccatcatccattatgctcatatctggtgatgtggacttcgctccggcattgcatatacttggccagcgtggatacaccattgtcattgctattccgtcttcagttaccgtctcatcagctctgagcagtgctgggagtttcgtgtgggactggcctagccttgcccgtggtgaaggtgttgtgatccctaggtccttggtgcgccgtctggctgattatccatgttatgtcaacagtgggaatatgggacagttccctgataatcagaatgaagaggaggccattgtatataccggaacatcaaggaatgaatatggtggcagacctcccgtcaatcaaatgtattgttataacacttcccagacaactagagaaccaagcaaagctttgtatactgttgaagatgtgaactgtggtacatcatcaaggcctcataatttatcatgtcgtcagagtgaaagtcctgagacagaccaaggtttgacagatgagcagtcatggtgggttcgtcctggtgatcttcaaggattgaagggtcaactaatacgtctgtttgaattatctggaggatgtgtcccacttgttcgtattccctcagagtatctaaaactctttggcagacatttatatgtatcagaatatggagctgttaagcttgttcatcttttcgagaagctggccgactcttttgttgtcgttggtaagggtcataaaaagatgatctgtctctgcaattctggtgataggaacctgaagaattatccaagtacgccaatcattctgacgaagaaaaacagaggaaattctgctcttgaagaaagcacgataggagcatgtcagcaattaggcagctcatcagatgaattatcagaggatgaaccaattatcaacccagatataaatgttgcatgtgtgttcaatgagcatctagacagcttcagaagggagattcaggagctccttgtttgctactcctgccctgttccgcttggtaattttgagagtttatatgagcaacggtataagaagatcattgactatgagagcttaggagtcaccggtctggaggagctagttgagaaggtgaaagacgtggtagatttgcacgaggaccaaaccagcaaaagcaagttccttattgcaaactacacaaccgggtcggcatctttttttaccgtgccggtatgataagtgtgaatggcatagtaagtatttgtaatggcttccctcatgcctcagctaatctgtgcaaacagggagttgtttcttgtatgcaaaaagatgattatactaaagaacagtgaccatttatttggcaaatacatctaattccagttcaagtcaa

SEQ ID NO: 99679 - DNA, 2789 bp, Zea Mays
cgatcttcgaattctcctcctcttttccttcctcttctgcagcgccagcgccagcgccgaccgaacccaacgccaacggcacggcaagccaagcgaagcggagcaagggtttgctcgccccacacccgtcccgcggccgaggctctgcttctcatcgtgacaagcctggcgaactgccatggacctggtgggatccttgctcctgagcatggcacgtctgcttgacccatccggtctccacttcgtgggctggctcgtcaccgcgggctccattggtcttgccgcactcatctacgctctcctcaggctgcagcgtgaggcggcgttgtactggaccaaggcgaccagggagaagcgtgccgcatggaggagattgcggtgccctagctcctgccactcgtggtctgaggactacttccacggtggccagccatcgacatgctgcgtttgcctgtcgtcccttggctccacgcagggcgtcgacatggttcaccgctgctctgtttgcggcgtggctgcacactcaaactgctctccccgtgcagagaaggattgcaagtgcgttgcacaggctggcgcttcgcccttgctgcatcactggtctgagaggtgggtggagctggatgacaacccggagatatcctcctcctgttactactgtgatgagccgtgcggtgtgcctttccttggagtctctcctatatggcgttgcctgtggtgccagcggcagatccatgttgattgccatgcaaaactgttgaaggaaaccggaaacacttgtgatcttggccttctcaggaggcttatagttcctccccaatcagtgaaagaaattggtcaaggttcaggaattagtggaatgctgaactcaatcaaggacgggtttgccaattcaacagttgggaaccgtaggaggtcacgcaacaagaagcgcatgaataaccatcctggtggcaagataaattccattcccacaaaattctcagtcattgattcagtgcttgaaggatttgctagattgaagggcctggatgggaagtatgcactagcaaagcctttatctcaacattctgtaaagcaaacatatcgatctgttattcctaatggacgagtcagaaagtatgaacttgttgatttgccacaagattcaagaccactgctggtattcatcaatggcaagagtggaggtcgaaatggaccttctcttagaagaaggctgaacatgttgttgaatccaatacagatatttgagctaagtgcttctcaggcacctgaagttggattacaactattccacaatgtgaaacacttcagaatccttgtttgtggtggggatggaactgtagcatgggttcttgatgctattgaaaagcagaactacgaatctcctccccctgtcgccattcttcctctcggaactggaaatgacctatcacgtgttatgcgctggggagggggtttatcttctgttgaacgacaaggaggcatatatgcacttttaaatgatgttgaccatgcagctgttacagtgcttgatcgctggaatgtaaccatcaaagagaagaatggaacagaaggtgaatgcaccaagcaaataaaatttatgactaattatttaggtattggatgtgatgcaaaggttgcttatgacttccacaccactagggaggaaaaaccagataaattttgcagtcagtttgtcaacaagcttatatatgctagagagggtgcaaaggatatgatggataggtcatgttctgatttaccgtggcatgttagccttgaggttgatgggaaaaacattgaaattccggaggatgcagaaggtgtgattgtaatgaatatccctagctacatgggtggtgtggatctgtggcaaaacgacaatgaccataatgatgatttcagattgcaatcaatccatgacaaaatacttgaggtggtttgtatatccgggacatggcatctaggcaaactgcaggtcggactttcaagggcacaccggttagcccaaggaaaagttataagattacacctccacagttcattccctgtgcaggttgatggtgaaccatggatccagccacctgggtgccttgagatatctcatcgtggacagatgttcatgctaaggaggacatctgaagagcctactggacatgctgccgcaatcatgagtgaggtgctcgtgaatgcagagtgcaatggtgtgattgacgcctctcagaagagattgcttctccacgagatagcactccgtttatcctcctgagactatccagtccagcaaccctcacctcacaaggctaactcattctgtaccctttgatgccaaacctatcgtctctgttgagaaatccctttgcacagacgtaaactgctatggtagagttggtgtatacaatacaaagagatagaaggtgtatacaatacgaggaaatagaagtttccttttgtatttggctgtaccttttgagataggtcatctacttctttgtggctggtttcatcagaacagctgttgaagaattttgtagcgcagagccactataaccgcaactagggctcaatgaaatgtaactagagtggatgtgaatgttttgtttgcaaagatattgatgcaactgttatcacacttcatgagaagacctgaatttcgctaaggggccattttgatccttttattttgaaggaattggaatttacttcaaagagtaggttatttagtttgtaatttgacattcaatcactttccagattttatatataagtctatctcaaatttatag

SEQ ID NO: 99680 - DNA, 1173 bp, Zea Mays
atgggtactaatgatagagcggtcatttctctggtactcctcgtgtgcatcgctagccgctcgtccttgggtgccgctgaaactgacgttgagcagaagcgcttgtcagtcccgttgatgtttgtgttcggtgattcgctggtcgatgtcggaaacaataacttcctgccgccgcctgcaccccgtgctgcatctccgtacggcatcgacttccatgctggcaccgccggcgccgtctcaggacggttcacgaatggctacaaccttgccgatttagtcgcgcgacgtctggggttcaagatgagtccacctgcttacctctcgttgacaccggtatcaaagtttgacctgttcacgtgccgaattggtgccaattacgcgtctggcggatctggcattctcaacaccacgggaaacgggacactcacgctgcagaaacaaatcacgctgttctccaaaactcaagcaagaatgtcgtgggcccgctgcaagctcaggtctatggtatcgaggtccttgttccttgtcagcgccggcggcaatgacttctccgccttcagtgaaatgggcatgggcgaacaagacgccccagcctacatcagtagcatggtctcaacctatgtccagcatatcgacgcgttgtacaagttgggagcacggaggttggggatcctagacgtgccagctatcggctgtaccccaggctccagagtccccatggccaacggcggatgcaacgacgctgccaactctatggcgcagaacttcaacagactcctaaggctcgaggtggcgaaagccgtcgcatcctccatgcccggcatgaaatactccattgcaagcacctacaattttgtcaccgacttgatgaacagccatctagtggctgggctccgggtggtcgacagggcatgctgcggatcgggaaaactgaacgcggcggtcatgtgcgcccagccaaacacgacttactgttcggatcgcgacgactacatgttctgggacatgctacatcctacgcaggcaacaaatgaacgtggggtggtcgccatcttctacggcccgcaggagtacgcggatcccatcaactttgcacagttggccgctgccacagcaaatgatgatgatgatataaatactgctatgaccgcaggcgtctatgccgccatatga

SEQ ID NO: 99681 - DNA, 585 bp, Zea Mays
atgggcgaagtggagcacggccagcgcgcgtccaccaaagaactcgcgcgcacaggagctccgcggctgggaacagacagagggagcaggcgtggtacacagggaacttgtggcgcggcaccagcagggggaagacgccaggaccgagctacaggagcaagggagaggagccgcagcgccatgggagaggacaggagcagagacggtgcgggcgcgtccacggctgcgcgcagaccaatccgaggacgagagagaagcaaggagggagccgagggagatgggcggactggggcaggggcatccccggcaagctcgccatgggagatctcgaccaccatggataaacagggagctggggcaagctgcggcagggaggagggaggagcttggagatcagcagctcacgaccaccagaggaaagaaagagaggcaagcgtagagaagccgctcgggcgcacggcagaagaagatgggcgtgcggcggggataaggataggagcacgcgcgcacgtaggaaaatcttcagcagcggtgaccagattcttgcaggagatgagcggcaaaaaaaatctccacaccggatga

SEQ ID NO: 99682 - DNA, 951 bp, Zea Mays
atgcagcttcaccaaaggactggagctaggtcctatatagcccatcgttacagcctgaggactaagtacaacaacatggagccggaagttgttgatttctttggggaatgtatgaatagtccccgaaatggtcgtactccgcttgcaaatgagatatatgagcaaatggttgcagagaaggaaagagagctagaagaaggagaagcacaaaagtcaccctccaagattgttgctgatagtctcagccagatcagccgctcatccaccttccttccaaacattggtgtccctacaacgtccaagactggtcagtccacatcgctagctgcacaagcatgcatgcaagctcagtttgaggaaaaactccaagatgaaagtgaggaagctgctaggaagcaggaagagttgcaagcacaactacaagctcaacaggccgcacttgaagaaaaccaaagtttgttgcgccagacccaagaggaagtgaaggggatgcataccaagtttgaagagaccaatgcactgctacgagctgtcctgaaacttcagaaagattgaggtagggatgcataccaagtctgaggatgatgcctttgcttaaggtttttctaccttgctagaacatatctgtggttagaactttgtaagaactacatgcaatctatttgaatgcttcaaacctttgtggtggaacctttgtatgtttgaacctctgttgtggaagaactagtgtgctggaattgtgtatgacttgtgatgagaatgttgtgtatgatggcttttctgtgtattatgattctgtgagctatcatgagagctcagtgtgtcgtcactgtatggtcactgtatgtgggtgtcatattaaactaaacaaaaccaagctgtcacattatccacagactaatatatgacggtcctagatcgtaaaaaaatacacaaaactgtgacagataa

SEQ ID NO: 99683 - DNA, 197 bp, Zea Mays
tttgagttcatgtgacttattttagaaattttagctcacaaactttctcttatttggtctctgtatggtggaattatatcattctataatctctgttcgttcagtcagtcgttgtgaactctcttctaatcgctcccttcattggtcgtgttataccaagatataatggatggagtaaacaacaacatcagttagtc

SEQ ID NO: 99684 - DNA, 734 bp, Zea Mays
cattttagtgtgcttgtccttttctatgatagatactgatttcaaaaaaaattgattcatacccgtgccaaccgaccaaattgccagatacacgattacaaagcgaatgtaatatactggttttgacagctcgccgtgtccacaaagtgtgacgcacaaatactcccaccacaaagatatacaatacaagcatacaagcagcaatctgcatgcctcactcaacaccaacagcacacaacccaggtagcacagcctgtggcttccccctgcccatggtgaaacccctggtgccatcaggcatgcgggggcctggtggaagcttgttggccccaataggcagctgcggatgcggctcaagcttggttatcaggttatgcggtgtagtaccaacagagtgaaggctgccacggttcccaccaaggtggttgttgccatggttattgtactgcggctggttgttctggtggtgctggttattgtgatggtgattgttatattgatggttgccacgcccatgccctctgccaccgcgaccgcgccctttgccgcgcttgggaacttccttgttgaaattctcatcaaacttgttccggcagtacatctaacagttgagaggattgttcaaactgtttctcgttagaatggttcaaagtggagacatcctcctcactatttccatcagtttcattcattccgttttttcctttgcctgcccccttcacctaaatcaggag

SEQ ID NO: 99685 - DNA, 561 bp, Zea Mays
gtcactggtgatgctgaatacactgatgacacaccaacacctcccaatactttgtatgctgctttggtgctgagtaagaaggctcacgctcgcatattgtctattgatgattcacttgccaaatcttcccctggctttgctgggctgttcctttcaaaatacattccgggtgttaaccatactggaccaattatccatgatgaggagttttttgcatctaacattgttacttgtgttggtcagatcattggaattgttgttgctgatactcatgataatgcaaaaactgctgccaacaaagtacatatcgagtattgtgagctcccagcaattttatctatagaggaagctgtcaaggttggaagctttcatccaaataccaagaaatgccttgtgaaaggcgatgtagaacaatgttttctgtctggtgcatgcgataaaattgtatcaggacaagttcatgttggaggtcaagagcatttttacatggaacctcagtgcactcttgtctggccagtggattttggaaatgaaattcatatggtctcatctactcaagta

SEQ ID NO: 99686 - DNA, 1373 bp, Zea Mays
cttcgccttggactcccccacacaacgcagcacccgcactctccaggcgtctgccaatccgaaacgaaacccacccgtcgcctagaggcaaaccaggactgagattgagcggagagcagcacagccatggcggggcaggaggtggcgaacaagcgggtggtactgaagcgctacgtgacggggttccccggcgcggacgacatggaggtggtcacaggcaccgcgcgcgtggccgtgccgccggggtcgacggccatggtgctcaagaacctctacgtgtcgtgcgacccttacatgcgcggccgtatgaccaagcacgagaggcccagctacgtcccggacttcgtcgtgggggaggttttggaaaactttggcgtctgcaaggtgatagcatctgggcaccaggatttcaaggttggcgatcttgtgtgggggatgaccggatgggaggagtacactctcatccataacccggagtcatttttcaagatcaagcatcctgaattgcctctgtcctactacacaggcgttcttggcatgccgggccttactgcttgggctggatttttcgatgtgggcaagcccaagaaaggcgactatgtcttcgtctcagcagcatcaggagccgttggtcagcttgttgggcagtttgctaagctcacaggatgttatgttgtcggcagtgctggttctgacgagaaggttaatcttctgaaaacaaagtttggcttcgatgaagcattcaactacaagaaagagcaggacctcgatgccgccttgaggaggtacttcccagagggcattgacatctacttcgagaacgtgggtggcagcacactggaagccgtgcttcccaacatgcgtatccatggtcggatccctacctgcggaatgatctcgcagtacaatctggaggagccagagggtgtgcacaacctatttgaaatcatcactaagcgcctgcgcatggagggtttcatggtcttcgactactacggccagtaccacaagttcgagcaagagatggtcgggtacctcaaggcggggaagatagcctacgtcgaggacattgctgaggggctagagaaggcgccggaggcactcatcgggctcttcaccgggcgcaacgtcggcaagcaactggtcgccattgcgcgggaatgaatgctgggcatccatattatatctacgttgagaataatgtcagcatgcgtgttcagacgtgttaggaattgatggtttgtagtgcttgcagttttgtgctgttcgtgtgaaatgtttcgattttctgccgtttgttttctgggcgatatgcgtgtgaaaactcaggacacgcgcttcttctgaggagaaatagacaagcagttttgctg

SEQ ID NO: 99687 - DNA, 638 bp, Zea Mays
gtagtttgttgaataactcgatcgagatagacctatcgctatcggtgtagcattcaagtagggaggtggccatgaacagcattgaatcgtcggagctcaggaaggtgttccaaatgttcgacaagaatggcgatggccagatcacgaagaaagagctaggggagtcgctcaagaacctgggcatccacatctctgatgacgagctcgatgccacgatggacaagatcgatgccaatggtgacgggtgcgtagacgtcgaggagttcggaaagctctaccgctccatcgtcggcgagggccaagtggacaagcacgacgaggaagaggacatgcgggaggcattcaacgtcttcgaccagaacggtgacggcttcatcaccgtggaggagctgcggtctgtgctgtccagcctcggcctcaagcaaggtcgcacggccgaggattgccgtaagatgatcagcaaggtcgatgccgacggcgacgggcgcgtcgacttcacagagttcaagcagatgatgcgcggcggcgggtttgatgcacttggtacatgatcgggactttggaggattgaagatgccttaatataattgcgtggatggtaagggcgttgtagatacttcgttcattaaaatggttcg

SEQ ID NO: 99688 - DNA, 384 bp, Zea Mays
ttgtcgcatgtgaggacatgcttatggcgtactagtgtcgcgaggtaaaacttaggtttaaaatgctagttacataggagtacccgagcggacatgactgtcgagtgtattcaaattggttttacttatgaaatataccaaattagtggcgtgaagaatagatttagtattttaaacgattattcgataagtttgtcgatgttgattgtgttgaatagtgaggtcaaaagccttgccttagtaattattatgttgtattatatcgatggttagaatggcctagtggaatataggttagttaaattgttcctgcaggtactataactcagatgtccaataataggagtttgaatattgttatcctttcggtgttatgcattagtt

SEQ ID NO: 99689 - DNA, 714 bp, Zea Mays
atgtttatctcttgcgcgctcctcttcttcctccctggcgctcggtcgcttctctctggtctccacgcgcaccgcgtccagctccctcctccagctgtgtctgctgctcgccccagcctggagcttcgctcggcttccaactccggcgcccggccgagctccctgctcccactctttatcactttatatggttggagcctggagaatatgcaccagggctatcccaaagaaacacttgtgcgtttccttaaggctagagagtggaatgtagcaaaggctcataaaatgattgtagaatgtttgaattggaggattcaaaatgaaattgatagtgtgctcgagaggcctatagccccagtagatttatacaaatcaatacgtgattcacaacttattggcctgtcacgatacacaaaggagattcttctgtacaacttcgatggtggtacaatttgttcagtggttattttgaaagaatggcttggcatccatcgcgtcgctgctgctgaaatatctaaagtctgtggtctcccaatttttggcattggtgttgggcatagcacatatgacaaagcttcggctatagctacagccaaaatcataaaagtgcctggtttgaagctatcagcactaagccaaataaaggtggctgaattttcagatttggaacagcgtctaagtctgaatttccaaagtagtttcttggacagttaa

SEQ ID NO: 99690 - DNA, 833 bp, Zea Mays
gcaagggcacgtcgctcggatgtagttgagtgactccagcaaggccggcgtcggaaagaccaccacaaccgccagcctcgccgcctccctcgcgcgccacggcctcccagccgtcatcgtcgacgctggcctcctcaacctcgatctcttgttcggcttcaagaaccgtgtccacctcaccgccgccaccgtcctcgcgggagacttcccactcgactaggcgctcgtctgccaccatgcgctccacgacctccacctcctctgcctccaagcctcgctccatgctgcccctctcgttcggatccaagaccctcacctgggtcacagacgcggttacctctgttggagcgaaggtcgcccaccccctcgctcggctcattaataatgggaacatgacaagttataacggagggagagcgaagtctacttcaactaagcgaaggctttgggatggagggatcgaccaggacaggcaagggccttgccaactcccgtaggcctagcgccctaagacgcaggctgcagtcactactcgcgcatgttattaaagcgggcccgtgcgactgacatcctggatcgcctgaccccacgggtaagcctcagtctaggtaggatttgtggtgtgtcagtccgggttgtatttaactacactataatgacctgtaataacccttgaggggaaatattctacggataacgtaggtaaacagggactgtatttacgaggatgagacttgttggtcacttgttctcaaatgctgtgaatcaagaacaaagcaactgtaatacccaactattggaatatcaaagagagggataaatctttatgtgta

SEQ ID NO: 99691 - DNA, 3038 bp, Zea Mays
ccctgacttctaccgtctcccgtccgcccgtcgcagagtcacggacgatgcgccgcagcccgccgtcctgccgaggcaccgacggttgccgcctaccccagcacggctgcacttcgatccggtcttgctcgtgcttcgtgctgtcttagcggtcgatcgtcgccatctcccctcggtgcttggccgtccagcgggaacggcgcagccgcgcaggcgcaacgggtgctcgcctttcgacaagggcgccccccgcgccagcccaagcgccagcaccagcgaggccggggcggagcacaggagcccgccgctggcctgctgctcaagccccaggggcggcggatctacagccggcgccgagggaggcgccaagcccttcctccagctgatgtagcaatatttactcacatttgatcctcacaacactgatacttcaagatggaacaaatttcacttggcaacagatacaaggagtgcaggacacaaagaactaccagctgtcaaacaaaaatacttgttggaaaggatgtattaaacgaaatagagcaaaggcgttcatcaccaagtgtgattgcaaaactgatgggaattgaggtgttgccaccttctaaagtggtcaatagtcggcatcaagaatttaaggatgtttttgaagtgtcagaggaaccaccagaggctgtcgcaaaagagaagtcccaaggcttgccgagcttgaaacgaagagcgctaagcttgaaaaagcttatgccatcaaaaacactctacagagatgatacacatgattgttatgtggattgtgtagctggcttgggtcgcttgaactcagtggaaataaataatcctttatttgagaagcaccttcatgacatgaactattctgcaaattatcagtatgtaaaagatacatcaagtgtttgcaggacataccctgtgggtttagccaattcatcactcagcaatttcagccttttatcaagagggaaaaacaaagatttcaacagcattgtagttctggaaccaccatgcttggaaaaagggcatgatccagaaaacattttttccattccatacctttctcctgtcaataaaaactgcagtagaggcatgaaacataagaaatttgagtttcctgtaatggagaatggaagagttcgggaacatatattaggtactgaagctaacaatgtgcttcgaattagaaaagaaagacccttgactagtgactccattgatccactgcaaattggacaggaagcatcagttcatcagtttgggaatactgatgtgagttgttctggatcatctcagaggtattcttgtggtaacgatagctttaggaaaactaacaggtcatcatcaagcagaatatgccggcatgcagaatctgctgttggttcgaaaactcttgcagaaatgtttgctttatctgattctgaaagactgaagctaaattcagactcaaatgctccagttctatgtaatatgattgaccgtgataatggtcatagcaaggatggatgctttatagttttaccaaagcatgcacctgtgctgtctatccgaagctcaatggacatgccttcttgcttggaaggctcctctcagggtaaaaataatctaaacatatccaatatttacaacaatggtaagtttcagattgattcttcccgggataaaccaagatcactgaagcaaattggcagtggcactgaagctcacttgagcagtgctcactgtttccaaaatcttacaggtgacaacttttcaactcctgattgcttaaatgataaagtattgttgacaacagatgaagacgtagttcgacaatcagctgaatctgagccttccaggttcaacttgcaggtttctaggaaacaacgggtgacagtattgcctttccattgtcacgaggatgaatcgatatctgtttcggatcatactgatggtacaaaattttgtaaaggctcaaaagaggttgagcaaccgagcccagtgtccatccttgagcctccaattaatgaagatatttgttttccacgatgtttcaactatgacttgcaagggatggctaacaaacagagaggttgccatcaatatcacaatgaatctgaagttaacatgtcaagtgatgatgaagaccattctttttaccaatctttggaagcatttcaggtcgaggaaaactgggacttctcatatcttctcgacatacttatatgctctggtatcatagttgttgactggcagctcatctgcaagtcatggtacttgcctggttaccctgttggccctcatgtctttgataggcttgaaaggaaatacaataaaatcgcaacatgggcaaagcctgagaggaggcttctttttgacctcgtgaattcaattctttccgaggtccttgcaccatgtgttgatgtgcacccatgggtgcagcctagtagacactgtgtggcattttggggccctgaagggcctgttgagaaggtttggcagacaattgttaggctgcaggaagactgtgtcacaaggcatcctgatgagatggttcttgatacaaattggctggaagtaggcaccgacatcaatatggtggggaagcagatagctaggatgttacatggcgacctcttggaagaagtcatagtggacttccttggttgagttggtagtttcatgtggacataactagtaactaacaacttcggcaacatggggttcgctcaaacttcaagcagattatgctgaatatgtaacggcttttcaagtgcacacatgccgcatttttcttctggttataataggagctatgtattatgtaattacattggagagcaaaatatacaggccaaaaaaacactactgcaggtatttttcgattctgtactgctaagctgtacttcctggtcctatctgatactttgatgggtgtagtaattgtaaggaaaatggaccttaatctagtttggttatgatgtttgatgaccaacatgattatttggactaatatttgattggtgaaaaagtggactgatttagacaaa

SEQ ID NO: 99692 - DNA, 500 bp, Zea Mays
aaggcatgcatacaaaatgttttaagaaattcactatgcatgtgtgtaatttgtcatgtacgggcgcaagtatatgcgccgtcgtgacatcagacgcgcagctgagcgcgctgctcacgctacacaggatggcgccaccattagtggctgagatttcaaaattcaaacaatagattagtttcctttttccccaaatcaaatagtttcctttctattagtttccctttttacccaaatcaatagtttcccttctatgcctaaaatataggagccattagtgggggcaatggcctatataatgtaatcagacttggaggaatggaatcaagcaatcagttatcaccaaacctgctctctccctcaactctctcaagccaccggcaggggctctccctctcggtgaaggcctggagcgcgactacaatctgcgtagtcacgacccggcgctgttaggtgctgaggcacttgacaacctagtatcacggtcacgtcgatcctca

SEQ ID NO: 99693 - DNA, 1296 bp, Zea Mays
gcctccgcaccgcacactccccagcctctatccggtccggcggtacaaatagcccccacccgccacccactcagcaccatttcacaccctcttgcctccccgtgactacctcgctgtcccctctcagtgtccaagcgacgacaccacgccgccgagatgtggatctcagattccgcctttgtggagccctcatcttcctccccatccgcctctgcctccccgccgccgagcccgccaccagcacgccttctccgccaacgcaaccgccgccgacgccgcagcagccggaaacagggcagtgccagcgccgtcgacggcgtcgccgaccccgaggcggaggacgtgtggcgtggggcgcagtgggaggcggcgtggccggcgcggcgggactcgaaacccgtcgtgctcgcgggcggagacgacgcggtggggcggtccaggagcctcacggacgacgacctcgaggagctcaagggatgcgccgacctgggcttcggcttcaactacgacgagatccccgagctccggagcaccctgccggcgctcgagctgtgctactccatgagccagcgcctccagctggacgacgagaagccgcagcagcacgaggccgccgcaccagatgccgccacgccgtcgccgcctgtcaccaactggaagatctccagccccggtgacagccctgacgaggtgaaggcgcggctcaagtactgggcgcaggcggtggcgtgcaccgtccgcctttgcagctgaacggcgccgaaccatgcgcgccattcttcgccgtctggaagcacacaccatgccggtatgccggccgccaccacacaagaaaccagatgaccagacctgatcgcgaacacgttgctgctgctgtaaagtgatccaggtgcagcgtttcagctgcgacggcgggcgttggcagctgccatgattgcagctgcagagtttggtagttgtggtagcagcacacataggggctgagtagatgggttggttgcccgaccgacatgctgtgctctctgttccagctgagcaacctgcctctgcctgatgaaccaaccatccgagtgtgcagcagccatctccagtggaaataaactattgtaattgtactgctagcagtagtgatcaaaataatgcgcagagtaattagtactgcaagcaaatcggggaatcattgtgaatacataaatctgtggatctcattactatactgttatcttaatcattagctggtgtacctgctacctactgcagctgtttggtaataatggtgcagatgctttccttctc

SEQ ID NO: 99694 - DNA, 1299 bp, Zea Mays
gcctccgcaccgcacactccccagcctctatccggtccggcggtacaaatagcccccacccgccacccactcagcaccatttcacaccctcttgcctccccgtgactacctcgctgtcccctctcagtgtccaagcgacgacaccacgccgccgagatgtggatctcagattccgcctttgtggagccctcatcttcctccccatccgcctctgcctccccgccgccgagcccgccaccagcacgccttctccgccaacgcaaccgccgccgacgccgcagcagccggaaacagggcagtgccagcgccgtcgacggcgtcgccgaccccgaggcggaggacgtgtggcgtggggcgcagtgggaggcggcgtggccggcgcggcgggactcgaaacccgtcgtgctcgcgggcggagacgacgcggtggggcggtccaggagcctcacggacgacgacctcgaggagctcaagggatgcgccgacctgggcttcggcttcaactacgacgagatccccgagctccggagcaccctgccggcgctcgagctgtgctactccatgagccagcgcctccagctggacgacgagaagccgcagcagcacgaggccgccgcaccagatgccgccacgccgtcgccgcctgtcaccaactggaagatctccagccccgcgcaggtgacagccctgacgaggtgaaggcgcggctcaagtactgggcgcaggcggtggcgtgcaccgtccgcctttgcagctgaacggcgccgaaccatgcgcgccattcttcgccgtctggaagcacacaccatgccggtatgccggccgccaccacacaagaaaccagatgaccagacctgatcgcgaacacgttgctgctgctgtaaagtgatccaggtgcagcgtttcagctgcgacggcgggcgttggcagctgccatgattgcagctgcagagtttggtagttgtggtagcagcacacataggggctgagtagatgggttggttgcccgaccgacatgctgtgctctctgttccagctgagcaacctgcctctgcctgatgaaccaaccatccgagtgtgcagcagccatctccagtggaaataaactattgtaattgtactgctagcagtagtgatcaaaataatgcgcagagtaattagtactgcaagcaaatcggggaatcattgtgaatacataaatctgtggatctcattactatactgttatcttaatcattagctggtgtacctgctacctactgcagctgtttggtaataatggtgcagatgctttccttc

SEQ ID NO: 99695 - DNA, 357 bp, Zea Mays
gatgattgtacccctgctgaatgattaatcaggctctgttcaaggataagaagccagtcaaggtcatcaagaagaactcggctgcagtcaccaaagttcctcgatgagctggctaagattggccgcacttgaagaaatcttatatcagtttgaggaaaaactccaagctgaaagagaggaagctgttaggaagcaggaagagttgcaatctgtttgatgcctttgctagaacatatttgtggttagaactttgtcagaactacgtgcaatctgtttgaatgcttcaaacctttgtggtggaaccctttgtatgtttgaacctctattgtggaagaactagtgtgctggaattatgta

SEQ ID NO: 99696 - DNA, 850 bp, Zea Mays
cccaccaccacgcgccctccccaaaacccccgcaaaccctagccgccgccagcaaggaattgccgccctcctgcggctcgccgccgagagccaagtaacctcggcgccggctgcaggcgtcctcctcctcatcgtcgtgggcatcgtcgtccagctcctcatacgtccgtccagcgcttgccggactcgcgctgccgtccccagcagatttttagcctcctcccacgccctggataagaaccgcgcgcagcccagctgcttcttcttcccttgtacacgcacgtagtccttgagattttttctcacggagcttatctccttcctgcagcgctcggtgcccagcccatctccatctctctctcgtagagttccctggtcaagcttcccagccatggcagcgcccgcctccctgcttctctccctcttctgctcagatccctgcttgtggagcttcattccgctcccagcttcctctgccggcgcccaagcttctagttcttcattccgcggcgcgcccgattcctgctcgccgagcttcttccagccgcgccgtcgccttgctgctcgcccgtccgcgcgccacttcgtccctggccaccgtccgccgtcgagtccatacgcgcgagcccctctccctagcacttccccgccggagtgctcgcccccgaccccgcccgtcgcgcccgccggagagcgcgcccctggccccgcccgtcgcgcccgccagagctcccacccccgacctcgcctaccccggccgccgcgcccgatggagcgcccgccctcgtccccgcccgcagcgcccctcaccgccctaccccgccggcgcccccgccggcccgcccattga

SEQ ID NO: 99697 - DNA, 191 bp, Zea Mays
ccaagtttaaatctgttttgaattttaaacaccagttagatgttgcagacaaagaacttcaacataaatttaagatatattttatttatttatttctacttatcttttcaaacaaatgcttttaaatatacatttcatacacatccaaatacttactctaaggcataatgtttatcaaaggatacttaaac

SEQ ID NO: 99698 - DNA, 105 bp, Zea Mays
catagtatgttttatcaaaaaaatcatataaagatggttttatatttagaagtgtctagtatactcactaacatctaagacagttcttatagtctagacgactct

SEQ ID NO: 99699 - DNA, 141 bp, Zea Mays
caaaattgtacctttgggttaaatcccaattctcatctcattattatattcccatattattcctttttgacattacaaaattcaaattccaatccaagataaagtttaagaattcaaatttaatacatactcaaaatcaat

SEQ ID NO: 99700 - DNA, 368 bp, Zea Mays
aatataatatagataaataacattcaatatctcataaataagcattatcaaataactcatacataagtgtactctaaatttaaacttgctcatcaactgtttgtgctaacattaagcctaactaagtatataacttgatgaagtccatgaaagggcaaatacaacttgatgaagtccatgatcttgttggtctccagatcgatcttgatggtgtcgttggccttgatgagagggtcggggtagcgaatggtgcggccgtcgtaggtgttcaggtaggggatgcctttctggccaaactaaacagacctcgccttgcagagcttgaactgcacacaaaccaatagaaaagcagtgagcatttcacaggc

SEQ ID NO: 99701 - DNA, 1158 bp, Zea Mays
atggatcagtttagacttatgcaaaactcacaggtgacagacaatgtttcacgatggaacattgaatgccagtgtgctccagatgcacaactcacaggtgacaaccgtgccacaataccagacaaggcacaggttgtagagcctgcacatgcagagcaggtgcctgtgcagtcagaaagggctgtagagaagacatggcaggtgcgtcttgatcagctctcgctcagtccttcttttgctccaggtgaacaactaacagatgaaaaggttgtagagcctgcacatgcagagcaagtgcatcttgctcggctctcgcccagtccatcaagggagagggcccgtctcagtcagtttgctccaggtgctcaactcacagatgaagaagcggctacactagaggaagaagaccgtcctcaaattgaccttctagatggtttgccccaactagctgaggctgtagccaggacgcctgtcagatctgcaagcgatgggcgtttttggtccaacgagcatatggatctatacaacagtatttatagcaagaagaaatgtgctgacaacaaatggatcgattggaaaaatatcaaacgtttaccgaagatgccatatgttgagaaagcaagtcgtgacattagtcttcatgaattgatggctataaaacagaactggtatgaagagccgatcaaacagttctactccacattgtccataaatcaaagtaggacctcactgacttggatgacaggcataaataagaagattactgtcacaaagagattttgtcaaaaggttctccatgttccgtccgagcacaatattaagattaagcgccaattgactgatgcacaagaaaaagagctcatgagtgcagatggtaaccaagtttattcattaaaccggattattacaaagactatcaatcctttgattggagataaaagtaaggttcacgaatcaagtagggtcctactgtatcatattttgttcgggaagccttttgacatagtagacatgttggaggagatggaaaacaatcacatgcacacatctaagagaatgtcatatgccccatacatcatgttactaattaacagtgcgactaaggaaaaatttgtacccgggagtggagaaaataaatgtgtagagcacgaaaagtaa

SEQ ID NO: 99702 - DNA, 603 bp, Zea Mays
aagattgctaaagagaacaggtttgggcgaagcctctttgagagattaagtggacttgatttcccaaagcacatgctaaatattcaatatagaatgcacccttccatcagcaagtttccaaatcaaaagttttatgaaggaaaaattatagatggtctcaacgttaaggactataacaatatttatctcgatggtcatatgtatggtccttattcattcatccatgttgaagttggtttcgaagaaaacaataaacagggcttaaaaatattgttgaagctgctgtggtagcaaatattgttggcagacttgctgaagtgacatccatgtttttttggtctataaccactacagcatgcgccgagcagaagaagaaaaccagcgttggtatagtatctccatatgcagcccaagtaatttctttgcaagaaagaattcagagttatgaaaagtatgactttctttctgttgaagtatgcactgttgattcatgtcaaggtgctgagaaggacattaatcctttcaacagttagacaaaataatggtgggaatatatactttcttgattgtgttatgagaactaatgtggctttgacaagagca

SEQ ID NO: 99703 - DNA, 632 bp, Zea Mays
atgacgcagagtgcagagacacgatatacggatttgaagctactggtcacggtgaagttaaagctggacgaggagtcgatggcgttgcggcatgaaggtgaagccgagggcgagtggtcggaccaccatcaagctgcgcgagctgaggggcgcgacgatcctcagagaacctcccaaaagatggaagggacacggatggcgatgtcgtggatgtggacacgattgccagaccccacgcgaggacaaaagaaaccaaagcgacaacagtgtagagaaatagaagccgagcgcaagagagagaggaaagcagctgggcgccatgggaggtgtgaagctcagaaggagagagcgctcgtccatggaatagaccttggctgggcgcggctggaagaagagcgcgcgacgcagggagccggggacgcacgtgggagcaggggctggggcgcgccagaggaaaaaccggcgagcagggagagcgcgccgtggggaagagccgctcggctgggcgtgctcccgcgggagaaatagaggtcgagtgactgggagagagaggaccaaggcatggggagggagatgggcggccgagcggccgagcgctgcggggaggagataagctccgggatggccttgcg

SEQ ID NO: 99704 - DNA, 1832 bp, Zea Mays
acccatggccacacccccgtcatccacacacacacaacacagcagagagattactacgatccaacagttctagagcaagagagaggaagacacaccgcagagttagcaggctaataacttgcaggagcagcaggaatggcggcgacgcgtcgcctctcttgctttctcctcgccgtgcttctggcaggagtggccgctgccaccgccttcgacgaagcggctgctgccggcttcgggcttggccacggcgcgcgtttcgcgcgcaagcatggacgtgctgccgctgagatgccccagccggagccacaacctaaaactaagccggagccccatatgcagccactgccccagccagaacctaaaccgaaacctatgccacatccagagccaaagcctgaacctcaaccaaagcccaaccctgaacctcaaccaatgcccaagcctcaaccaaaatccaaaccagagccattgcctacaccgaagcctgaacctaagcccgaacctaagccagagcctaagcccgaacctaaaataaaaccaaagccaaaacctgaaccaaaaccagagcctaagccagagcataaacctgagccaaagccagagcctaaacccaaaccgaaaccagagccaaagccagagccacaaccaaaaccagagcctaagccagagcctaaacccgaaccgaaaccggagccaaagccagagccccaacctaagccagagcctaagcctgagccgaaaccagaaccaaagccagagccacaaccaaagcctgagcctaaaccagaaccaaaaccagagccaaagccagagcctaagcccgaaccaaaaccagagccaaagcctgagcctaaacccgaaccaaggccagaacctaagccagagccaaagcctgagccgaaaccgaaaccagatccaaagccagagccacaaccaaagccagagcctaagccagaaccaaaaccagagccaaagccagagcctaagcccgaaccaaaaccagagccaaagcctgagcctaaacccgaaccaagaccagaaccagaaccaaagccagagcctaaacctgaaccaaaaccgaaaccagaaccggagccacaaccaaagccagagcctaagcctgatccaaaaccagagcctaaacccgaaccaaaaccagagcccccaaccaaaaccagaacctaagcccgaaccaaaaccacagccagaacctaaagcccgagcccaaaccaaagcctgaccctccacacatcccaccagcagctatcaactgaggaagtggctattaacaattattgtagtgtttaaataaaatgccatgttgcagcgtgcttttgtaggtgctgctacttgttgtatctatcctatcttttctttgtcattttttgtatgttatgctattatatgatcttagtgcagtttagcttgttccgtgtatacacgcatttatgcactcagtgggtttttgttatatgttggttgttatgtatatatgttcgctgtttcgagcagctaactaacagaaaccattgttttaatacacaaaagatgattaaatacataattcattcggccttattattgtgcacaaaagcaaaaagggtaaaaaaaggaacaaatgaaacgtgccattcatagtttagtatgttgattttatatgcatctatgcactcgtgaaattttgctatatattcgttgttatgtatgttagctgttttgccggcagctggctgggtcctctcactgttgcagtacgccacatttgattaaatacaaatatccttcttctagtacacaaaagcaaacatgtgaaaaagaaacaaaaagaaacg

SEQ ID NO: 99705 - DNA, 274 bp, Zea Mays
gaggcatgcaaattaacaagacttttttctccaaacccaacaagcgcggaacagtgtgttgatggggcacaagggtaacacatgctcaggtcttaacatatttggcttccgagcaaactttctccaaaccccaagctcagatatgtgtctatgctcatcttagcgtacttccgttgcaacgcacgggtacacacctagtactacaatataaaaggattaacttgctaaccattctccactattggacacgagaaatctttaaaagaatgtcttc

SEQ ID NO: 99706 - DNA, 524 bp, Zea Mays
tcgagcatagaaccggcactcggcgaccacaggcgaatggaaccgagatctcgccatgcagggggaaggagctcacctccgaactcgtcgctcggatccgggccctcctttccgccaccccgtcccgtgaagggcgggagccagaagagcaccgacagcagcacggtcaccccgaactcgtcgctcggatccgggccctcctttccgccaccccgtcccgtgaagggcgggagccagaagagcaccgacagcagtatggtcaccccgagcacgagtgccgcaacgcattacagccgaatcaccctcgccgctcctcctcctcttccgcaccagcagcagaagcggtcgcccctgcttcctcttgtgcctccgcccgccccgtccgcgggctactgcgtctcgccggcgtccttccccatccggcgccgcgatctcacgcatcccagtcggccgccgatgacgagcgagaggtgagggggcgccccgccattgcgccgttgagtgggtgcgcgtgcgtgcggtcg

SEQ ID NO: 99707 - DNA, 2019 bp, Zea Mays
caaggaaggaaatgcatcaacggtttagcacacaactcctatcacctaatgcatcaaacaaggtgataaagattttaaaacatcaaggaggtggcgaatgcaccggggcttgcctgaataacactaggttagtatttgttaggcgatgtccacttgacgatcatctttgtccttgcacttgatcaggcatgttcgtccatcagcatcatcctgcggattagcccgtgcttggggtcgacttggctcgtcttccacatcacgcgattatttatcgtacctcatgagatgcacggtgcacatgtatgagcacgagtataaatagtacaagatagataatttacgctaaaaaggacgaaacacttataacctataaccaagcatattttatatagtataccaattacaactttaaaactaaaagacctaaagtgtttatactcattacttattagacagaccctagattttgattgaaacaaatatatcgatgttacttgatcctaagtattcgaagtagcaatcaacaattattcaaatcatgaaatcgaccaacacacatagaatatcatacctagtttagagaacacactaaacgacttataactttaacttcaaaattcttgggcacctaacacttataaaatttaataaaagaactttcattaactttctaaactaatttaccggttaacctgtgtatcatatatattaataaaacttcccagttttaacacctatagtcccgcaaacactgtgacctctttcatcctacgacatcgaccaattaccaaagcgacttaggcaatttaataaatattatatctagccaaaccatccatcaatccactaacacgaaaaacaaatgaacttaccctgactaattcgacgcgatagtcgcaagcacgacgacggtttccggttgacgtcattgatcacacacgtcaggcgagcgaggcatacaatccggggattcctttttgccgagctggtgacgcatggctagcaccagagtgtctttacggcttggggcttagcgtagacgaggatgacgattgacgacttgttcgagcttttttgtcgcgcacgagaatgacgagtgacgacttgttcgagctggacaccatgaatgagatgttcggccaccagcgagggagtatgccgagcggggaaaatacacagggcgcgtacgagctaagcgacgacaggacggacagatcgacgccatgggcgagatccaagttagaccagcagcacacgggcgagctcgcgcctcgcgcgcacagagactgagtaaaggctgggcgcagggaagcaacggccacggcaagggagctccgcgagctgggcgacagcacgtcgagcgccagggacgagctcacggcggagtcagactcggctggtcatgcgggtcggggaaaaagagaagctggacgccgagcagaagttcgacacgcgcagggaccaagcgagctggagggtgagcaggacgcgcgcacgagaagatggagcaggcagggagcacgcgcgcgcaagggagctcgacggctgggcgagctggagcagacgcgcgtcagagagagcagggcgcgagcttgagggcgacggcaccacggggagcttgaccggacgccggagcagagacgaacacggagggatctcggttggggaaggaaatccgagccaggggcgagctccagagagccgcgcggcccggttgcgtgcagggagccggcgagcacagcagggagaagacgccgagaggaggggatgagggagctccggccatggaagctgctcggcgagcgcagaaaactgggaagctgccgcacgggggaaaaacttggggcgcgccggtcatggagaagaagctgagggggtcgcgacgcaggaagctgggaagttccacggcgaggactcggctggaggggacgcagcttgtgatggcggcagggaatggaagtcacgagggacggagggagatagaagagacacgatgcttgcagaagataaggaagcggc

SEQ ID NO: 99708 - DNA, 2359 bp, Zea Mays
cagttaaagggtcctcaatcatccagcctacatcgagaaggtccttaatcgactcggacggagacactacaccgagactcccttctcgtgcaagtcaaccgcccggtcttagctttattaatttcaaccaaagtctggtacctggcagaggtacatcttttccgatgttgaacccataaaggccgttgacagatccaccatcaagttttatttttgaaaacattcccacccactgaagcatcacctttgttttaaaacaaaacatttttgtatgctaaagcaaggctaagcatcataaaattcttttcaaaacggatatcgaggaagggaaatcaattttcaaggaaggaaatgcatcaacggtttagcacacaactcctatcacctaatgcatcaaacaaggtgataaagattttaaaacatcaaggaggtggcgaatgcaccggggcttgcctgaataacactaggttagtatttgttaggcgatgtccacttgacgatcatctttgtccttgcacttgatcaggcatgttcgtccatcagcatcatcctgcggattagcccgtgcttggggtcgacttggctcgtcttccacatcacgcgattatttatcgtacctcatgagatgcacggtgcacatgtatgagcacgagtataaatagtacaagatagataatttacgctaaaaaggacgaaacacttataacctataaccaagcatattttatatagtataccaattacaactttaaaactaaaagacctaaagtgtttatactcattacttattagacagaccctagattttgattgaaacaaatatatcgatgttacttgatcctaagtattcgaagtagcaatcaacaattattcaaatcatgaaatcgaccaacacacatagaatatcatacctagtttagagaacacactaaacgacttataactttaacttcaaaattcttgggcacctaacacttataaaatttaataaaagaactttcattaactttctaaactaatttaccggttaacctgtgtatcatatatattaataaaacttcccagttttaacacctatagtcccgcaaacactgtgacctctttcatcctacgacatcgaccaattaccaaagcgacttaggcaatttaataaatattatatctagccaaaccatccatcaatccactaacacgaaaaacaaatgaacttaccctgactaattcgacgcgatagtcgcaagcacgacgacggtttccggttgacgtcattgatcacacacgtcaggcgagcgaggcatacaatccggggattcctttttgccgagctggtgacgcatggctagcaccagagtgtctttacggcttggggcttagcgtagacgaggatgacgattgacgacttgttcgagcttttttgtcgcgcacgagaatgacgagtgacgacttgttcgagctggacaccatgaatgagatgttcggccaccagcgagggagtatgccgagcggggaaaatacacagggcgcgtacgagctaagcgacgacaggacggacagatcgacgccatgggcgagatccaagttagaccagcagcacacgggcgagctcgcgcctcgcgcgcacagagactgagtaaaggctgggcgcagggaagcaacggccacggcaagggagctccgcgagctgggcgacagcacgtcgagcgccagggacgagctcacggcggagtcagactcggctggtcatgcgggtcggggaaaaagagaagctggacgccgagcagaagttcgacacgcgcagggaccaagcgagctggagggtgagcaggacgcgcgcacgagaagatggagcaggcagggagcacgcgcgcgcaagggagctcgacggctgggcgagctggagcagacgcgcgtcagagagagcagggcgcgagcttgagggcgacggcaccacggggagcttgaccggacgccggagcagagacgaacacggagggatctcggttggggaaggaaatccgagccaggggcgagctccagagagccgcgcggcccggttgcgtgcagggagccggcgagcacagcagggagaagacgccgagaggaggggatgagggagctccggccatggaagctgctcggcgagcgcagaaaactgggaagctgccgcacgggggaaaaacttggggcgcgccggtcatggagaagaagctgagggggtcgcgacgcaggaagctgggaagttccacggcgaggactcggctggaggggacgcagcttgtgatggcggcagggaatggaagtcacgagggacggagggagatagaagagacacgatgcttgcagaagataaggaagcggc

SEQ ID NO: 99709 - DNA, 389 bp, Zea Mays
tcaaacaccgaaatatggatcatgcttgtgcaaggcaactaatttcaaacaagacgcaggcactttggaaattttaatagtaacacagcattgttcagacttcagagtgctctactggctcatcaatgcttccgaaagaaaatggcttttgattcaaattgccaccatatgtactcattcatatatccatgtctcctacgttctgatgagatcaaaaacattgtgtggactggactccaccacctacaccccaggctcagctttcctggttctcattctccctcttcattcgagaagtttaaccaaccaactgccagaaaccaaatcttcacaattcttcacaagatggttcctgatcactgtcacgtaccaactacgaccttaggatc

SEQ ID NO: 99710 - DNA, 817 bp, Zea Mays
gtcatatgccatttttaccaccgtgaattttaccgttgcaagatcatggataagcatttgaagacccttgccccagtctacgtgggaacaaaattcgtcaagcttgatgctgaaatctgtatactaccacttggctataaactacatccttttaataatcatggagcctaattccatatgtaactaactgcagaatgctccattctttgtggccaaactggcaatcaagacactgccatgtgtaatattgttcaagaagggaattgttgttgaccaattagttgggtttcaagatctcagaagtaaagaagattttctgacaatagcattggaacatattcttattctcaagacgaaagggataatcgatgagaagaagacagataacgacgatgacgatgaagaaagcgaggctaagaataggagggttaggtcctcaactgctcaagactctgactcaaactgaacctgagatgaggattgaggacgcaccgttttttgcactttggattttgtttgtttatttgtttgttctgtgtttgtgttgtattgtactgtaattgatttttgtaaccatgtatcggtaccagacaccacaacaataacatgtacaagagattctttagcatccattgtgtgtaaaagctagggtttgtggctgccttttatttcgtttttcctcagctgtcataggatggtacaccacaacaagaacatgtacaagtatgccatagcttgtctttcttgcttcttaagacattgttctgccttttggcacttatggcatatgactttttcacaaatggattacaaaaca

SEQ ID NO: 99711 - DNA, 369 bp, Zea Mays
atgggagcgtgccatgagatgtacccattggcttttacgccgcctgtaccaccggaggaatcgccagctgtgggctcacccacatggtcgtcacgacgctcggcctcgccaaatgcaacatgcagatatgcatggggtggtgagactcatcacagtgttgggaaaataattgacatcgagagtgatggcctgctcaccattgatattcctaattgggcaacaccatggcaggcagatccatcagacatggaaaagattgagaactctaatgtgagcaattggattagagtcaaagcgatagttccttcacccaaatatggatgggagaatgtgactcgtaatagtattgtgatagttcatagtctatag

SEQ ID NO: 99712 - DNA, 1672 bp, Zea Mays
actcgcgtcgcacggatctctccttccctccaggctccagctccaaagcctcgtcgtcttcttcgccccgccacccgtcctgcacactcacaactagacatcgtaccacccaggttttgctttatgctggttcatttgtctacggacaatggactagttgctgcactgtttctgtgattcaccatgggaagcagtggagcagatacaccgtctaaggagcagcagccacctgctacctcaggtgctgcaataccacctgtttatccagattggtctagcttccaggcatatcccccaatcccaccacatggattcttcccctcacctgtggcatcaagtccacagggtcatcctttcatgtggggagctcaagctatgattccaccttatggaacaccgccaccatatgtcatgtacccccctggagtatatgcccacccatctatgcccccgggtgcacatccatttactccttatgccattacttctccaaatggcaatgctgatgctactggaactactgttgcagctggtaatactgatggcaagccctctgaaggcaaagataaaagtccaacaaagcgatccaaaggaagtttgggcagcttgaacatgcttactggaaagaatcccagtgaacatggtaagtcctcaggtgcatcgggtaatggagtcacttctcaaagtggcgaaagtggcagtgacagttcaagcgaagggagtgaaggaaattctcacaatgattcacatcacaaggaaagtggacaggaacacgatggggatgttcgaagttcccggaatggtgtatcacgtttgcaatctgagggaaaattgaaccaagctatggcaatcttgcccataccatcaagtggcccagcaactgatccaactacaaacctaaatattgggatggactattgggccaacacagcaagctctgctcctgcaattcatggcaaagcgacgtcaacaacagttccaggggctgtggtcccagcagagcagtggacacaggatgaacatgaactcaaaaagcaaagaagaaagcagtccaatagggagtctgcacgtagatctaggttacgtaaacaggctgaatgtgaggaattggctcaacgtgctgatgttttaaagcaggaaaatgcttcacttagagatgaagtaaaccgtatcagaaaagagtacgaggaacttctatcaaggaataactcactaaaggaaaaacttgaaggcaaacaacacaaaactgatgaggcaggacttaacaacaagctgcaacattctggtgatgacagccagaaaaaaggaaactaatgctatcatgcaatgcttgcctacattggtcctaactagattattgggaggtgcaattgtagtatgcacattaactccttactttattgcagttaattgttaccaggttgtgataatgttgatgccaaccttttgtgtgggtgtttcctgtttcagatctatcttggcttatcttttagaagccaagatgtgactgaagctataggctgtgacccaattcactatatctgttagaaatagtggataaagtcaaactttcaaatttgaagtgctgactaatattgttatgtatacctggcaaaagactggtttccttttaattcagtctggttgaacattttgctgggctttcactact

SEQ ID NO: 99713 - DNA, 1812 bp, Zea Mays
actcgcgtcgcacggatctctccttccctccaggctccagctccaaagcctcgtcgtcttcttcgccccgccacccgtcctgcacactcacaactagacatcgtaccacccaggtgatctcgcgcgccactccctccttccatcccttagccccagctttactctcccctcccgcgcccagatcccgaggctcctacccctcgatcgccgccttccagcggccgatccggcgctggctcgcggcccccgacaggttttgctttatgctggttcatttgtctacggacaatggactagttgctgcactgtttctgtgattcaccatgggaagcagtggagcagatacaccgtctaaggagcagcagccacctgctacctcaggtgctgcaataccacctgtttatccagattggtctagcttccaggcatatcccccaatcccaccacatggattcttcccctcacctgtggcatcaagtccacagggtcatcctttcatgtggggagctcaagctatgattccaccttatggaacaccgccaccatatgtcatgtacccccctggagtatatgcccacccatctatgcccccgggtgcacatccatttactccttatgccattacttctccaaatggcaatgctgatgctactggaactactgttgcagctggtaatactgatggcaagccctctgaaggcaaagataaaagtccaacaaagcgatccaaaggaagtttgggcagcttgaacatgcttactggaaagaatcccagtgaacatggtaagtcctcaggtgcatcgggtaatggagtcacttctcaaagtggcgaaagtggcagtgacagttcaagcgaagggagtgaaggaaattctcacaatgattcacatcacaaggaaagtggacaggaacacgatggggatgttcgaagttcccggaatggtgtatcacgtttgcaatctgagggaaaattgaaccaagctatggcaatcttgcccataccatcaagtggcccagcaactgatccaactacaaacctaaatattgggatggactattgggccaacacagcaagctctgctcctgcaattcatggcaaagcgacgtcaacaacagttccaggggctgtggtcccagcagagcagtggacacaggatgaacatgaactcaaaaagcaaagaagaaagcagtccaatagggagtctgcacgtagatctaggttacgtaaacaggctgaatgtgaggaattggctcaacgtgctgatgttttaaagcaggaaaatgcttcacttagagatgaagtaaaccgtatcagaaaagagtacgaggaacttctatcaaggaataactcactaaaggaaaaacttgaaggcaaacaacacaaaactgatgaggcaggacttaacaacaagctgcaacattctggtgatgacagccagaaaaaaggaaactaatgctatcatgcaatgcttgcctacattggtcctaactagattattgggaggtgcaattgtagtatgcacattaactccttactttattgcagttaattgttaccaggttgtgataatgttgatgccaaccttttgtgtgggtgtttcctgtttcagatctatcttggcttatcttttagaagccaagatgtgactgaagctataggctgtgacccaattcactatatctgttagaaatagtggataaagtcaaactttcaaatttgaagtgctgactaatattgttatgtatacctggcaaaagactggtttccttttaattcagtctggttgaacattttgctgggctttcactact

SEQ ID NO: 99714 - DNA, 366 bp, Zea Mays
atggcggctcagatccagactcctccggtgtgggcgggcgctagttcccccggcggcgcggccctagcagcggccaccccgctaacagtagaatctaaggctatacaatatatgcatgcgtaccggcagcgaggttctgtttatatggatttttgtatgtacacaatgtttgcttacgtcatcgactcgagccaggtgagggttcggcgtggaggttcgtcgaggtctgctgctcgtagctcccgtcgctccactcaagatccagcagaagtggagcaaccacgagaagaacttaggcgacatcaggattacttgaagcaacaagctacgcaacatgaatattatgctacacagattcaacaatag

SEQ ID NO: 99715 - DNA, 1130 bp, Zea Mays
tgacgataatcgaccagaatggtctgctcaatataaaccaatgagaaaagcagctgatgtagcaatgataatattttggtttggacaatgtaaacggatggtaaaacagcatggtgaactccccaccaaacacccatctgtctgcaatcactgggaaacagatgtttttatttctaaatcaagcaggcaactactcagatacccttctccagcatcgcccggacccgtgtcggtaggccgtacagcctgatgaacccctcggcgtcagcttggttgtagatctccccgttctcaaacgaggagatatcttccctgtacaggctgtaggggctcttccgggacgcgacgttcacggaacccttgtacagcttcagggtcactgaaccagtggtcgtcgcggtaaccttctccatgaaggcatcaaaggactgccggagcgggtcaaaccagcggccagcatagaccagctcggcgtacttgagggcaatgatgtccttccactgcatggtctccctgtccagggtcagggactccaactcgcgtaccgcggctgccatgatggtgccaccgggggtctcatagaccccacgtgacttcatgccgaccagcctgttttccaccatgtcgatacgcccaatcccatgctttccaccgatttcattgagctccgcgaggagggatgctggtgagaggtctcggccattgattgaaacaggaacaccagcaatgataccaatctccaaatacctgaatgtatgcggctcggcattaatctatcacggccaatcctgctttggatggatccaactctggaataccaggtttcgagggcgcattttctggagcaatcgacatcatatacatatcttcctttggctcatttgctgggtcctccaggatgtcaccctgcaatgtagagaatgattcacttcatctcgcatcaaagatgggcgtcatgttgtttggttaaaggtgtcgacaagtgcaggacattaattcagaacactaatgtggcattttgcatatattggcttaaaagttggaacgtaaccatcttgtaaagttctggtaactaagattctgtcctacatgtaaagaaaaagatattaaactacaaaaaatgctttgat

SEQ ID NO: 99716 - DNA, 3113 bp, Zea Mays
gtccctagcattttccctagtttaactagggacttcgcatccattgtgtctgatttcttctattcagagtgaattgcagaagtagactggtttcttcttcatccagtaagctcagtctgtaccctgcactgcaacaatggtgctaggcctccgaaccaagacaaggaaggattctgccttccatgtggatttcaatattctcatccaagaaatcagcccatggcccccttctgaatcgttgaagtctttgcgctccgtagtactcttctgggaaaatggcgagcgcaattcaggaaagacgagcactgttgcgccttcaattgggtcaggttccacagcagggaagattgaatttaatgagttcataaacttacaggctattttccagaaggaggggtcatccaagagtggaaagtggcagaagaacctgcttgaattgaacttgtatgagccgaggagggagaagctgaagggccagcatttggggtctgcaacactagaccttgcagagcatgcaatgtttcatgaggacaccagtgttcctgtgcctctcagttccaagagaagtttcaaaaacaatgcccaacccatggtttacctccgaatccagcctttggatggcgataactcaagcgtttcttcaagagatgcattatcacaagaggcatcagttgataaagattcaaaggaatttgtctcagcaacggtgagtgaggagtatactgaagatacagagtttgcttcctttactgatgaagaagaagcaactccatacctgtaccgctcgggtgtaactgctctcacaggtagcaatagatctcatgaatccctcaagggcaaggatatcaggttaactaataatgaaggtaccagctcatcgttggattctcaacatgaagcaacagtatcctgtatgaaagtgaggaatgaagaagttgaaaagtttccaattcaagtgcaaaagcaaaatggccatccagaaaatctgtctctctcatcagatttgcccagagaacaaagtccgtctcttccaccacacaatgcattcagaagtggtcgtaaaatgtcatttgcatatggtatgactgaatctaaccaaagacagtttggggagagaacttatagcactttaactactgatagagcaaggaatgcgaggttcagtatgagagttccagatgttaatggaagtatcataaataagaaagttgattcccaggatattgcaattactcatgagaataaggccagtgttgatgatggattgcaagtccaggaaccaatacgcatttcaaataatcgaaatgacaacaaagttcgagaactagaacttaaaattgagttgcttgaagcagagctaagggaagctgccgctgctgagataggcctttattcaataattgcagaacatggtagttcagtaaacaaggttcatacaccggcacggaggctctccaggcattttgtgcatgcactaaaaaactgttcaagagacaagatgggaagtgcagcaaggaacacaacctctgggctggttttggttgcaaaagcttgtggatatgacattgcaaggttgagtttctggttgtcaaactgtgttgtactgcgagcaattgttactgaaacttctaggcaatcgggcactgtaaatagcagcaattatggtgattataattccaaaacaacatacaggaaaaactctgcatcaatgtgggagtcacttaataggaagaaaggaaaattactttcccctgagtttgataactgggaagatgttgacacatttatagctgcactaaagaagatcgaatcatggatattttctcgaattgttgaaaccctttggtggcagacattcacaccacatatgcaatctgctgatataactggtggtttgagaagtactccaaatccaaaaaaaggctatggaaagattcctgttgtgggcaaccagcaacaagcaaccatatcaatggacatatggaagaaagcctttaaggaagcgtcagaacggctttgcccagtaagggcagctggtcatgagtgtggatgtctgcctatgttaaccaagttggtgatggagcagtgcatagctaggttggatgtagcaatgttcaatgctattttgcgtgaatcagatgatgaaattccaacagacccgctgtctgatcccataactgatcctaaagttcttccaatcccatctgggaaattcagcttcggtgctggggtccaactgaaaaatgctattggcagctggtctagatgtcttactgacttgtttggcatggatatggacgactatcaagaacttgacaatgaaggtggtgaaaatggctttggtgaatctgtaaagccattctatcacctgaatgcactgagtgatctcctaatgcttcccaaggatgtgctcatggataccagtagcaggaaagagctttgccctacctttagctcatcaatcatcaagaacatcctggatgtctttttaccagatgaattttgtccagatcccattcaaggttctttacttcaagcactagagttggaggaccacctggaggttaacaagggcatacggtcgatcccgtgcagcgcatcgccaattttgtacaatgcccctgtatctggggcaatactaagcgtcatcggtgatcctaggaagagcgggtccgccatccttcacaagtccaacacgagcgatgacgagcttgatgagctgagctccccacttaccttcatctccaacacctcatcagacccgcttgcgaagctgaagcggatcagcaactcgaccacagcgaggtataggcttctccatgaggtgtggaagctggatgaccagtaggacttgatcctatcaccaccatggttctcccctctgtatataggtttgtttttttgcatatgattccggctcatgtataagatttcagtctatttgttatgttatgttacaagaagatgaggggcaagcgttgaatcttaataaatccgctgtgtctaaatgcaagagtgttcggtatgtgttgtgctagggtgtgaatcatgtgttttgcagatgtaggcaattcaagtggcccaacgtgcaggcccatttcttctactcccca

SEQ ID NO: 99717 - DNA, 3413 bp, Zea Mays
gactcgagctccctagatttcgattagaaaactcgatcagattcttttctttcctctcctccggaatagtttattccgctttgctttgggtccacgatctcttcttcgtctcctcctcgaggcagaggaagacgtccggcttcttgtatccgccttgttagccccacacaccgacaacctggactgcgcgtccacgaactcactcgccgaacagacatcattccccttaccccgacgtttgaaatcctctccagccgatgcatcctccccatcaatcttctccggttcgttgcattgcgtctggattggcctgcccctgctagattcagggacttcgcatccattgtgtctgatttcttctattcagagtgaattgcagaagtagactggtttcttcttcatccagtaagctcagtctgtaccctgcactgcaacaatggtgctaggcctccgaaccaagacaaggaaggattctgccttccatgtggatttcaatattctcatccaagaaatcagcccatggcccccttctgaatcgttgaagtctttgcgctccgtagtactcttctgggaaaatggcgagcgcaattcaggaaagacgagcactgttgcgccttcaattgggtcaggttccacagcagggaagattgaatttaatgagttcataaacttacaggctattttccagaaggaggggtcatccaagagtggaaagtggcagaagaacctgcttgaattgaacttgtatgagccgaggagggagaagctgaagggccagcatttggggtctgcaacactagaccttgcagagcatgcaatgtttcatgaggacaccagtgttcctgtgcctctcagttccaagagaagtttcaaaaacaatgcccaacccatggtttacctccgaatccagcctttggatggcgataactcaagcgtttcttcaagagatgcattatcacaagaggcatcagttgataaagattcaaaggaatttgtctcagcaacggtgagtgaggagtatactgaagatacagagtttgcttcctttactgatgaagaagaagcaactccatacctgtaccgctcgggtgtaactgctctcacaggtagcaatagatctcatgaatccctcaagggcaaggatatcaggttaactaataatgaaggtaccagctcatcgttggattctcaacatgaagcaacagtatcctgtatgaaagtgaggaatgaagaagttgaaaagtttccaattcaagtgcaaaagcaaaatggccatccagaaaatctgtctctctcatcagatttgcccagagaacaaagtccgtctcttccaccacacaatgcattcagaagtggtcgtaaaatgtcatttgcatatggtatgactgaatctaaccaaagacagtttggggagagaacttatagcactttaactactgatagagcaaggaatgcgaggttcagtatgagagttccagatgttaatggaagtatcataaataagaaagttgattcccaggatattgcaattactcatgagaataaggccagtgttgatgatggattgcaagtccaggaaccaatacgcatttcaaataatcgaaatgacaacaaagttcgagaactagaacttaaaattgagttgcttgaagcagagctaagggaagctgccgctgctgagataggcctttattcaataattgcagaacatggtagttcagtaaacaaggttcatacaccggcacggaggctctccaggcattttgtgcatgcactaaaaaactgttcaagagacaagatgggaagtgcagcaaggaacacaacctctgggctggttttggttgcaaaagcttgtggatatgacattgcaaggttgagtttctggttgtcaaactgtgttgtactgcgagcaattgttactgaaacttctaggcaatcgggcactgtaaatagcagcaattatggtgattataattccaaaacaacatacaggaaaaactctgcatcaatgtgggagtcacttaataggaagaaaggaaaattactttcccctgagtttgataactgggaagatgttgacacatttatagctgcactaaagaagatcgaatcatggatattttctcgaattgttgaaaccctttggtggcagacattcacaccacatatgcaatctgctgatataactggtggtttgagaagtactccaaatccaaaaaaaggctatggaaagattcctgttgtgggcaaccagcaacaagcaaccatatcaatggacatatggaagaaagcctttaaggaagcgtcagaacggctttgcccagtaagggcagctggtcatgagtgtggatgtctgcctatgttaaccaagttggtgatggagcagtgcatagctaggttggatgtagcaatgttcaatgctattttgcgtgaatcagatgatgaaattccaacagacccgctgtctgatcccataactgatcctaaagttcttccaatcccatctgggaaattcagcttcggtgctggggtccaactgaaaaatgctattggcagctggtctagatgtcttactgacttgtttggcatggatatggacgactatcaagaacttgacaatgaaggtggtgaaaatggctttggtgaatctgtaaagccattctatcacctgaatgcactgagtgatctcctaatgcttcccaaggatgtgctcatggataccagtagcaggaaagagctttgccctacctttagctcatcaatcatcaagaacatcctggatgtctttttaccagatgaattttgtccagatcccattcaaggttctttacttcaagcactagagttggaggaccacctggaggttaacaagggcatacggtcgatcccgtgcagcgcatcgccaattttgtacaatgcccctgtatctggggcaatactaagcgtcatcggtgatcctaggaagagcgggtccgccatccttcacaagtccaacacgagcgatgacgagcttgatgagctgagctccccacttaccttcatctccaacacctcatcagacccgcttgcgaagctgaagcggatcagcaactcgaccacagcgaggtataggcttctccatgaggtgtggaagctggatgaccagtaggacttgatcctatcaccaccatggttctcccctctgtatataggtttgtttttttgcatatgattccggctcatgtataagatttcagtctatttgttatgttatgttacaagaagatgaggggcaagcgttgaatcttaataaatccgctgtgtctaaatgcaagagtgttcggtatgtgttgtgctagggtgtgaatcatgtgttttgcagatgtaggcaattcaagtggcccaacgtgcaggcccatttcttctactcccca

SEQ ID NO: 99718 - DNA, 3490 bp, Zea Mays
agaggaagacgtccggcttcttgtatccgccttgttagccccacacaccgacaacctggactgcgcgtccacgaactcactcgccgaacagacatcattccccttaccccgacgtttgaaatcctctccagccgatgcatcctccccatcaatcttctccggttcgttgcattgcgtctggattggcctgcccctgctagattcagggacttcgcatccattgtgtctgatttcttctattcagagtgaattgcagaagtagactggtttcttcttcatccagtaagctcagtctgtaccctgcactgcaacaatggtgctaggcctccgaaccaagacaaggaaggattctgccttccatgtggatttcaatattctcatccaagaaatcagcccatggcccccttctgaatcgttgaagtctttgcgctccgtagtactcttctgggaaaatggcgagcgcaattcaggaaagacgagcactgttgcgccttcaattgggtcaggttccacagcagggaagattgaatttaatgagttcataaacttacaggctattttccagaaggaggggtcatccaagagtggaaagtggcagaagaacctgcttgaattgaacttgtatgagccgaggagggagaagctgaagggccagcatttggggtctgcaacactagaccttgcagagcatgcaatgtttcatgaggacaccagtgttcctgtgcctctcagttccaagagaagtttcaaaaacaatgcccaacccatggtttacctccgaatccagcctttggatggcgataactcaagcgtttcttcaagagatgcattatcacaagaggcatcagttgataaagattcaaaggaatttgtctcagcaacggtgagtgaggagtatactgaagatacagagtttgcttcctttactgatgaagaagaagcaactccatacctgtaccgctcgggtgtaactgctctcacaggtagcaatagatctcatgaatccctcaagggcaaggatatcaggttaactaataatgaaggtaccagctcatcgttggattctcaacatgaagcaacagtatcctgtatgaaagtgaggaatgaagaagttgaaaagtttccaattcaagtgcaaaagcaaaatggccatccagaaaatctgtctctctcatcagatttgcccagagaacaaagtccgtctcttccaccacacaatgcattcagaagtggtcgtaaaatgtcatttgcatatggtatgactgaatctaaccaaagacagtttggggagagaacttatagcactttaactactgatagagcaaggaatgcgaggttcagtatgagagttccagatgttaatggaagtatcataaataagaaagttgattcccaggatattgcaattactcatgagaataaggccagtgttgatgatggattgcaagtccaggaaccaatacgcatttcaaataatcgaaatgacaacaaagttcgagaactagaacttaaaattgagttgcttgaagcagagctaagggaagctgccgctgctgagataggcctttattcaataattgcagaacatggtagttcagtaaacaaggttcatacaccggcacggaggctctccaggcattttgtgcatgcactaaaaaactgttcaagagacaagatgggaagtgcagcaaggaacacaacctctgggctggttttggttgcaaaagcttgtggatatgacattgcaaggttgagtttctggttgtcaaactgtgttgtactgcgagcaattgttactgaaacttctaggcaatcgggcactgtaaatagcagcaattatggtgattataattccaaaacaacatacaggaaaaactctgcatcaatgtgggagtcacttaataggaagaaaggaaaattactttcccctgagtttgataactgggaagatgttgacacatttatagctgcactaaagaagatcgaatcatggatattttctcgaattgttgaaaccctttggtggcagacattcacaccacatatgcaatctgctgatataactggtggtttgagaagtactccaaatccaaaaaaaggctatggaaagattcctgttgtgggcaaccagcaacaagcaaccatatcaatggacatatggaagaaagcctttaaggaagcgtcagaacggctttgcccagtaagggcagctggtcatgagtgtggatgtctgcctatgttaaccaagttggtgatggagcagtgcatagctaggttggatgtagcaatgttcaatgctattttgcgtgaatcagatgatgaaattccaacagacccgctgtctgatcccataactgatcctaaagttcttccaatcccatctgggaaattcagcttcggtgctggggtccaactgaaaaatgctgtgagttaaataacaactatgcttattgagttattgtgaggtcacacaacttaccgccgatggaccttttgtctcccttaattctcatttgttacaaagaccattgacctgcttccctcttttagattggcagctggtctagatgtcttactgacttgtttggcatggatatggacgactatcaagaacttgacaatgaaggtggtgaaaatggctttggtgaatctgtaaagccattctatcacctgaatgcactgagtgatctcctaatgcttcccaaggatgtgctcatggataccagtagcaggaaagaggcatgaaatcatatcttgttcaaaggactgctctatattttaatgtcttattgaaacgttttttaaaatacctatctcgttcaaaagggtgctctatattttaatgacttattgaaacgtttttttaaacaatatcttactgtcatgtaatgttttacagctttgccctacctttagctcatcaatcatcaagaacatcctggatgtctttttaccagatgaattttgtccagatcccattcaaggttctttacttcaagcactagagttggaggaccacctggaggttaacaagggcatacggtcgatcccgtgcagcgcatcgccaattttgtacaatgcccctgtatctggggcaatactaagcgtcatcggtgatcctaggaagagcgggtccgccatccttcacaagtccaacacgagcgatgacgagcttgatgagctgagctccccacttaccttcatctccaacacctcatcagacccgcttgcgaagctgaagcggatcagcaactcgaccacagcgaggtataggcttctccatgaggtgtggaagctggatgaccagtaggacttgatcctatcaccaccatggttctcccctctgtatataggtttgtttttttgcatatgattccggctcatgtataagatttcagtctatttgttatgttatgttacaagaagatgaggggcaagcgttgaatcttaataaatccgctgtgtctaaatgcaagagtgttcggtatgt

SEQ ID NO: 99719 - DNA, 723 bp, Zea Mays
tcagtggttcttcaagggccagtagacaccaggcagtaaggtgatgtatgagtcatttgtatctgccgcgttttacctgtatacatgagatacctaccctgccctgctccttctcgtgtacatcgaggagctccactttggcagtctgtgctactatgcttcttccactcctgaaactgagcctgcaggtgcaggcaatgcggtcgctcgccggagtccttatccaatcggcgaaggcactgaactcacgaagccgttgggatctgcaagcaaggtcatgttcatgcacatcgtgttggatgaagttagtacaacctgtaagatacggaatctgtgtaagcaagagcattcataccttgatagcttccttctctctctcaagatcgatctagagaccaacaagatcatggacttcttcaagtttgacgtcggcaacgtggtcatggtgaccggcgggaggaacatcgagcgtgtaggagtgatcaagaactgggagaagcacaagggcagcttcgaggtcatcgatgtgctgcttggagctttttgcatgctatgtctagttttctcctatttgttgtacaggaaaacatagaatggaattcaaatttggtggtcgcaaaagtgtggagacttgaattcatataaagttaggcttaacattagtgcaaacagttgtattttagtttagatttagagtacacttatgtatgccttgtttgacaa

SEQ ID NO: 99720 - DNA, 206 bp, Zea Mays
atgctgcttggcgtcattctaatccaagtaggtgaggggtcaacagtggctaacttccctatcactttattccaaagagcaaaagggaatcccaccctagcagcaccctagcagtgatattttccctggattatggctgtccagggatcctacatggtgtggattttatctccgggttaattacccttggttgccaaactagccct

SEQ ID NO: 99721 - DNA, 103 bp, Zea Mays
agatgaatcctatttggtttcgattaaagcaaaccgtatcataggtaccgtcgactcattatgcatcgctaataaatcaaccgtgggatccaaaatatctacg

SEQ ID NO: 99722 - DNA, 642 bp, Zea Mays
atggcgctcggtgtcacctatgtctcccacgcgcaccccttcgatctcttcgtcgtgctgacatcgattcgtcccaccgttatgttagtagccatggaggcacctgctctagctccacttctatggttcaccattgtgagcgctacttcgtcgtgtcgatgtcaggttcccctgcgtcagtcaccctccacgctcagcgcccaggattcctcctcgacgttcttccctgctccaactgcgtccgctcagccaccatgcaccccctgcttcatcctcgccgtggacgcgtacggctcctgtcctctcccatgccgcgtgctggtagcattcgggcagctgtgggcgcaagagctctggtcgtgctccctactgccgttcgccatagtcgcggtgtccctctccctcgccatggaagctcccgtgcgagcttttctgttggccggctgttctgaccgtggtctgctgctccctcggccatggcgtggacaaccgcgtctcgtctcatggaaccgccatggactcaccaagacaccagtcgtgctcctcctcatcgctagcgccctgtgcgcgctcgctggccattcttgtcttcctcgccgatcatggctttctagtgctcgcttcctccgagctcggccatga

SEQ ID NO: 99723 - DNA, 1624 bp, Zea Mays
gtgtgcagtgtgtgtgtgcgtgcaggtgtccctaacctatacctctcttgtaagaccctttcttctatcttatctataaagacgtgcaagtctcatgtttctttcaaaaaaaagttttaatactatggtaaaaaatattgtgagtatgtcttgacatttcaaaactgaagtatttcaaaactatagctttcaaatactttgtttccaaataggacctaattgtaaattagtccggtcgattggagtcttcaactatccaccagttgcaaattcaatctataagttaattgtaattttcctttccaatgtattatcaattggaatacccgaatgcttttgaactgccactgtgatttggcggcagctctctcaatatcaccacaggaacaaaggatcagaaatggctatgcaggccgcaaggaggctagcatctttgaaactccaacgacgcctactccttccctctcaggccgagtccccaagcataagcatcccaaccgcagcggcggcggcagccttcctccactcccatgccaccagcttcgggtacaagcaggttcgcgaagaggataagagcaaattggttggcaacgtgttcagcagcgtggcttctagctacgacctcatgaacgatctcatgagtgtcggcctgcataggctgtggaaggacaggcttatttccaagctgaaccccttttcggggatgaagcatctcgatgtggctggtggaacaggtgatgttgcttttcgtgtactggaaagagttaagagtgtgggtcacagagctatgcagggtactcttactgaaaccgaagaaggcacccacatttatgtctgtgacattaatccaaatatgctaaatgttgggaaaaagcgtgctgcagaaagaggttatagcgaagaacattgtcttagctggatacaaggagatgcagaagctctgagttttgaggatggatctatggatggttacactatcgcatttgggatcagaaatgtgacgcacattgagaaagctctgtcagaagcttacagggttctaaagcaaggggggaggttcctatgcttggagttgagtcatgtggatgtccctatttttaaagagatttatgatgtttactcgttttctatggttccggctattggagagctggttgctggtgatcggcagtcgtaccaatacttggttgagagcatccgtcggtttccgaatcaggaaaagtttgctcagatgattcaggaagccggattccagagggtggaatatgagaacctcgtgggtggtgtagttgccattcattctggactgaaactgtagagctgaatacggatggatattttttcatacgtgcaccgcttctacaattagtagtatttgttttttaaattaattctataataggttcggtggcttgtaaaagcagctggtgctggctgtcagcatcagcacaataagtagtatttgctaataagtagtatttgcgagaagtatatgctggagcagtagcgtcagtggctattttggcttttaagctagctgacctcttccatttgtaaagttttttcttgaaaacgtgaaaccatccagaacatcaaattagtcttatcacatacctcctgcaat

SEQ ID NO: 99724 - DNA, 930 bp, Zea Mays
atgtcaggagacaaagtaacctttatatgtgaagaaagcaccggatggcttctcaatattcatcataaatcatcaaaaactaagggccagcttcagaaggatttgcttggtataaaaaggaaggctcttgccctcagaaggggagggaaaaacactgaagctgaggaggaacttgagaaggctaaggtgttggagcagcaacttgcagagatggaagaatcaaataacttgagtgctagtcaaggtgttactactgctggtggggacgaaatattgctagtgcatgcatctgaatctggtatgccagtggttactctgtgtggttctccaagtaaaccgcagattgagacaaccaatcctaatcaaggtgatgtgggagaagaaagtagagctagaaggtctccagccttgtcgcagccagcttttactgatctgctgggatctgaaaaagggtcacattcaccttctgtagtacatgatcgtaatgagcatcagaaaacacaaggagatgatactcttaaagatgagatattacttcataagagaaaagcatttgcctttaagagagaagggaagatggcagaagctagagaagaattgaaactggcaaaacaattagaaaagcaccttgaaggtgctcaaacaagaaaccatggatgtttagtccaacaacctgctagctccagcaatcacactgacgacataacttgtccccctcctgcacaagcgagcaagcggacacaacctcagaaagcaatgtccagccgggaccgtctcaaaatccagcgtgaatccctggcccacaagcacaatgccctcaagttgcggagagaaggaaagactgcagaagcagatgcagaatttgaactggccaaggagctagagagccaactggaagactcatttagcattgccaacttgtgcaattag

SEQ ID NO: 99725 - DNA, 220 bp, Zea Mays
gacgtgggttgtacgtgggaatgagaattggaatgagttttgcggggagggagaatgagaaaggcagaacaaggaatgacataacatgcggggataagggaatggtggcagaacacggaattgtagactactcttgcagccttaataagtagtagagattatagcaccagaaataggatacgatgaccttccattaccgctgatcccattcttgtttctt

SEQ ID NO: 99726 - DNA, 102 bp, Zea Mays
ccaaacacaatgggtgtcacaaaatacccttcccacaaattagaaagcatagaaggatggagacagaaagaaaaattcggcagcacctcccttgaaagttgc

SEQ ID NO: 99727 - DNA, 1140 bp, Zea Mays
tccggctatccctcaagaacgccctctctccacgcttgtgccaatttcttcgccctccaccagtgagcacgccaagccaccgccccttcctgttgcccagcgcccccctgcagcgcgcccgcccgcccgcctccctaccctggccgcggcggccttcgctccatgcacctgctttaggttgcgccgccgtgcgccctcgctgtgccggccgacctcgccgcggcctgacccagtcatcgtccctgcttcatctccccgtcatgctcctccatgggcgtggtgatcacctatgccgtcgtagccatgccttgggcgccacaccggccgtcagcctcatctctctgctcgcctgtctccttgcctccctgtgctcaccacgccggacgccgctcccaaccctccacacttccctccccaggccgcggcggccttcgctccagttctgcctcgccatcgactgagtccccacgtccctgcgcggcgacgtgctcgcccaggccctgccaaggactcctgcgaactccaacctcatcgcctagccccgccaccgtttctaaagtgatgatccattcagcatgtcctcgtgctcatcgcatggatcatatctgggctcacactggggctcgtcgctcggcctcgtcgagctagagatcctccaacatagcagcacagacgccaagaaggcttagcctttgcaggcacttcctatatttcttgataggatgtttcatcatgttcttgctgtaatattgtcagtgacatttgttcttgcctttggagagggatcatatctgagctcagactggggctcatgtcgctcggcctaatgtagcagcacagtcatttcaggagaccattgatagtatgatgaggtcgatgcaaaaaaaaataacaaccaccttcatcaactattaagcttcagtcgaggtcaagcgtgtccatctttaagtctgcttgaccactataggatctgtaaccttatggatgttatagtagctagtaacaatatgcttaatatttagtacttgagttgaagttataggattttctttggaattgaagttaaaggatttgtagatatatgttttgacgttatatgattctctaatggatgaaatattcgtgttcaacatattaata

SEQ ID NO: 99728 - DNA, 660 bp, Zea Mays
tccggctatccctcaagaacgccctctctccacgcttgtgccaatttcttcgccctccaccagtgagcacgccaagccaccgccccttcctgttgcccagcgcccccctgcagcgcgcccgcccgcccgcctccctaccctggccgcggcggccttcgctccatgcacctgctttaggttgcgccgccgtgcgccctcgctgtgccggccgacctcgccgcggcctgacccagtcatcgtccctgcttcatctccccgtcatgctcctccatgggcgtggtgatcacctatgccgtcgtagccatgccttgggcgccacaccggccgtcagcctcatctctctgctcgcctgtctccttgcctccctgtgctcaccacgccggacgccgctcccaaccctccacacttccctccccaggccgcggcggccttcgctccagttctgcctcgccatcgactgagtccccacgtccctgcgcggcgacgtgctcgcccaggccctgccaaggactcctgcgaactccaacctcatcgcctagccccgccaccgtttctaaagtggtgatccacaacttccctctgttgtcagtgaatacaatttttgctagtaccttgctgatgtatgtgtgtaccgtgtacgtgtgtgcaattggagcatag

SEQ ID NO: 99729 - DNA, 2038 bp, Zea Mays
cacatcgtgcggcagccctggctggtcttccgtcttcctcgaaaccctgacgcggccgccacgccatgctcgccgcaagtcccctgcgccaagtgccgccgccgggcatcccatccacctcccgtcctactccctgaaggcatgaacccccgttccaagcgccctataccgccgccatctcccgttcccctttcctttgttctctttcgtctgctgggcaaaccaacgccgccagccactggtcgatcacttccagccaaggagtggcggacgcgcagggcttggagtgtggcggacaggcggatcctgtagcggcagagacaggtacggacgagagaggtgagttctccgcacgatcggctgggacaggggaacgacgcgcgcaactgtgtggcctgggggggcattaaacgcttaaacggcgatcaatcgtcgcttaatcgattgctgtcgggtactcctggcactcagaagaggttgaactaagatagggatattcaatgacgggtggatcgggtgtggtggtgatagacaatgggggtggtcttctcaaggctggctttgggggggacaatgatccaattgctgttgtccccaactgtatggccaaaccccctggtggcaatgccagctcgaagaaatggcttgtggctgaccagctgcaggcagaagatgtcgatgtgactggcatgactttgaagcgtcctattgaccgtggctatcttatcaataccgaggtgcagagggatgtgtgggaacgggttttgcgcaatcttctccaggttgatcctactaactcgtccttgttactggtggaacccatgtttaaccctccagcgatacagcatgcaactgatgagctagtgttcgaggagtttggcttcaactcgctttatgttgcagatggtccttcccttgtccacctttatgaggctagccgacaaccaatgatgtttcgtgcccaatgcagccttgttgttgactgtggcttctctttcacccatgcatcccctgtacttcagaactttactcttaattatggtgttcggcgtatggaccttggcggcaaggcccttacaaactatctcaaggagctcgtctcataccgttcccttaatgttatggatgaaactctcctcattgatgatgcaaaggaaaagctatgttttgtctcgcttgatgtccctggtgatctacaccttgccaggttatcatttaaggataacccttttagatgttcttatattctccctgatggtataacatacaagaaagggtttgtcaaggatatggatgaagcacttagatatcgcaccctgcctcaagtatcagatagcaaagaccatggtatggatacaaataagtccgaggatcggaaaaaggcagaattaagtcaaaatgaatttgtcttgacaaacgagaggttccttgtcccagagatgctttttcatcccattgatcttggcataaatcaagctgggcttgctgagtgtatagttcgtgctgtacaagcttgccatccatatcttcaacctgtgctttttgagagcatcatcttgacaggtggaagcacactgttccccagattcaccgaaagattggagagggaacttcggcctcttgtccctgacgactacaaggttaagataactcgtcaagagaacccaatttttggtgtctggagaggcggatctattctagcatcaagtcctgatttcgaatcaatgtgcataacgaagtctgagtacgaggagatgggatcagcacggtgccgacgaaggttttttcactgaacagaatactgagtttttggcgaagtagcttcagtgtaggtcaatcgcttaggagaagcgagtcttgtttgtaaatactggtgttgcatgtatttagtccagatgtttgacagtttggtggtatatgaattagaagtccggttaacagtaatcatttttactctgatttgacaactgtagctcgtgagattgaaatggcaaggtggttgaccggacccttgcgtatgacagtggctcgaaaattg

SEQ ID NO: 99730 - DNA, 1771 bp, Zea Mays
cacatcgtgcggcagccctggctggtcttccgtcttcctcgaaaccctgacgcggccgccacgccatgctcgccgcaagtcccctgcgccaagtgccgccgccgggcatcccatccacctcccgtcctactccctgaaggcatgaacccccgttccaagcgccctataccgccgccatctcccgttcccctttcctttgttctctttcgtctgctgggcaaaccaacgccgccagccactggtcgatcacttccagccaaggagtggcggacgcgcagggcttggagtgtggcggacaggcggatcctgtagcggcagagacaggtacggacgagagaggtgagttctccgcacgatcggctgggacaggggaacgacgcgcgcaactgtgtggcctgggggggcattaaacgcttaaacggcgatcaatcgtcgcttaatcgattgctgtcgggtactcctggcactcagaagaggttgaactaagatagggatattcaatgacgggtggatcgggtgtggtggtgatagacaatgggggtggtcttctcaaggctggctttgggggggacaatgatccaattgctgttgtccccaactgtatggccaaaccccctggtggcaatgccagctcgaagaaatggcttgtggctgaccagctgcaggcagaagatgtcgatgtgactggcatgactttgaagcgtcctattgaccgtggctatcttatcaataccgaggtgcagagggatgtgtgggaacgggttttgcgcaatcttctccaggttgatcctactaactcgtccttgttactggtggaacccatgtttaaccctccagcgatacagcatgcaactgatgagctagtgttcgaggagtttggcttcaactcgctttatgttgcagatggtccttcccttgtccacctttatgaggctagccgacaaccaatgatgtttcgtgcccaatgcagccttgttgttgactgtggcttctctttcacccatgcatcccctgtacttcagaactttactcttaattatggtgttcggcgtatggaccttggcggcaaggcccttacaaactatctcaaggagctcgtctcataccgttcccttaatgttatggatgaaactctcctcattgatgatgcaaaggaaaagctatgttttgtctcgcttgatgtccctggtgatctacaccttgccaggcataaatcaagctgggcttgctgagtgtatagttcgtgctgtacaagcttgccatccatatcttcaacctgtgctttttgagagcatcatcttgacaggtggaagcacactgttccccagattcaccgaaagattggagagggaacttcggcctcttgtccctgacgactacaaggttaagataactcgtcaagagaacccaatttttggtgtctggagaggcggatctattctagcatcaagtcctgatttcgaatcaatgtgcataacgaagtctgagtacgaggagatgggatcagcacggtgccgacgaaggttttttcactgaacagaatactgagtttttggcgaagtagcttcagtgtaggtcaatcgcttaggagaagcgagtcttgtttgtaaatactggtgttgcatgtatttagtccagatgtttgacagtttggtggtatatgaattagaagtccggttaacagtaatcatttttactctgatttgacaactgtagctcgtgagattgaaatggcaaggtggttgaccggacccttgcgtatgacagtggc

SEQ ID NO: 99731 - DNA, 1812 bp, Zea Mays
cacatcgtgcggcagccctggctggtcttccgtcttcctcgaaaccctgacgcggccgccacgccatgctcgccgcaagtcccctgcgccaagtgccgccgccgggcatcccatccacctcccgtcctactccctgaaggcatgaacccccgttccaagcgccctataccgccgccatctcccgttcccctttcctttgttctctttcgtctgctgggcaaaccaacgccgccagccactggtcgatcacttccagccaaggagtggcggacgcgcagggcttggagtgtggcggacaggcggatcctgtagcggcagagacaggtacggacgagagaggtgagttctccgcacgatcggctgggacaggggaacgacgcgcgcaactgtgtggcctgggggggcattaaacgcttaaacggcgatcaatcgtcgcttaatcgattgctgtcgggtactcctggcactcagaagaggttgaactaagatagggatattcaatgacgggtggatcgggtgtggtggtgatagacaatgggggtggtcttctcaaggctggctttgggggggacaatgatccaattgctgttgtccccaactgtatggccaaaccccctggtggcaatgccagctcgaagaaatggcttgtggctgaccagctgcaggcagaagatgtcgatgtgactggcatgactttgaagcgtcctattgaccgtggctatcttatcaataccgaggtgcagagggatgtgtgggaacgggttttgcgcaatcttctccaggttgatcctactaactcgtccttgttactggtggaacccatgtttaaccctccagcgatacagcatgcaactgatgagctagtgttcgaggagtttggcttcaactcgctttatgttgcagatggtccttcccttgtccacctttatgaggctagccgacaaccaatgatgtttcgtgcccaatgcagccttgttgttgactgtggcttctctttcacccatgcatcccctgtacttcagaactttactcttaattatggtgttcggcgtatggaccttggcggcaaggcccttacaaactatctcaaggagctcgtctcataccgttcccttaatgttatggatgaaactctcctcattgatgatgcaaaggaaaagctatgttttgtctcgcttgatgtccctggtgatctacaccttgccaggcataaatcaagctgggcttgctgagtgtatagttcgtgctgtacaagcttgccatccatatcttcaacctgtgctttttgagaggtatcatttccatttacatacatctgcacctgcattgatctttgaacatggtatgcatgtgagttcacattgttgggatgtttccagcatcatcttgacaggtggaagcacactgttccccagattcaccgaaagattgtaagttgtttctttagcattatagacagtatatgcctttattttgtcatgagttggatacacttgttatttggtttcttttgaggtagtcactgagattgcataaactgcattgacagggagagggaacttcggcctcttgtccctgacgactacaaggttaagataactcgtcaagagaagtatgtctctcgcaccccctcttgcatgcccaattttattggtggaaaatgctgaaaaatgaatcataccgtgcatatgattggcattgctgttaacaattgtttgctatgtgtagcccaatttttggtgtctggagaggcggatctattctagcatcaagtcctgatttcgaatcaatgtgcataacgaagtctgagta

SEQ ID NO: 99732 - DNA, 1433 bp, Zea Mays
gttttgctggcccacatcgtgcggcagccctggctggtcttccgtcttcctcgaaaccctgacgcggccgccacgccatgctcgccgcaagtcccctgcgccaagtgccgccgccgggcatcccatccacctcccgtcctactccctgaaggcatgaacccccgttccaagcgccctataccgccgccatctcccgttcccctttcctttgttctctttcgtctgctgggcaaaccaacgccgccagccactggtcgatcacttccagccaaggagtggcggacgcgcagggcttggagtgtggcggacaggcggatcctgtagcggcagagacaggtacggacgagagaggtgagttctccgcacgatcggctgggacaggggaacgacgcgcgcaactgtgtggcctgggggggcattaaacgcttaaacggcgatcaatcgtcgcttaatcgattgctgtcgggtactcctggcactcagaagaggttgaactaagatagggatattcaatgacgggtggatcgggtgtggtggtgatagacaatgggggtggtcttctcaaggctggctttgggggggacaatgatccaattgctgttgtccccaactgtatggccaaaccccctggtggcaatgccagctcgaagaaatggcttgtggctgaccagctgcaggcagaagatgtcgatgtgactggcatgactttgaagcgtcctattgaccgtggctatcttatcaataccgaggtgcagagggatgtgtgggaacgggttttgcgcaatcttctccaggttgatcctactaactcgtccttgttactggtggaacccatgtttaaccctccagcgatacagcatgcaactgatgagctagtgttcgaggagtttggcttcaactcgctttatgttgcagatggtccttcccttgtccacctttatgaggctagccgacaaccaatgatgtttcgtgcccaatgcagccttgttgttgactgtggcttctctttcacccatgcatcccctgtacttcagaactttactcttaattatggtgttcggcgtatggaccttggcggcaaggcccttacaaactatctcaaggagctcgtctcataccgttcccttaatgttatggatgaaactctcctcattgatgatgcaaaggaaaagctatgttttgtctcgcttgatgtccctggtgatctacaccttgccaggtcagctgtcttcataacctttcatgtgccaacccttcttttgtttgtttagggttaatgtttcatgtaagttctgaataaatttaaaggttgggccatctaggaacatctagtgtttgaactttgtctgtttaaccaatttaagtgcacacattgataaccttttttgacaaactggattttgtagcttccagaactagaggtgttgtgcatg

SEQ ID NO: 99733 - DNA, 1315 bp, Zea Mays
atgattgggatattcttcctccaaagaaaatcaaagaccctaaaggcaagaagggatatgatgatattccaaatatgggaatgtcaaggatttgcaaattttgagaggttcacaacaaacaaagctggttatgccttcataaagtatcaaacaaaaaatcaagcattggcaactattgaagctctaaaagggaaatacaaaatagagccggtggctgcgtcacgacgacaaccacctgaaatgcagattctggtgagccagacgcacccaacaacttgtccaggaccgaggcggcgacctaagttttccccttcaaaaggttcaagcatatgctgctttgagaagaaagagcttgctagcttggtggccctcacagatcaagtcagcttttttcaatatgacagtctactagctattgctgaggagaccttggcagagttcttgtctaaagcaacaggaactgctgtcgattgggtgcaaatggttgagatgaagcctggtccggattccattggaatcatcgctgtttcgcacaattgcagtggcgtagcagcccaaccagatcaaggtctggttccagaactacaggctacatatccgtgggatgtttgctttcatggttatgttgtgtaccttgtccgtgtgaggcgtggtggtaggaagaggcctttgcccaagtatattatctatggcaagcccaagcaccacggtatcacccaactcaagttctagaggtacaagaggtctgtcgctgaggagagagctagacgcaagcttggtggactgagggtttttaactcctactgggtgaacgaggatagcacctacaagtactttgagatcatccttgtggacgttgcccacaaagacatcaaaacagacccgatgatcaactagctatgcaaccctttgcacatgcattgtgagctccatggcctcacctcgacaagcaagaagtttcgtggcctgcaccgcaagggccacacccaccacaagaacaggccctcaaggagagccacctggaaacgcaaccagaccctctccctccacatgtaccattgagcagctcgttgggtgcttggatactatcaatgtctgaccagtcccaagcaagacaacaagattggttgtatcttgttgcattttcaaagttttgctatttgtgttctcggcacttaatgttagattagaaatcaattatggatcatatgtcataaactttttgcaatttgactgtattatcagacaatgaatggttactgataaaatgatacctgctgttgtgaactacatgattggttttgccttgctatgc

SEQ ID NO: 99734 - DNA, 273 bp, Zea Mays
atgacagagtttgaagatgatctagatctttatgtgctgaagcctttgaagtacattggaattgaagtttggcaggtaaaagctggttcagtttttgacaacattctgatttgtgatgaccctaagtatgcaagaaaggttgttgagaaaacttggggtgcaaatagggaggctgaaaaggaagcttttgaagaagctgaaaaggagaggaaagctagggaggataggttggatctagttatttctatgttgatcatcatttatgattcttga

SEQ ID NO: 99735 - DNA, 794 bp, Zea Mays
ggacatctcctaaataatcctcagccgttacttctgctagtccgtgccatgcttatactggtgatcaagatgcctatgtctccaccaccgtcgctcagctgcttgcctctatgttggctggccggatctactgtccgacgcgccactgtttgcgctgtgcttaaggtcctactcaccggtcttctcgtcgacagtgccagtcgtgtctcccgctacgctgacactttttctccatcgctcgactccatgctcagcgctctcaccatcaccgcgcctctcttcgccggtgttcgccgggcatacgctcaacctcgccaccgtgggacttacctcgccttcaaaccgtgttcgccgcagcccagccatcgtctacctctacgctcagcacgaaaccgctcgccctacagcctcgtcgcgtcaccattctgcaggcactgagctccacccacctcggtgaaggccaccgtcccctttttcactgtgcactcggcatcagcttcctggtgcacaccgacacaacgctctggtcgtgcgccctccatcgcacgctcagacacttgcccctgttcgtcacctcgggactttgccgtcacccgtacttcgttggttgtcaactttgctggctgtgttcgacctccagccatgtcaccatcgtgcccttcattcgttcgaagaacacctagaagaagtgatgtttgaagaagttcacttaagtgcctgttgattcagtggtggaggtttatctaactacttaccagagtagaataattttaggatcttctcctgcaataagg

SEQ ID NO: 99736 - DNA, 1244 bp, Zea Mays
aaagaaaaataaagaagaaaaaagtatcggtcgccgacgagctcatgtacaccggcacacgagacagccaccccaaaacgcgggacgcggattgatgatatcggtcgccgacgagcggggccggagcactctctgcttctccccctacttcccctacgtaccaggaagctaccactcccccagagtgaaggaagagagagctctccgcctctctcctccgccttagagcgacgtcgctgccggagctcgatacctatgggtggcttcgggacctcgcgccctgcctccgtcgccctctgcgccttcctcaccttcctcaacctcttcgccgtccttctcgccgtcggcgccgagcgccgccgcagcaccgggaaggtgatgccggacgagtacgacgagcggtcctactgcctctacgacactgacgcctccacggtgtacggcgtctccgctttcttcgtgctcctgctccagcaggccattgtcaacgtcgccacgtggtgcctctgcttcggacccgtgctctcctcccgcggctgtgccgtaacggcattcgtcctctcctggataacattcctcgtcgcagaagcttgtctcataggaggatcggtgaggaatgcaaagcacaccaagtatttaggctactacatgaagcatgatttggtgtcgtgcgccgcccttcgcaagggagtctttgcagcagctgctgcaatgatgatcatcaacctcctggcgtccctggtgtactactggagttactcaaaagctgcgacgggtgggttcatgaagcaccaaaatgaggttggtgtgggcatgacggattacggccttgacaagggtgtttctgggccctgagtgagatggaatcttattggcctctgtgcggtattaatactatcgtcgaaatgtatgtggatgaagttgagttgtttctctacggtgtgctgtgaatgatataccataactgtacaatggcatgggtggtgatattgtagggttcgtgctgtgaaaaatgcggtagcactagttgtgtttggtgtgctgcacgagcacgacaccgacttcttcctgctcgctgctggcggtggttgttcgcaacacaaatgcgggacttcaatgttcttggctgtcattaaattatgcaaggtggtactgtactgattttgcactaaaatggcatctgttaggcctgcaggcgaggcccggctgcatctttattcgccacatatagttttcttttggga

SEQ ID NO: 99737 - DNA, 96 bp, Zea Mays
tctcaaagtggtacataccaatcatagtggttgtagctgctatgtatcttcgcctcttgctacgcaaccttagtaacattgctgcttgtagaagag

SEQ ID NO: 99738 - DNA, 174 bp, Zea Mays
atgaggctgcatatggcaaagtaatgtctagttagaacggaccagactatgactggaggaccccacctattgatcctcaggttgtgtatgcaagtggtggaaaagctcatggaaggtgcggattctacatatcttatattgtttcattggttgagtgcaatacatgtattctga

SEQ ID NO: 99739 - DNA, 136 bp, Zea Mays
gatctagatgatgataatgtaccatgaatgctatgaatgtttcttattgtacttgctccataatgttttgtgaccttgcaaacttgggacttgtggacttgtggctcttgaactttatgatgaacttgttatatta

SEQ ID NO: 99740 - DNA, 676 bp, Zea Mays
tacgtacatcgtctcttccgactcacaaagagcccagcagcgtgcgtcctggatctggatgcatatcgaagttacagaatgcgatcatggagatctcgtgtccatctcgatcagagtcccagatgatgcaagcttctacggatccatgtgcgcgcgcacacggtcagcatgcacaccgacgggcgacaacatgtcatggcatgtgctctcgattgatccggtgaattgatccacagaatatgcatggttggtggtggctgggtgggtaggtgagctggtcaacaccgactggacaaaacgcgcgggatccagccaggcgcacctcatatgcatgtgccacagtgccaaacgtctagaacaagcgacgcccactgcatgatgacacggccactgctgacctggtccatgcatcgaggttagagacatcgtatatgtttgctgttggagagagagtctccggacaaagatccaagttagtaaaatcagtttttttaatggaaacaaaaggagatgagggtccctactgtataacttatattaaaataaatagagatgtgtataaattgttacatagtaaagatgggaacacaattatggataaggtggtggagtgctatatgttgtattgttcggtgtggggaaccccaaatgttaagccgagcaggtatagtatccc

SEQ ID NO: 99741 - DNA, 1432 bp, Zea Mays
aactagacggaccagaggacgctgccacactatagatcccgtgcttggctgtacaagaacaaccgcactgatgctaccgaccactggtgtccgattaagcagctcatttctaagaagccgacccaggccagccgatatcgagcaccaacgacacaccccattgacgtacagctatgatgcggccgacgtcgacccttgctatggtcgtgccgtcgctcgctgtagccatcctctgcatcctagtccggtccgcctccgcggagttctggctcgacgagttcaccacggacggcgacgtccgcagagactacgaccgttctggccggcaggtggcgtcgcttgtcctcgaccagcgttctggcgctggcttcaactccacgcgcaagtacctcttcggcgagttcagcgtggagatgaagctcgtcggcggcaactccgctgggactgtcacctccttctacgtcggccatcgttcccttcaatttttctagacgaatcattattactgtacaattccagcagtggtgattacatagcgttatctgcgcttgtgcagctgacgtccggcgagggcgacgagatcgacatggagttcatgggcaactccagcggctccccgacggtgctcaacacgaacgtgtgggccaacggcgacggcaagaaggagcaccagttctacctgtggttcgacccggccgccgacttccacaaatacaagatcgtctggaacgacaagaacatcatcttccaggtggacgacgtgacggtgcgcgtcttcaagcgctacgatgacctgccgtacccggacgccaagcccatggcggtgcacgccacgctgtgggacggcagctactgggccacgcgcaagggcgaggtcaagatcgactggtccagcgcgcccttcgtcgtctcctaccgagactacaccgccaacgcctgcgccgtccacggccggaacggcggcggcagctcgtcgtgccccgccggtgccaacgagtggatggacaggcagtccgacgacaccgaccgtctcaccgtggcttgggcgcgccggaactgcttgcagtacaactactgcgatgacgggtggcgcttcccgcaggggttccccggagagtgcgcccgcaactgatccaccatctgccctgcagtcgcgagtctccaagtctcgccggcctcatcgcatcctcttaccgcagatataggcatactagatcgagttcattcttggattttatgttcttgtaattgtcttattgtacgtacgtacatcgtctcttccgactcacaaagagcccagcagcgtgcgtcctggatctggatgcatatcgaaggtactagttctgtgacttctaaaagatcttatttttgatgattttggtgtaaaatatcatcgcagaaactgaggaataaacatcagaattcataaatc

SEQ ID NO: 99742 - DNA, 1379 bp, Zea Mays
ccgcactctggaaaacgcaacttgtgcggtgtccagtgcgccacaactagacggaccagaggacgctgccacactatagatcccgtgcttggctgtacaagaacaaccgcactgatgctaccgaccactggtgtccgattaagcagctcatttctaagaagccgacccaggccagccgatatcgagcaccaacgacacaccccattgacgtacagctatgatgcggccgacgtcgacccttgctatggtcgtgccgtcgctcgctgtagccatcctctgcatcctagtccggtccgcctccgcggagttctggctcgacgagttcaccacggacggcgacgtccgcagagactacgaccgttctggccggcaggtggcgtcgcttgtcctcgaccagcgttctggcgctggcttcaactccacgcgcaagtacctcttcggcgagttcagcgtggagatgaagctcgtcggcggcaactccgctgggactgtcacctccttctacctgacgtccggcgagggcgacgagatcgacatggagttcatgggcaactccagcggctccccgacggtgctcaacacgaacgtgtgggccaacggcgacggcaagaaggagcaccagttctacctgtggttcgacccggccgccgacttccacaaatacaagatcgtctggaacgacaagaacatcatcttccaggtggacgacgtgacggtgcgcgtcttcaagcgctacgatgacctgccgtacccggacgccaagcccatggcggtgcacgccacgctgtgggacggcagctactgggccacgcgcaagggcgaggtcaagatcgactggtccagcgcgcccttcgtcgtctcctaccgagactacaccgccaacgcctgcgccgtccacggccggaacggcggcggcagctcgtcgtgccccgccggtgccaacgagtggatggacaggcagtccgacgacaccgaccgtctcaccgtggcttgggcgcgccggaactgcttgcagtacaactactgcgatgacgggtggcgcttcccgcaggggttccccggagagtgcgcccgcaactgatccaccatctgccctgcagtcgcgagtctccaagtctcgccggcctcatcgcatcctcttaccgcagatataggcatactagatcgagttcattcttggattttatgttcttgtaattgtcttattgtacgtacgtacatcgtctcttccgactcacaaagagcccagcagcgtgcgtcctggatctggatgcatatcgaaggtactagttctgtgacttctaaaagatcttatttttgatgattttggtgtaaaatatcatcgcagaaactgaggaataaacatcagaattcataaa

SEQ ID NO: 99743 - DNA, 456 bp, Zea Mays
atggcgacagcagttgcacgaagcgtgacaggctttggcatcggcgactaccccacgcgaggcacgagtggcgtcggcggtggtcgtggtagcgcgaggcacgagttgcgagggtcggtagtctgcacgattgcgaggattggctgggggcggcgacagccacacgaggcacgactagcttcgatggtcgtgcgtcctcaggcgacgacctccgatctagcacatctcgggcatccttcggcgaagaccacctctaattcgtggcttcggggacgtcctctggcaatgacctcctccaatccggtggcctcggcgacgtcctctggcgacaactcatccaatccttgtttatgcattggggttgttggttggacccatattagaaaatgtcattcaaaacttgtgcgcaggcaatggaaactcccacgacttgccatattttttggatctacataa

SEQ ID NO: 99744 - DNA, 294 bp, Zea Mays
aggggttggggacacatatttatagccctaggggctgcactaccacatcttctcacacacactacacaacaggattgtcctctagatgctaaagagactacagaggacagtcaaaagcgactgtttgtcctctagatgctaaagcgaatacagaggacagtcaaaaaacgactgctgtcctctagatgctaaagagactacagaggacagtcaagctgtcctctagatgctaaaggactacagaggacagtcaaaagcaggctgtcctctagatgctcaagacttattccatca

SEQ ID NO: 99745 - DNA, 1716 bp, Zea Mays
cgtatccatcttcaagccagccgtctccttatccctgcgacgccgctcacctaggctcatcttccagccgccctctccacccagcagcagagcacaccatcctctccactcggatccccaagccctcgcctccatctcttgccacgacatctgtcccctgctcgaacctccacccggccgcgtcctcgccggtggccagcgccgctgcatcgcccttcctagcgtcggccttggcaccgcttccccgagcgccctagtcgagctcgcccatcctctgctctagccctttctcaacgccgtcgctgagctcgcccctcccctcagccatggacacgacgacctgcaacccttcttggtggccaagcccatcttcctgctcgcgccccgtctttttccacctctgcgcgtatcagctcgtccaacccccatggtgtttcctccctctcggctcccttgctccctccccatggcgttccccctggatgttggtgatctgttccccacggtgcaggcaaatgttctttccctccctgcagcagcaccttggtggttgtcgagcagcacatcgcacttgcgcagcctaggtcacgacgttgtccacctcggtacgctaatgatcgagatgcgacagccagggtctaggttgaccccaagtggtgcaaaggatggcctacttcgagaggcgatgtcggcggaccaatctagaagattgatgatctctacataaaaataggattacattgattcaaatctgatctggtgtttggcatttgttttccccctacattagtttctcattattatatttgtatagattcatattcttgagactaacctaatcagcattctttacataataatattataaggaggattaatttcatatacaatactatatataatgagatgaatcatttggccttagatagataattggcagcctatcaaaaatttcataagtgtagaacaatttttttgccgttaacatagtgtataacatttgatgtcgtaatttgttttggaagaaaatttaatttcaacatagaatttttttaccgataggtttatggtcttttaatatctacaggttgtggaaactgagatcattgtaactcaaatgagagcttggcacttagcatatagatgccactagaaccaatttggaattactgtgagatatagagtgataaaaggcattaatgtaagtactacataaatgtactacttgtatttttcaataatcaatgcttcaaaagtctatatatatgctgactggtgtcagggttttcccattattgtaagtttgttacaagcaagtgctttccctcacacaacttcaccttttctttgcatgtttattacttttgtttgctggttttgacttacagcgaattgtgtatgcaactactgtggcatatcagtgaccttccgagaagatacaatggcgtttttagtagtaacgctgcttgatttctatagttggagtcatcacacagctaacatttgcacttgaactgtttagtgaaatgcttaggagaaagaggccagcaagaatggagtcatggaacatcggcagaaggagtgcagcagcggcaaccgatgtatcccttgaacaatctggttttgacaagatgcaaatcaatctagtgtacactggattccacacttgcaaagattgtttggctaattacaagattatctcattgttttggtttg

SEQ ID NO: 99746 - DNA, 101 bp, Zea Mays
agacaggataatgtttgtgaatgtcttttttcagttataactatctgtggagacattttcattcagatagagaagatcagtgtttatggagttattgtaag

SEQ ID NO: 99747 - DNA, 96 bp, Zea Mays
ttttttttgaatcggcactgctgcgtagaaaacatgaacgccatggcagctggccgagcaggggttccctgctgctgcgcgaagaataaaacaggg

SEQ ID NO: 99748 - DNA, 312 bp, Zea Mays
atggacaagcagaggaacgccgagcagggagttccggccggcagagaagcatggcgcgcgcacaaagcacagaagctgggcgcagccatggactgggagatgggctcggcaccagggagctccgagcagggacgccgcggtccgagcgtcggacaccgggcagagtgtgcgacgcaggaggagctcaagcgcgcggggaaggggataagctccatgaagaaaaatctagagattgggagagacgagctgggggaagcaggtgctacagctgctacaaatcccacaagcgcccggtcgactgggaggagataa

SEQ ID NO: 99749 - DNA, 104 bp, Zea Mays
cgggagcattcttcacacggttatacgacagcaacctaaacgttgtgttaacaggacatacatatttctttgttgcgagtataaccatattactgcatataccc

SEQ ID NO: 99750 - DNA, 1692 bp, Zea Mays
gatctgactgccgagggtgttagcatgggctatagtaggcaggacccttgtgttttaggtagtgcggctgcataggcatgttgccttgtgcgccctctcctagttttagttatttggttgtaataggcaaggatcttcctgattggattgtctaggattgtttcctattgtctaaagatagtttcccattgtccaggatagtttcctattcctgtgaacatccttgcctatatgtactcgagcctttgctcctattaaccattcaacattttcccaatacactgtctttcagtttggatgctagttagaagtattaaatatagtctaagtacaaaactaatcacacagatgaggactaaacgataagacgaactaattaggcttaataaatttgccttgccgtttagtcttcagctgtataattagtttataatttgactatatttaatactcgtaaaagacattcaaacatctaatatgacttaacaccgtctaagtatccaccatcctgctaactccctggactgagtcgctgccttgagggtcacaaattgaggcttcggtttgaattagatcatctcagagaagtagctaggaacagtaaagttcttttaattatatgcacaataattctaaatggcactgaaaacgatacttggtacattattggtgcatgcattttactgttttcccattgtttcaaacatgcatatgtttgcttaatctttctggaagcaatacatctactctaagtttaccaaatacctagatcattagcttaaatagtattaatttaaagcacttgaatttatctttggcattggaaaaaggggattttatctctagtctatcccaaacttggttgggactaaaaggctgttattattggcctccaggagaacagatttagatactcccaaacatcagtcatatatgtgctttaaaccagatgcatcttttatttggatgttaagttgttaactaaatgtgccccctcctattgtgtcctgtcctgcctcatcccatgaagcaaacactagaataattttggtcttcttggtgtgcttcgatgtagttaaatatcacagcagtctttactgacaatatgtatttacaggtctattcaacttcagttgcaatgcttctgacagcagttgtatctgtcttcttgttcaacttccatttatccctcgcattcttccttggatccacagttgtttccgtctcagtgtacctgcactcaattggaaaacttcaaccacagaaataaggattggtgaagatggaatatgggattcattatcggtgtttggtgctttgaggctataagaaaagcttcagtggagatgagatttgattgcatagttgtgaaagttagtaggtggtcaaagtaagaaccagaaatgtatttttggaggggttctagctattatccggtctagtttttgttctattctatcaagtcgagttcgttgatcgctaaccgcatccgtgcctagtttttgatatatcaaacgcacatttattgtaatgctagtattttgaaatactaggtagtacccaattgttgtatggagctagttgtcttttcattctaatgtatagaattaccattctttttaccaccgagcgtgtggaccgatgttgaggccctttttactctcttgattacataatccatctaataaatct

SEQ ID NO: 99751 - DNA, 1747 bp, Zea Mays
gatctgactgccgagggtgttagcatgggctatagtaggcaggacccttgtgttttaggtagtgcggctgcataggcatgttgccttgtgcgccctctcctagttttagttatttggttgtaataggcaaggatcttcctgattggattgtctaggattgtttcctattgtctaaagatagtttcccattgtccaggatagtttcctattcctgtgaacatccttgcctatatgtactcgagcctttgctcctattaaccattcaacattttcccaatacactgtctttcagtttggatgctagttagaagtattaaatatagtctaagtacaaaactaatcacacagatgaggactaaacgataagacgaactaattaggcttaataaatttgccttgccgtttagtcttcagctgtataattagtttataatttgactatatttaatactcgtaaaagacattcaaacatctaatatgacttaacaccgtctaagtatccaccatcctgctaactccctggactgagtcgctgccttgagggtcacaaattgaggcttcggtttgaattagatcatctcagagaagtagctaggaacagtaaagttcttttaattatatgcacaataattctaaatggcactgaaaacgatacttggtacattattggtgcatgcattttactgttttcccattgtttcaaacatgcatatgtttgcttaatctttctggaagcaatacatctactctaagtttaccaaatacctagatcattagcttaaatagtattaatttaaagcacttgaatttatctttggcattggaaaaaggggattttatctctagtctatcccaaacttggttgggactaaaaggctgttattattggcctccaggagaacagatttagatactcccaaacatcagtcatatatgtgctttaaaccagatgcatcttttatttggatgttaagttgttaactaaatgtgccccctcctattgtgtcctgtcctgcctcatcccatgaagcaaacactagaataattttggtcttcttggtgtgcttcgatgtagttaaatatcacagcagtctttactgacaatatgtatttacaggtctattcaacttcagttgcaatgcttctgacagcagttgtatctgtcttcttgttcaacttccatttatccctcgcattcttccttggatccacagttgtttccgtctcagtgtacctgcactcaattggaaaacttcaaccacagaaataaggtttgtttagtcactgattgctgactgctcctcgtctgttagtaatcactggataacacaggattggtgaagatggaatatgggattcattatcggtgtttggtgctttgaggctataagaaaagcttcagtggagatgagatttgattgcatagttgtgaaagttagtaggtggtcaaagtaagaaccagaaatgtatttttggaggggttctagctattatccggtctagtttttgttctattctatcaagtcgagttcgttgatcgctaaccgcatccgtgcctagtttttgatatatcaaacgcacatttattgtaatgctagtattttgaaatactaggtagtacccaattgttgtatggagctagttgtcttttcattctaatgtatagaattaccattctttttaccaccgagcgtgtggaccgatgttgaggccctttttactctcttgattacataatccatctaat

SEQ ID NO: 99752 - DNA, 177 bp, Zea Mays
ttttttatatttattagtaactatatctgctttaggagatgaaatctttaaaagtaagaaaaaccttataaaagatattttaattcaaaatctttggataattttactaaatcaccaaaatgtaattctaggtcttacaagtacctactaagttgaatcaatggaagagcaacattt

SEQ ID NO: 99753 - DNA, 1422 bp, Zea Mays
tgacgcttgaagatcactcaacatcctcgtcggaaaatcggagcttccggcgtccgttccgcttcagcaacactatctctctcaaagttactagagactagacgctctgaaggtcccgtggccgtggatgcgaatcgatggccggggttgaggaagaaggcgaggtggcggccctgcgggaggccctgaggcagcaggtgcaggccgtggaggagctgcgggcggagctggaggaggagcggcaggcggcggcgtcaggagccgatgaggcactggctatgatcctgcgtctgcaggcggagaaggcggcggagcgtatggaggcggagcagttccaccgggtggccaaggagcggatccagtatgatgaggacacgctggctttcctcagggccgtcgtcttccaccaggagatggagatcagctcgctcaaccgcaggctgctcgccgtccacgccaccggggacgatcccctttcgccggcagtcgatctcccctggctgaggaagctggccaagagcggcgtggcgtccaggaggaacgcgtccctcccggcggcacacctggaggagctctgctcggagctcgacgtcgtcgtcgacacggacgccgacaagaagagggtgggcgaccggaggccagcaaggacggtctcggacatcggcgaggtgatcagcagggagaaggagtgggcgacgagacccaatcagacggcgccaacgcccaggctgtaccggtcggcctcacactcccacggcctcccccggcgcgcgacgtgctgctccgcgcagtgtggcgtgcgctccgcaggccgggcctcgccagagatcatcgccgaggaagacgagaaatcgtgcaagagcaacgccgcactggaagccgacatcgagcagatcaaggccaccgtgctgtctctccacaccgacctcacaaagctaagagaatccaccttgtccatggcagacgcacattcccagatactagccgagatccacgcaaagctcgacggcgtcacgccgcggcgacagacgaacttcgaaccaaggtctgagctgctgctgaagaaggccaccagaggaggcagcagcaacagttcttcgtcttccaaggagcagagctaccaataccagtggcaggctgacgtgctgatgaaccatttcattgaggcagtgatgtgcataacgtgagaactgaagatctaaacgatatctattggtggtgaagattttcaggtgtgagtaaaagattgattattgctaaattcttttttttaaccctctgttggcatatacagccatcagccgtgagacaaaatcccatgtataatgctgttattatgacaagaaagatatagtttatgtaaagttattgacgataatttgtaaaggtctttaattaaatagaaatggtgatattattgtt

SEQ ID NO: 99754 - DNA, 1526 bp, Zea Mays
tgacgcttgaagatcactcaacatcctcgtcggaaaatcggagcttccggcgtccgttccgcttcagcaacactatctctctcaaagttactagagactagacgctctgaaggtcccgtggccgtggatgcgaatcgatggccggggttgaggaagaaggcgaggtggcggccctgcgggaggccctgaggcagcaggtgcaggccgtggaggagctgcgggcggagctggaggaggagcggcaggcggcggcgtcaggagccgatgaggcactggctatgatcctgcgtctgcaggcggagaaggcggcggagcgtatggaggcggagcagttccaccgggtggccaaggagcggatccagtatgatgaggacacgctggctttcctcagggccgtcgtcttccaccaggagatggagatcagctcgctcaaccgcaggctgctcgccgtccacgccaccggggacgatcccctttcgccggcagtcgatctcccctggctgaggaagctggccaagagcggcgtggcgtccaggaggaacgcgtccctcccggcggcacacctggaggagctctgctcggagctcgacgtcgtcgtcgacacggacgccgacaagaagagggtgggcgaccggaggccagcaaggacggtctcggacatcggcgaggtgatcagcagggagaaggagtgggcgacgagacccaatcagacggcgccaacgcccaggctgtaccggtcggcctcacactcccacggcctcccccggcgcgcgacgtgctgctccgcgcagtgtggcgtgcgctccgcaggccgggcctcgccagagatcatcgccgaggaagacgagaaatcgtgcaagagcaacgccgcactggaagccgacatcgagcagatcaaggccaccgtgctgtctctccacaccgacctcacaaagctaagagaatccaccttgtccatggcagacgcacattcccagatactagccgagatccacgcaaagctcgacggcgtcacgccgcggcgacagacgaacttcgaaccaaggtctgagctgctgctgaagaaggccaccagaggaggcagcagcaacagttcttcgtcttccaaggagcagagctaccaataccagtggcaggctgacgtgctgatgaaccatttcattgaggtacgtggtctcaccttctctgctactaccgttgttagacctctgatgaaggccgctgcatccatgtcactgtttaggtgcctcttgattttgggcttggccgtcgcgattagaaaagttttgattaactcctaacgtgtaagcaatgccatggtcagttctgtcagtgcaaaatttgtttttgctgtttttattagctctttatttaatcaggcattgtaataataatatatagcatctcttctgagatgaacgaaaggtgaaacaataatttgcggcctttttttacctcatcgttattattatgttacttaagaaacattcggtagcatgccaaatcaatgcacgactgcttgtttg

SEQ ID NO: 99755 - DNA, 1450 bp, Zea Mays
aaatcatttatttatttttggtttctctgaagattcggttcttcccagagttactagagactagacgctctgaaggtcccgtggccgtggatgcgaatcgatggccggggttgaggaagaaggcgaggtggcggccctgcgggaggccctgaggcagcaggtgcaggccgtggaggagctgcgggcggagctggaggaggagcggcaggcggcggcgtcaggagccgatgaggcactggctatgatcctgcgtctgcaggcggagaaggcggcggagcgtatggaggcggagcagttccaccgggtggccaaggagcggatccagtatgatgaggacacgctggctttcctcagggccgtcgtcttccaccaggagatggagatcagctcgctcaaccgcaggctgctcgccgtccacgccaccggggacgatcccctttcgccggcagtcgatctcccctggctgaggaagctggccaagagcggcgtggcgtccaggaggaacgcgtccctcccggcggcacacctggaggagctctgctcggagctcgacgtcgtcgtcgacacggacgccgacaagaagagggtgggcgaccggaggccagcaaggacggtctcggacatcggcgaggtgatcagcagggagaaggagtgggcgacgagacccaatcagacggcgccaacgcccaggctgtaccggtcggcctcacactcccacggcctcccccggcgcgcgacgtgctgctccgcgcagtgtggcgtgcgctccgcaggccgggcctcgccagagatcatcgccgaggaagacgagaaatcgtgcaagagcaacgccgcactggaagccgacatcgagcagatcaaggccaccgtgctgtctctccacaccgacctcacaaagctaagagaatccaccttgtccatggcagacgcacattcccagatactagccgagatccacgcaaagctcgacggcgtcacgccgcggcgacagacgaacttcgaaccaaggtctgagctgctgctgaagaaggccaccagaggaggcagcagcaacagttcttcgtcttccaaggagcagagctaccaataccagtggcaggctgacgtgctgatgaaccatttcattgaggtacgtggtctcaccttctctgctactaccgttgttagacctctgatgaaggccgctgcatccatgtcactgtttaggtgcctcttgattttgggcttggccgtcgcgattagaaaagttttgattaactcctaacgtgtaagcaatgccatggtcagttctgtcagtgcaaaatttgtttttgctgtttttattagctctttatttaatcaggcattgtaataataatatatagcatctcttctgagatgaacgaaaggtgaaacaataatttgcggcctttttttacctcatcgttattattatgttacttaagaaaca

SEQ ID NO: 99756 - DNA, 1383 bp, Zea Mays
cagccactgttgtattgaatttgacatttctgtgtccgtgcaaatcctttttcctctcttaatcgcttgattgaaatcagttactagagactagacgctctgaaggtcccgtggccgtggatgcgaatcgatggccggggttgaggaagaaggcgaggtggcggccctgcgggaggccctgaggcagcaggtgcaggccgtggaggagctgcgggcggagctggaggaggagcggcaggcggcggcgtcaggagccgatgaggcactggctatgatcctgcgtctgcaggcggagaaggcggcggagcgtatggaggcggagcagttccaccgggtggccaaggagcggatccagtatgatgaggacacgctggctttcctcagggccgtcgtcttccaccaggagatggagatcagctcgctcaaccgcaggctgctcgccgtccacgccaccggggacgatcccctttcgccggcagtcgatctcccctggctgaggaagctggccaagagcggcgtggcgtccaggaggaacgcgtccctcccggcggcacacctggaggagctctgctcggagctcgacgtcgtcgtcgacacggacgccgacaagaagagggtgggcgaccggaggccagcaaggacggtctcggacatcggcgaggtgatcagcagggagaaggagtgggcgacgagacccaatcagacggcgccaacgcccaggctgtaccggtcggcctcacactcccacggcctcccccggcgcgcgacgtgctgctccgcgcagtgtggcgtgcgctccgcaggccgggcctcgccagagatcatcgccgaggaagacgagaaatcgtgcaagagcaacgccgcactggaagccgacatcgagcagatcaaggccaccgtgctgtctctccacaccgacctcacaaagctaagagaatccaccttgtccatggcagacgcacattcccagatactagccgagatccacgcaaagctcgacggcgtcacgccgcggcgacagacgaacttcgaaccaaggtctgagctgctgctgaagaaggccaccagaggaggcagcagcaacagttcttcgtcttccaaggagcagagctaccaataccagtggcaggctgacgtgctgatgaaccatttcattgaggtacgtggtctcaccttctctgctactaccgttgttagacctctgatgaaggccgctgcatccatgtcactgtttaggtgcctcttgattttgggcttggccgtcgcgattagaaaagttttgattaactcctaacgtgtaagcaatgccatggtcagttctgtcagtgcaaaatttgtttttgctgtttttattagctctttatttaatcaggcattgtaata

SEQ ID NO: 99757 - DNA, 231 bp, Zea Mays
atgaagatgtgggaggatagcaaaggacaagacgcgagcttacagaagcagtacacagcagctctacaccacggatcaggatcacatggtgtttgggatggaaatgctggtggcagcagcagtggtggtggtggtggcactggcagtggcaattcaagttggccgatgaacatcatttctgcattccattcttcgtccaccagcggtggcaatggcgatggcttatcgtag

SEQ ID NO: 99758 - DNA, 854 bp, Zea Mays
gaagatttatgtgtggatgatgctgacctgacattcgagaattatgaagagctattcggtacctctcacatttgaatagaggaactctttgatgacgctggaattgacagttactttgaaatgaaggaaacaccaccttttgatttcaatgaggtatgtactattcttctatactctttgtgattctaaattagtgacattttagatatcaacatagtctagaaggtgtcaattcggctagggacatcgccttttgatttcaatgaaggatcggcttcgtggggatgccgccggtgggctgcgtgccgtcgcagcgcacgctcgggggcggcctcgccaccagggcctgcgagcccaagcgaaacgaggcggcgctgctgtacaacgccagggcccaggagttgatcgccgccttcaacaacaacaactccgacgtgctggtcgtcttcctcgacatctaccgcatcctggacgacctcatggagcgcggggaggagtacggcttctccgagaccaccaggggatgctgcggcaccggcaccatcgaggtcacgggcctctgtgactcccgcttcgtctccgtctgcgatgatgtctcgcaacacgtcttcttcgacagctaccacccaacagagagagcctacaggatcatcgtcaacgacatctttctaaactacggacacgtgctcttctcatgattatatatcacgtactcgctgtctctgtctctggtagctggcccaatcgacccaacagcaaccaaattaaatgagcccatcctccaaataccgcagcccattgttacacttatttcctatcaaaaaaaatcatatactgagatgcttttcttactg

SEQ ID NO: 99759 - DNA, 512 bp, Zea Mays
gtacgtgcccatctcctttgtccgacgtcgaggcttccagctccctgcgcgtcctcggcctcagctcgcccggcctccatcctgcttcctgcgccgcggcatcgcctgctccctaagctccttctttgccgcgccggagctccctccagggcgcccgagcgctctcttcctgctcaagctcaccctcggcgctcgcccctgatgcctgcgctcggctctgcgcatcttcctctgccgcgcgcccatttctctgttcgcctctgcgcacagctttccaagctccatggccggttccctgctcgtgtcgtggtctcccagctcgtcagcacttgttcagtcgtctcggctcgctcggcctcaaattccagcgcctcgccctgctctcgtggttcagcaacggccggcgcgaacctgaccgtggtggtgttgtggcatggcgacgtcgtgcgcgtcgcgacagcagtcttggtcgtgaagcagtccgcgccatagagttcgcccgagcacagtct

SEQ ID NO: 99760 - DNA, 184 bp, Zea Mays
tgtcacacccggttttggaaggtaaaccgaatgcgaaccatgtacgtgccaggatcagaaattcacgtacacagcgattacataaatgactcatcatagcacaatgcttcgaataacaataaagagtaagtaataatatgaaagactagagtcatttacataatataatcaaagtacacagaat

SEQ ID NO: 99761 - DNA, 120 bp, Zea Mays
gacaattttatcaaaaccaaacaggccaaaggccagtttgagcgaaaagttatgcccggtttaaggaaggtacctcaagttatgtttttggaggcacgactagaaagcggtggttagggc

SEQ ID NO: 99762 - DNA, 1441 bp, Zea Mays
ctctgcgcgctgcttcctgttcggccgtgcctgcgtgccgctcgccccagctcccagctatggcgtctggccgagagagcttctctcatctcctccctgctcaatctccagccacgcgccctccagttctgagctcctctgcgcgcgcgaagtcctctgcgccgcaccctgaagccccctgctcggcgcccgagatccctcccatggccggtgttcggtccctgcgctcgtccgaccgaactccctggccatcgcgcttgccgtttccccacgcgcaggaattcaccagtgttcggtccgcgcgcagcctccctcccagctcagccgcccatctccatggccagagctccttcatctccctcctctcagcgtcttctccgtgctcccgctcggctccacccatggccggaatccccttcctgccgagctcccatggcggcgcccatcccctgctccctccagttctccctaccacgcccaccgccggtctatgcgcgcgcgctctgctcccatgccgcgcgcccctgtcctgtttctctgcgcgctcaggtgcctgctcacacccctgaccatggcgcttggcttctccagccgcgcgtggtgcgcgctccctgccatcgtcgttctctgccccgccgtgggcagcaacttcgtcgatctgcacaaatccggttcgacaatcggttccgtctccgtcgaactcctattcgccatcacgccgagctcctcaacactgccccaacccgttgtcgttatttcatcgtctcgtcttgctgccagtccctatgtgttgtctccgactggtgtttgcggcgacaaaagcatcccaagaagatgtggagaagcaatcccctagtcgatacccaagtactctgcgaaaggccagaacaagaattgtcgccatgtggagttctagttaatatggagagattccaagaattgtggatggaagagagagtgaagctcagttcaatgctcgccaggtgctcgatcgaagattttattcagagactatcgacgctctcgcaggctttgagtcggacttactttagatgagaaatccctgatgtttgagagaagcgaggcctataagcgctctcttgggactcgaccaaatgtctaaattggaaaactgtcatcgccctcgcggatatcgaatccattcggtcttggtatgccaatttattaattcggctaatcgaattggattaacttgacttgctagtcgtaataattcttgtgtttagcagatgcgtcgtgttcgtgttagatgtttgctaaaatacctcagccccttcgctaatgtaatcgtgtgaaataaatgcgtaatatggtgtaccttaggtctataatgcagaataaatgaaatatttaatttagtgggatttatgttgtataataattgagaatagtaattctagaagttaatgcaatgatttct

SEQ ID NO: 99763 - DNA, 720 bp, Zea Mays
atggccggagctccttcatctccctcctctcggcgtcttctccgtgctcccgcttggctccacccatggccggaatacccttcccgccgagctcccatggcggcgcccatcccctgctccctccagttctccctaccatgcccaccgccggtttgtgcgtgcgcgctctgctcccatgccgtgtgcccctgtcctgtttctctacgtgcccaggtgcctgctcacacccctgaccatggcgcttggcttctccagccgcgcatggtgcgcgctccctgccagcgccgttctctgccccgcagtgggcagcaacttcgtcgatctccgcaaatccggttcgacaatcggttccgtctccgtcgaactcctattctccatcacgccgagctgcttcaacactgcccccaacccgttgtcgttatttcatcatctcgtcttgatgccagtccctatgtgctgtctccgactggtgttcgcggcgacaaaagcatcccaagaagatgtggagaagcaatcgcctagtcgatacccaagtactcggcgaaagggcagaacaagaatcgtcgccagttatgtggagttctagttaatatggagagattccaagaattgtggatggaagagagagtgaagctcagttcaatgctcgccaggtgttcgatcgaagattttattcggagactgtcgatgctctcgcaagctttgagtcggacttacttt

SEQ ID NO: 99764 - DNA, 2394 bp, Zea Mays
ggccaagcaagacaacctcttctcgcgcagaccggagagatgtgcggaagagagccggagagggacagcggcccactactccccaatccacgcaccattacgaccgccctcctgtctaccactactgctgataggatgatgggtacagggaggggtagttgaaactccatcagtccagtcgttgggtcggtggcgtttcttgacgagcatgcgtgcttcctcaaactagccccagcggcatgttgtcaacaatccatgggccttttggagttttcgacatcatctcacctcgcctcgcccacttcacccatgggtcagaggagctctccccttcacacgccgcccgcggcaggagagagaaagcgagggcgagcatcagcagggcaggcaggcgcaagaaacgtcccccacctcgtccaccccatcctcctcgccttccgcctttatttcttgtcgtctccttcctcggtcctatctcctcgcctgctccgcctttcctcatcggttcatcctcccgtatcctctcctcgtctcctgcgccccttttcttgggggcttgaggtgaggttatctcggccatggcggccatcaagaagaccaagatcgtcttggcgcagccagcggttggggctcagccgtcgcggccgccgttcttttctcgcgcgcccggctcggtgcgaggcgccggggacgaggcggcttacagggccagcctcaggtaccgggccctccaccaggactaccaggacctcatcaaggaaatccaagcaaagaagaaaaggctgcacatgaagaggctcaagaagcagaggcttttggctgaagtcaagttcctgcggaagagatacaaatccatgtctgagaacccttctcagacaattgtctgtagagtgaggaatccagcaatgtcgtctgcatcctggacagctggttcggcaggtgatacctggcaccagtcggttcgtgctgccgggagctccagtagaagccagctggtgcagagaacacacggtggttctccaagggcatctccagtgattgacctcaatgaggcctgtgagccgggttatgaggagatggaaatcgaagggcaacatggttacatgtctcctctaggcgtaaacaagtcaaagaggtaccctatggaaggtgctgctgccagcccaagccagatgagaatgcatgtgttctgggatgtccagaatccagcagggcgatctggaaagaggaagatctcatggcaggatcagttggccctgagagtataggtaaatgacaatgtttagctctagtacagcagtagtattctagtaggatcagtatgtgtcattgctagcctggtaaatgtaaagggatggctgggacaatctcgatggttatctgttcatgtttagtgatgctggaaacataggctgtctcacgatgaagtaaagtaggtgggcgtgtgtgtgatcaatcaccaaaatcttatggttcatactgttatggagtgctaatggttcaatgagagatgtagcttccaaggaagtaatctcctgttcatgtagagttggaaaaaatgtgtgcctgctctcttgacataaagttctagaaggaaacaatttttgcaatcttggtaaggtgttgtgaactatctgttgtcgttattgtacatatagccataatcaacgaacatcattatcacgtttaaatttatagaataaaataacttacttaaatttatagaataaaataacttaaataggaaggagagcaggtggcagagaaactgtaccttcagaaaagttggtggagcacttcagaaaagttggtggagcaggtcattagatgcttcagaaaatcgtgaaactgaagctataaatttttagaagacatttttcattttgataagtcattttgtttattatttagattaaaaatatttttaaaactgttgggggccttcggcttccgaaggtcctcaaaaacatgatttaacaatgtttttggagtataatgtgtgaacaggtatcttcggactcgaatcggtaccacagtgggagaagcccaaagaatacgaaggttgacacagcgccaaagctgtgagcaggaaagcttcggcgtgatagcagaaaaggaaaccgacttaaagatgaaaaggctgttcagacctcggtggattactatagaattactaccaaatgtaaagggcatggatgtaattttacatgagctatgtcccgtgcctataaataggtgaacagtgcccccgtactgttcacgcggactgggcatttacttttgcgtcacgcttgtgtttttaccttctttcaagccgaaggtacatttgtaatttaatatcatttctattttttcataataataatatagaaatgagttgataattatacataa

SEQ ID NO: 99765 - DNA, 276 bp, Zea Mays
atggttcgggtgttcattttccttgcaatggatggaccgatcagtgctgtcgtccgactatacaaaagtgcacaatgtacagcagatcatatagtacatccagatttgccattaacttttctctttgctcagagagctagcaaatcaaaacatcgcacatcacctcaaccatcaaccactcttttccatggagactttaaaactcattcaagaagtaggtggtccatcaggcagctttgtcttcctcttccggccaagaatggaagccttttgtag

SEQ ID NO: 99766 - DNA, 699 bp, Zea Mays
gtcgctcgtgcacagattgatggtaagatgcactacacagggttcaccctcctttccaattagtgtagcacacgtctgatttggcgggggaatccttgcacgctatgtctgcgttctccggtgtgggcgtcatcgtcccaggcatgcgccccatcgtgctcggttgttgctgtggcagaaccgcccgaattattccagcttaagtgcctaagtcacgcctcaggggccttaacacacttaaatcggaataacccgttagtccctcagatctagtctgatagagccacttaaccaggatcaaattatacaatctcactcgaaggtgagtcacaagagaaatacaataaagcaggaaacctcgaattaaagtactgaattattacataaatcgaagtttttcaagttgctgataagagttcataaaataagatgcaacggataatcgatgtcgtcggtagcgagggaatgggcaaggcctagcccactactcctcgtgctcctctcctgccggagcagcatcccactcgaccgtccaacccagtggcagggtggtaggccaagtcacaccatcaactatatcctgaagcgtacctgcaaaaattatgccacaagcaaggctgagtatactaatactcagctagacttacccggtgtgaggaatctactcctctacctctagaccatgcagctgtttggctg

SEQ ID NO: 99767 - DNA, 441 bp, Zea Mays
aatttcctcacgccgcgctccctggctccctgcccagagcgctggtctgcgcccccctccctgcatcgcccccaccagttcgccctcatctggcatgccgtgccgccgccctggagctcgcccctgctctcaacccctctccccttcgtccctgcgtttgaccgcacctgtcggacccgcccccttgcccctgcgcgcttgccatgggtgatgtccactggcctccctggcaagctcttcctcacgccgctccaagccaccgcgaccccaagtgctcgccaccttctgcagttcgtccacctcccagcgttccctgctccttgtttctatgcccagccgagctcctcagccccatggtggtgccctgctgcctccatcccctggcgtgccatctctctatgctcggtcgacgtccccagtgcctaacgcacgtccctctgg

SEQ ID NO: 99768 - DNA, 465 bp, Zea Mays
atgggcgcggcgcaggaagctgggaaattccacggcgaggagacgcaggggatgaacgccggcgagctcgccatgggagtgactccgagcagagcaagcgtaggggcgcagcaagaccaaatccgagctgaaggaggcgagctgagggggagagaggcagggatggagctcgaccatggggagcggacagagctcggcgagctggaggctggagagcgagctagaagagaaagggagggcgcggccatggcagagctgggcgcgcggcgaccatggaaaacccgtagaaggagcacggcgagggagatgggtggcggattgggaagaagctgcgcgcgtctgggaacaaggctaggcggccgggcagccgagcgccatggggaaggctttggggaggagggagctccgaccttcgagctgggtaggaacgtgcacgccagggagccgagcgagcgcaggaggtga

SEQ ID NO: 99769 - DNA, 964 bp, Zea Mays
caacagccaccaggaagctcctccacgccatggttgtgggctcccatggcgagcagttttcctgcccatggcgcgacgccgctgctctcttttttccccatctcgctgtgctctcttggccggcagcagcagggagccaccagcagccatggcgcccatgccccctgtttttttccagggcgcccagcagatgcagccatggccgagctccttgggagcacgccggcgccctgctcttctccatggccaagtcccctggtgcaggcgccccttccccttggtcgctgccttcgctgcgtgtgtggggttgccagcaggagctcctccatggccgccgacgccctgcagcttcccttgccggcgccaaacagcagcacatctccctcctctttctctgttcttgccatggccgaaccccctctcccagccagcgtcgcccttcttcccccaaaagcagagagcagccgctcccatatccctacaacgcgctgtcagtctttccacccagccggctcctcttcttccctatggtcgagcagcgcctaccctccctgatttattttcttgcgcaagatattgccttgggactcgacgccgcctccccaagtgcagccatgtccgagcttcatttttttccctgctctggccaagccccttccgtgcatggtggttggcttcgctgctgctcgctcgctcccttgttgtgcagcgccaagtagcagcagcacgccgcgcgcgccacctgtttgacgcaatgccgagtcaggtcgctgtgcgtcgtcagccacccgtgggctctgccacgccaaccaacagccacaacaaccccttcgtggcgggtgccccaccttgccacgccacggtgcccgtcgtgctccttcgacttcgcttcgatctcacgcgattgacggcgcgttcgtcttcacgccacatgtgcagcaaccacgactgaggtttgatatgg

SEQ ID NO: 99770 - DNA, 465 bp, Zea Mays
atgggctgtaacacaccagttgcaggcctccaacagcagaccgaaacagaagacccaaatatagagcaggtccgcacgcgacccagaaatagggcagcttcgaccgcgacccaaacgctccagaaccaacggcccatatccggaacagagagagaaggcgaccagacagacgcccgacaggcgagcaagaggagctgcacagcaccggcgccggcagtcccctccgaccctcccattcccatcctgcagctgaaggtccaagcaggaactgcaagtttatttgctatgattagaatggaacatggttggtttggagaggagtttcaagatttccttgaccataacgatgggacctcctgctatgccgtttcaattgaagatatagataatgctactgctgttgagtacaacatggatgaaggggatacatcagctagggtcttcccaatttcatttgacgtctga

SEQ ID NO: 99771 - DNA, 1477 bp, Zea Mays
gatttggatgccttaaacttaagttatgattttttttaagtgagtagccgaattctgtccaaatctggacagaattaaagtttagcactgtttgacctttcaaactgtcgaatcatgttgtgatgataatataagagttatagaggactttctaagctttccagaaagttctagtttactatttttgaatgcatattttgtgagttatgaataaaacaattaactgttgtgctgctgtctaaaaattctgcaagtattaaattgttggcttgaagttactattgtttggctaagtaagtttagctgattcttaattggtgaagtgatgctttgttttagtaattatcatgttctatggttgttgattgagtaaatatcataaatggagattggtcgcttaagttaatcatcttgaataaatgttcctcattatccttattagttggaagcaaatagcatcaataggtttattccagttgtaatccgagagctatatagtgggaagtgcatttaggcgcttaaagtcttttgcttctaggttatagtcaaatgagattatgtaatatttgatgatgctctacttgctaggacaaatagtgtgatgtgttagctatgctagttaatccgatgaaatggtttaaaaagttagttaaagtatttctattcaaattcgaagctgtagatgtccaaggctaataagtttaaattatggtaatcatttggtgtatgttctagttaaagaagatccatacatggttcacgattgtttggtgtttaagttaggtttgattgattagaagatcatgcttgttgtgttagagttaatgtatctagtgattacttatgcttgcttataatgctttgctagagaatgtttaatcctataccatataacttcatataatattgtactagttcttatgttcatacatgtgcattgtacatccaaataggtacgctagctgaaaatcgtgcgaagcgaagggtgtggatcaaaacaacccacaagacaatgtgaggtgttcatatgtgtctaactaaaaatttgttgcccaaagtttaatctattcatttttggctaatattacaggttggccaaacgcttgaaacaatggaactattgcaaattcctttttacagactacaacttctatcggactaggtggtcaaggctcaggattcagagcggaagatgcacataaatactggtgaatgatgccatcgacgatgatgaactgatgaaacgatggatgatgccatcgatgaaagatggaatggaactcaaattttggtggtcgcacaagtgtggagacttgaattcatatatacttagttaggctcaatgttagcacaaacagttgatgagcaagttttcccattagtattttagtttgaatttagagtacaattatgtatgagttatttgacaatgcttatttatgagatattgaatggtatttatctatattgtattaat

SEQ ID NO: 99772 - DNA, 664 bp, Zea Mays
gttcccaatagccgtgtcccccccatggctccccttgcctctccggacagcactagcccgaacggtacagcaacataccggtgccgaacccgtgtctgcgacgctcgtcaagtgctcgatgaaataccgcagtgagctccacctcgacctgtgcagccccaacccgcgacgtcgcaacacccttgccctccgtcgatgtcgtgcttcgcgcattgctcctcgacgaagagccagaaccgtggtagacatgcatgcgcaatccgaactaatttcaccaggttgttcgctttatgtgattgtagtttgctctaattacgtgtggtcgatggcgtgaatatgtgtgtgaaaatgtacatgtatgaatggtgcgctaaatagttatgtggtcgatgattttttttttgtgattagcataggtgcactgtggtggttgtcttcggatgtgtttgtgtgcttcttatggcgatgtactgggaaggatattcttcctcaatttcattcgtgatgagtatggttatattaggtggcatattagatactgtgaaatgtctacccacagatagtgataaggttgtttatataattataaagttgtcgtgtcgtgtgttgagatctagaattttgatgtaaatctaaacgaaggatactagtaagcaagtgtgat

SEQ ID NO: 99773 - DNA, 1355 bp, Zea Mays
ctccattttccttacgcaccttatcttccttatcctctccagccgcgcgtgcccaggtgcactcgtttctctctgcctctcgcgctgggctcccggtcttgccggcggccaagttctccagccaagctcctccctgcggcagccaccacatgggcgctcatctccctactccatggcggcacctcctactccgtggtagcgagctcgcccctgtattcctgctcgcccagccctcctctgctgatagccggtggccgccgacgtcgatttcagctccctggacgtgcgcccctgatccccatgtcccagctcctccccacctcctagatggtcggcgccatccccagcgctccctgctccagcacgtctccatggccgtcaagtccctcccatggtcgagcacgtccctgcgttccgatgttggacaccggactgcgctgctcgtcctcaacctcgctgatgctattttcctggtgcatgtcctcgccctaggccattgaacaacaacagccatgaagcccttcgtgtcgcgccctcgacgtgttcgacagaatattacagtgtgctacacccgatctgtgcagccctatcgcgacctcgtcgaaccccgatgaggacccgttttccctatgttcattcctcgccagtactaatacccaaaatcaagttattagatgctaatgtatgtatatgtgtgtgtgcaatgtgcgagatgtgaggaatttcatattggtgaggccaggcaagccgtgcgacaagtgctagatgttcgatgaaatgattgaatcggagagtgtcactgtttgtgtggattatcaagttaggcaaataacagtgagccaaatcattatttcagatagtggttgatagatgaattgagtagtgttgggggtctttttctccgccgaaggttccctaagcaaaaacaccttcggcaagacagtacaaaggcaggtgcgacttgaagatataagccaaagatgatgcggacaaagtcgaagctacgattgaaagggcttcggcttggtattatgttaaaggtgaagcacgataccgatttaaagaggaaaagactgtatagccctagatagtctgtattatgatcataattatttatcagggacattgatttaatttcgtccgggttgcgtcacatgcctataaatagatgaacagtacctctgtactattcacgttgcattgttatcactcccgcgtcccccacattatcacattctgtcgagccgaaggtatcaataaaatacaaatactatgagcatttatccatgtttgtaaaatgaaatgagaatgtaaatgatctatctctatgttgtcaatatttacattcttatatc

SEQ ID NO: 99774 - DNA, 390 bp, Zea Mays
atgtcgtggagagccgcagtgttgttgctcgcgtgcctcgtcgccgtgacagcggcgctggtggacggcgcgctgctccccgaactcgcctctgcgcctggctcctgctcgtcgaatctccagccgcgccatcgcagctccagctcgatccttttctgcgcgcgcacgctcctgccgagctccgtgcacgcgcgccccatccctcctgcgctcggaccgcgccctcgctgccggtgctcgccgaccgcggctgtcctactccctgctgcgctcgccctggtcgccgctgtcgagtttgccggtgtctgcgcgccatcgcccagctcgcccaagttacccttggctgcgcacagtgttcttgtcgatgatgtgccgttgccaatgctgtag

SEQ ID NO: 99775 - DNA, 120 bp, Zea Mays
ctcggttcgagaaatctcgataaattcggtaaatgcgctacttgaggcaggctgttcaaataaaccgaaaccggaataattgctggacaattcggtttcctatttcaaaattcgagaaaa

SEQ ID NO: 99776 - DNA, 2273 bp, Zea Mays
tttcgattgcgatgccacattcggctcgcaccgtttaaaatttagttatttctgaagtgtcgagcctagtgcccatttaaaagtaatcaattaagacgaactaaaattatcacttaagtatttcgctcggttcgagaaatctcgataaattcggtaaatgcgctacttgaggcaggctgttcaaataaaccgaaaccggaataattgctggacaattcggtttcctatttcaaaatccgagaaaataatatgcatattcgtatagcgtgtcgatcctttggtcatcgctaaaaatccctaattctaaaatatctgtgattctctgttaaataaaggaatggaaaaatctaaaaagaaaaagaaaaaaaatctatagctgccgcctctttccatctgccgggggtttagtttttcctttgtagtactatcgtcctgcatagtagctaggggattttaccatttctcttccggaaactgaccaagaacagccactgccaatttcgagttcagactccagactccatcgatgctatacatagttaaaagagaaaagaaattaaaaaaaataggaaaatatctttctcccaccgctcgacatcactctatttctcttatccagttatccagttatcctctccagccatcgacttcatctgtcgctggattttttttgccgcgccgctcatctgctgttcttatccctacaccgctcagttctgaagaaaaatcccgccgctcaagcacttggatactacagccgtcacactggatttttcttccccgcggtgcttcttctgcttctcccccagtgcgtctcctctatctctccctcagcgcgctccccggccgagcgctccttgtgccgcgtccggctccctggctcgccggcgccccatctcctctcaagctcgcgaacgccaatggcgcgggtccttctctcccttgcttctctctttcctcccccaagcgccctcgcttcctccctctgtccgctcgccaggcgcccaatccatggcgtacccagtcgcgtccctgtccatctgctcggccgcgagcttccctgcttccgtgattatcgaagctccaggtaggcacaggtccgtgacgatgtcgtggagagccgcagtgttgttgctcgcgtgcctcgtcgccgtgacagcggcgctggtggacggcgcgctgctccccgaactcgcctctgcgcctggctcctgctcgtcgaatctccagccgtgccgtcgcagctccagctcgatccttttctgcgcgcgcacgctcctcccgagctccgtgcacgcgcgccccatcccgcctgcgctcggaccgcgccctcgctgccggtgctcgccgaccgcggctgtcctactccctgctgcgcttgccctggtcgccgccgtcgagtttttcggtgtctgcgcgccatcgcccagctcgcccaagtcgcccttggctgcgcacagtgttcttgttgatgctgtgccgttgccaatgctgtagagctcgccttgctccttgcgtcgtcgttcgtcggtcgcggatgcttaagtctctggtcacgcgtctgtttatctcgtgcgcgtgagtttgaagctctgcacgttcatcgtcctttagtcccagtccgacccattcgtgcgctcgctttttgtccatcgggtttcgcgcgtgctcacgtttgctgtcgagtcgtcgaatccgttatcccctgctcaaccccacctcgtcagctcgctctagacataatcccgtcatcgttccgtgcatcgtcatgaaatctcaagtgtcgggtgaagacgaagcttgaagcattgtattcaccaagtgctcgaacaagtcatcgagcatcatcctcgtctacgccaagcccccaagccgtgaagacactctggtgttagccacgcgtcaccagctcgacaaaataaatcccatgggtgtctgatcgagaagtgaagttgtgtacatcactcgccagacatgtgtgatcaaagacgtcaaccggaaaccatcgtcgtgcttgcgactatatcgtcgaattagtgagggtaagttgattcgtattcccgttaactaggtctataaatagattaaatagaattgttggtcacagtaaatattaataatttagcatgcgtatattgtgatgatcaatttagatagctcgctaaatcaagtaattaagttacacaatttagagagttaataaaaagctaggaataaaaatagattttctaatgttattaggtcaatttggttaatgaatgtagtcaatgctc

SEQ ID NO: 99777 - DNA, 1845 bp, Zea Mays
ctcggttcgagaaatctcgataaattcggtaaatgcgctacttgaggcaggctgttcaaataaaccgaaaccggaataattgctggacaattcggtttcctatttcaaaatccgagaaaataatatgcatattcgtatagcgtgtcgatcctttggtcatcgctaaaaatccctaattctaaaatatctgtgattctctgttaaataaaggaatggaaaaatctaaaaagaaaaagaaaaaaaatctatagctgccgcctctttccatctgccgggggtttagtttttcctttgtagtactatcgtcctgcatagtagctaggggattttaccatttctcttccggaaactgaccaagaacagccactgccaatttcgagttcagactccagactccatcgatgctatacatagttaaaagagaaaagaaattaaaaaaaataggaaaatatctttctcccaccgctcgacatcactctatttctcttatccagttatccagttatcctctccagccatcgacttcatctgtcgctggattttttttgccgcgccgctcatctgctgttcttatccctacaccgctcagttctgaagaaaaatcccgccgctcaagcacttggatactacagccgtcacactggatttttcttccccgcggtgcttcttctgcttctcccccagtgcgtctcctctatctctccctcagcgcgctccccggccgagcgctccttgtgccgcgtccggctccctggctcgccggcgccccatctcctctcaagctcgcgaacgccaatggcgcgggtccttctctcccttgcttctctctttcctcccccaagcgccctcgcttcctccctctgtccgctcgccaggcgcccaatccatggcgtacccagtcgcgtccctgtccatctgctcggccgcgagcttccctgcttccgtgattatcgaagctccaggtaggcacaggtccgtgacgatgtcgtggagagccgcagtgttgttgctcgcgtgcctcgtcgccgtgacagcggcgctggtggacggcgcgctgctccccgaactcgcctctgcgcctggctcctgctcgtcgaatctccagccgtgccgtcgcagctccagctcgatccttttctgcgcgcgcacgctcctcccgagctccgtgcacgcgcgccccatcccgcctgcgctcggaccgcgccctcgctgccggtgctcgccgaccgcggctgtcctactccctgctgcgcttgccctggtcgccgccgtcgagtttttcggtgtctgcgcgccatcgcccagctcgcccaagtcgcccttggctgcgcacagtgttcttgttgatgctgtgccgttgccaatgctgtagagctcgccttgctccttgcgtcgtcgttcgtcggtcgcggatgcttaagtctctggtcacgcgtctgtttatctcgtgcgcgtgagtttgaagctctgcacgttcatcgtcctttagtcccagtccgacccattcgtgcgctcgctttttgtccatcgggtttcgcgcgtgctcacgtttgctgtcgagtcgtcgaatccgttatcccctgctcaaccccacctcgtcagctcgctctagacataatcccgtcatcgttccgtgcatcgtcatgaaatctcaagtgtcgggtgaagacgaagcttgaagcattgtattcaccaagtgctcgaacaagtcatcgagcatcatcctcgtctacgccaagcccccaagccgtgaagacactctggtgttagccacgcgtcaccagctcgacaaaataaatcccatgggtgtctgatcgagaagtgaagttgtgtacatcactcgcc

SEQ ID NO: 99778 - DNA, 1448 bp, Zea Mays
ttttttttttgcaaagagttttatatttcaatttaaaataccagtttgagacattgttagtttgaggcatcgtatgctctaagaacgaaaccaatcatcagacgagatccccacaccaaatagatctctttcgcgtcagtcaatgccgtccgccgacgccggagatgctgacgcgatgcccgcgccgccgccgcaaacaagggccgccatctcgcatgtcatcttcgacatggacggcctcctcctcgatacggaggggttctacacaacggtacaggagaagatcctgatgaggttcggcaaggtgttcgactggtccgtgaaggccaagatgatgggcaagaccacggccgagtccacgcgcatcttgtttgaggagttcggcctcgccggcctgctcaccccggagcagttcctggaggaacgcgaaaccatgctcaagaagctcttgcccacttgcgttgccatgccaggtctgctacgtttgatcaatcttctccacacaaatggaataccgatagctgttgcaacaggaacccataaacatcactttgcactgaagacacaaaaccacgaggacatattttctctgatgcatcatattgtcacaggagatgatccagaagtgaaggcgggcaagccatctcctgatattttccttgctgctatgagaagatttgaggctaatgtagaacctagtaattgcttggtatttgaagatgcaccgttgggtgtggcagcagccaaaacttcaggaaagcacgtggtgatggttccagatccaaggctagatgtttcacatcacaaaggagctgaccaagttctcacttcactattggaattcaatcctagcgaatggggcctgccaccttttgtggattagattattttcagagacatcaagcatgtttcacagacacacaagccctacaaccacacagtaaacgccccgtattcatattagggaaaattttttggttgcgtatagttagaaatttcaacataaaaaaaggaacacacctgtttctgcctagtagcgaaagggcctctagctgagttagttaggtggtctgagtagcactcctcaggtcctgagttcgactccccgtgggagcaaatttcaggctgtggttaaaaaaatcccctcgtctgtcccacgccaaagcacaggtctaaggctcagccccggtcgtggtcgttctcacatgggcttcgatgccgctgtgtatgggtggggcaggggttcgggggttttcttgacctgtgtgagaaggtcttcttcttaatacaatacccgggggctgtcttaccccccgcaggtcaagttttttttttgtttctgcctagtaatatactggtgtaactactactaaacatctgtgctgctactgcagtttacagtatttttaagaaacattcttcatatataaattttattttaatagaaa

SEQ ID NO: 99779 - DNA, 543 bp, Zea Mays
atgagacgggaagggaagctctcctcagtcctcacctccatctcggccgcgcgacccgcgagaacaacgatagaggtagccaagaccctcgcggaggaggcaatgatggatggctcgcttagccgcgccagcccaacaggacccgggaaccaggcggccgcccaacagaaccctactctgcgccttttgttccgtcaccgcctcccgactcctactcggcgcggcacaaccctagccccagcccctgtgcaagggggaatgtctcccactgcagttgctcctgtcccgagcctgacccgagaatccttacaccgcgcaggctcttcgctggaagagggagaaatagatctggtacctgagctgatgatggtactcctcacagcggcgaccggatggaggagtagagggaggggcgacagcgggatggaggagcagagggagctgctcccagaggaggagctcctcacggtggtgacgggatggaggagcagagggaggttttcacagagaaagggttcaatgggagcgctcgcgtcttcctga

SEQ ID NO: 99780 - DNA, 1511 bp, Zea Mays
ctgccttctcttctgccgttcccccggcgagctctttctctctcgtgcggcaactgggctattggcgaccgccaacgccgacgattacatttacaccaagtgcccaagccgtcttcgactacaccaggtgccaagttttcttcgcgtccttcacccgcgacgagcacccaccaggcatagagagagatggcaagtctaaccggcctcaccgcgaaccctaatccgaacaagtcattcgagatactgccgaacccaggtgactctgtctccagcctcagctttagtcccaagagtaatctgcttgtggcaacctcctgggataaccaggtgaggtgctgggagattgttggtggtaacagtcagccaaaggcgtccatttctcatgatcagccggttctctgctcggcttggaaggatgatggaactactgtcttctctggaggctgtgacaagcaggtcaaaatgtggcctcttctgtcaggtgggcagcctcagacggttgctatgcatgatgcccctgtcaaggaggtcgcctggattcctcagatgaatcttcttgtatccggaagctgggataagactttaaggtactgggatacaaggcaatcaaatcctgtgcatattcagcaacttcctgaacgttgctatgctcttactgtgaattatccccttatgattgttggaactgctgaccgtcatcttgttgtcttcaatttgcagaatcctcagacggagttcaagcgaatccaatcaccactaaaataccagacacggtgccttgctgcattccctgatcaacaagggtttttggttggttcaatagaaggaagagttggcgttcatcatatcgatgacgcacagcaaagcaaaaacttcacattcaaatgccacagggaaggaaatgatatattctctgtcaattcactcaacttccaccctgtccatcacacatttgcaactgctggatctgacggtgctttcaacttctgggataaggatagcaagcagaggctaaaggcttttagtagatgcccccttcccattccttgcagtaccttcaacagtgatggttccatatttgcttatgcggtttgctatgactggagccgtggggccgaaaatcacaaccctgcagctgcaaagacatccatctatctccacagtccacaggaaaccgaggtcaaaggaaagccgcgcattgcaacaggcaggaagtgattgcattgaaggtgttgcaaggaaccatgatgtcatccagcagttttgtcatgcctccctcctgtcttggaagtctggtagagtgtaaatttcagctaacttatgcgccgattatagggtttctgtagtacctggtgtttgtggtgtcttcaaaatagattctgtcgacgttctgtgatgatctccttactgcttatttctggcagtaaaatcagtgtatcttaaaaaggttgtgatgtaaattttcgtgcatatggaccccgatactaatggagttttacttcacagataaa

SEQ ID NO: 99781 - DNA, 2782 bp, Zea Mays
ccgcagccatggttcgccgactcttcctccaccacgcacgccggcgcctccactctggcaccgcctcctccattcccctttctaccccaatcttcgccatttttggtgccaacaccggcgtcggcaagaccctcgtgtccgcgggcctagccactgcgctcctctcctccccctcccctgccgtctcgtccgtcgcctacctcaagccgctccagactggctaccccgttgactccgacgcgagcttcgtcttcagcaggacccccgcgctgctccgcgccttccctccctgccgagccacccgcctcatcgcctcatgccgcaccttcttccaatcacctgccgtggaggccaaggcggaatcccttcacgagagccaggagaaggtggtgacctacggagcgggtgccgcggagcagacgaaggtgctcgcgtgctgcacggcgtacgcgtggcgggagccggtgtcgccgcacctggcagcagagagggaaggaatggcggcgggggatgatgaggtcaagggttgcgtcgaacagtggctgctggaggaaggcattggggagggtggggaggtgtggaagatactggaaactgctggtggcgttgccagccccagtgcctcgggtacgctgcagtgcgacctctaccggccttttaggttacctgctattcttgttggagatggccgtcttggtggtatttcatccactttgtctgcgtatgaaactttgttgctaagagggtatgatgtgagcgcagttattttggaagatcgtgagttatcaaatgacaaattcttgctttcttacttgagaaacagggtacatgtgcttattttgccacaaattcctgaagatcctttagatgacctgactgattggttttctgagtcatcctcaatttttatttttcttaaagatgagctgcaatcatttcattctagaagaatagagaggttaaacagcatgcaaagaaaatcaaaggctttactgtggtggccttttactcagcacaatcttgtccctcaagattctgttacagtaatcgattcacgttatggtgagaatttttctgtgtacaagattaaagacaaaatgctcatccctcaatttgatgcatgcgcaagttggtggactcaagggcctgattctaacttgcagattgaacttgcaagagatatgggctatgctgccgcaagatatggtcatgtgatgtttccagagaatgttcatgagcctgctcttcattctgcggaagttttacttggaggagttggtaaaggatgggcttctcgagtctattattcagacaatggatccactgcaattgaaattgctctgaagatggcatttcgtaaattttctcttgatcatggaattatggccagcagtgaaaatagtacaagaaatgaaagaaacattcagttgaaggtacttgctctaaatggttcctatcatggtgatactctgggtgctatggaagctcaagctccatcggcttatacatcttttcttcagcagccatggtattcaggtcggggactttttctagatcctccaactgtgtatattaaaagtgaggtctacaatatttctttgccccaatcaatgcagcatgatcctcagacatatggctttttttcacaagctgaagtcttttgcaagaccagggacaaaacttttgctgctgatttgtattcgtcctatataaaacagaaactatctgaattttctctatcaagtagttctgaacatcttgcagcactaattatagaaccagtaatacaaggtgcaggtggaatgctcatgatagatcctcttttccagcgagtacttgtcagtgagtgtagaagccgaaaaatacctgtcatatttgatgaggtatttacaggattctggcgtcttggtgtggagtctgcttctgagttacttggttgtttacctgatatcgcctgctatgcaaaattgatgactgggggaattataccattagctgcaaccttagcaacagaggaagtttttgaatccttcgaaagtgactctaagcttacggcgctcttacatggccattcctacactgctcatgctatgggctgtactgcagcactcaaggctatgcagtggtaccggggtccatccaccaattcaaaccttgatactgaccacatgaagctcaaggagttgtgggatggcacacttgttaagcagttgtcgtcactaccgaatgtgaaaagggtggtgtcattaggaactctgtgtgcaattgagctcaaggctgagggagctgatgctgggtacgcttcactctacgcaagttccttggtgcaacagctccgtaaagaggacgatatttacattaggcccctgggtaacgtgatatacctcatgtgcggtccatgcacaccccgagatagctgcactcgacaactcctcaaggtacaccgcaggctttgtgcgcttaattgagccggctgggaatatagttgagggcagtctgtcggagttgaacagccttgtggcaacttaagtttcaggccgtcaattgaccttcagatgttatacaatgttcattaccatcgaatctgagacgtcagacttattctgatgcagagggcgccgttcctaagctctatggtaggatgacagattagttttagacatcattagtgatgataaactatgctttgctgtgtttccaatcgatccgattgtatgtatggctccgtatgtaattttgtaggtgtatattgccgaaggttttgcgacgtttttttgcaacg

SEQ ID NO: 99782 - DNA, 2791 bp, Zea Mays
ccgcagccatggttcgccgactcttcctccaccacgcacgccggcgcctccactctggcaccgcctcctccattcccctttctaccccaatcttcgccatttttggtgccaacaccggcgtcggcaagaccctcgtgtccgcgggcctagccactgcgctcctctcctccccctcccctgccgtctcgtccgtcgcctacctcaagccgctccagactggctaccccgttgactccgacgcgagcttcgtcttcagcaggacccccgcgctgctccgcgccttccctccctgccgagccacccgcctcatcgcctcatgccgcaccttcttccaatcacctgccgtggaggccaaggcggaatcccttcacgagagccaggagaaggtggtgacctacggagcgggtgccgcggagcagacgaaggtgctcgcgtgctgcacggcgtacgcgtggcgggagccggtgtcgccgcacctggcagcagagagggaaggaatggcggcgggggatgatgaggtcaagggttgcgtcgaacagtggctgctggaggaaggcattggggagggtggggaggtgtggaagatactggaaactgctggtggcgttgccagccccagtgcctcgggtacgctgcagtgcgacctctaccggccttttaggttacctgctattcttgttggagatggccgtcttggtggtatttcatccactttgtctgcgtatgaaactttgttgctaagagggtatgatgtgagcgcagttattttggaagatcgtgagttatcaaatgacaaattcttgctttcttacttgagaaacagggtacatgtgcttattttgccacaaattcctgaagatcctttagatgacctgactgattggttttctgagtcatcctcaatttttatttttcttaaagatgagctgcaatcatttcattctagaagaatagagaggttaaacagcatgcaaagaaaatcaaaggctttactgtggtggccttttactcagcacaatcttgtccctcaagattctgttacagtaatcgattcacgttatggtgagaatttttctgtgtacaagattaaagacaaaatgctcatccctcaatttgatgcatgcgcaagttggtggactcaagggcctgattctaacttgcagattgaacttgcaagagatatgggctatgctgccgcaagatatggtcatgtgatgtttccagagaatgttcatgagcctgctcttcattctgcggaagttttacttggaggagttggtaaaggatgggcttctcgagtctattattcagacaatggatccactgcaattgaaattgctctgaagatggcatttcgtaaattttctcttgatcatggaattatggccagcagtgaaaatagtacaagaaatgaaagaaacattcagttgaaggtacttgctctaaatggttcctatcatggtgatactctgggtgctatggaagctcaagctccatcggcttatacatcttttcttcagcagccatggtattcaggtcggggactttttctagatcctccaactgtgtatattaaaagtgaggtctacaatatttctttgccccaatcaatgcagcatgatcctcagacatatggtgatacatgctttttttcacaagctgaagtcttttgcaagaccagggacaaaacttttgctgctgatttgtattcgtcctatataaaacagaaactatctgaattttctctatcaagtagttctgaacatcttgcagcactaattatagaaccagtaatacaaggtgcaggtggaatgctcatgatagatcctcttttccagcgagtacttgtcagtgagtgtagaagccgaaaaatacctgtcatatttgatgaggtatttacaggattctggcgtcttggtgtggagtctgcttctgagttacttggttgtttacctgatatcgcctgctatgcaaaattgatgactgggggaattataccattagctgcaaccttagcaacagaggaagtttttgaatccttcgaaagtgactctaagcttacggcgctcttacatggccattcctacactgctcatgctatgggctgtactgcagcactcaaggctatgcagtggtaccggggtccatccaccaattcaaaccttgatactgaccacatgaagctcaaggagttgtgggatggcacacttgttaagcagttgtcgtcactaccgaatgtgaaaagggtggtgtcattaggaactctgtgtgcaattgagctcaaggctgagggagctgatgctgggtacgcttcactctacgcaagttccttggtgcaacagctccgtaaagaggacgatatttacattaggcccctgggtaacgtgatatacctcatgtgcggtccatgcacaccccgagatagctgcactcgacaactcctcaaggtacaccgcaggctttgtgcgcttaattgagccggctgggaatatagttgagggcagtctgtcggagttgaacagccttgtggcaacttaagtttcaggccgtcaattgaccttcagatgttatacaatgttcattaccatcgaatctgagacgtcagacttattctgatgcagagggcgccgttcctaagctctatggtaggatgacagattagttttagacatcattagtgatgataaactatgctttgctgtgtttccaatcgatccgattgtatgtatggctccgtatgtaattttgtaggtgtatattgccgaaggttttgcgacgtttttttgcaacg

SEQ ID NO: 99783 - DNA, 2043 bp, Zea Mays
gtgcaacgtacggtagtgatatagaatagcacgatgacaaggagcctccggcgagcgaggatgccatgcctacttcgacccttcctggccctccgcccccccgtacgtagcgacacctttctgtttctgccccgcgccgaggttgcctttcttgtcgtgtgccggacgaggagggctaccaagagtccgttcccagacggccagacccagcacgtacgacttccaaccaccagccacgtcgtcagactcagctgtttgcttcagcaatcagtcgtcgtcagccacggacacacgacacgagcagaggaagctgagctcttgcttgttcctgcagtcgtctgcagccgctgccgacgagcggcgcgcccgcccgctacgtgacatcgggtcccgtcggggccatggggatctacgagcggcagcgccacctggtgcccaccggcgtgtggggggaaccgttccggctcgacgccgacgccgtggccatgcccctgcccctggccgcgttcccctcggtcaccgtggccacgccggcgccgctcgacgtcgtcgagccggaagcagaggagatcaagctcggcaaacgactgttgcaggcgcagcaggacgacgtgccgcggatgcaagaagcgccgccgtcgtcggatagcttcagccacgacgatgacgacgctaggccgagagacaaggttcagagacggctcgcgcagaacagagaggcagctcggaagagccggctacggaagaaggcgtacatacggaacctcgagacgagccgcgtgaagctggcgcagctggagcaggagctcataatggccaggcgccagcagcacggcgcgtacggcgtgggaggaggagtcgcaccgccggcggcgcccgtggacccgcgcgtcgctgcgttcgagctggagtacgcgcactgggtggaggagcagagcaggcaggcgacggagctgcgggcggcgctgcagtcgcacgcgccggacgtccagctgcgggtcctcgtcgacgccgcgctggcgcactacggcgcgctgttccaggccaaggcgagggcagcccggtccgacgccttcttcgtgctgtccggcgtgtggcggtcccccgcggagcgcttcttcctctggatcgccggcttccgcccctccgacctgctcaaggtgctggagccgcagctgagcccgctcatggaccaccaggcgtccgaggtgcgcaagctgcagaacacggcgcggcagctggaggacgcgctgtcgcagggcatgagcaagctgcagcagacgctggtcgacaccctcatgaccgtcgacgtctccccggacggcgccgggggcggatacgcggggcagcagatggcctgcgccgtgggcaagctcgccgacctcgtcgacttcgtggacaaggcggaccacctccggcagcagacgttgcggaacatgcacaagatcctgacgccgcggcaggcagcgcgcggcctgctcgcgctcgcggactacggtcagcgcctgcgcgcgctcagctcgctctgggcggcgcgccccagggagcccgcatagtcgtaacgagacacccgcgacggcgacagcgacgggggagaggaagcggcattgcaggcacgtgcgcgcgtggttgcctttggctgccgcccagcggagcaagaagccatgacgcggcagacgccggcctgcgatcagtgcctcggttcctcccactcccagctctgcatctggtattctggtacgggcaaccggcgtgttctgttcgctctcggaatgaaacctgaatcttctaatggttacagcagtgaattaggctttggatttgattgacagatcgaagaaattacaagtgtaaatacggtagacaaagttgtttgggtagtagaacagacgtgtactgttcagttaatgtttgtctcggtcaacctgtaactaatacgtcatctttttttttcttgtcggtgaggatgtaaacagatcatgtgaaagatgtacaacgaacaatctatggaaccagagttagacgggcatgtatcctatgcaa

SEQ ID NO: 99784 - DNA, 276 bp, Zea Mays
gtggacgtatctctaggttggagcgtaaaaaccttaagttttgagcataaaatctctcaattataagcatacaatctctcaattataagcgtaaatacttagccaatgtgagaggttgatagctctggtaggttgttattacgatcctatttttatggcagatccgaaaaatatggcagtcgcatgcatgcgttttctatttttatacagatccaaaaattatggcaaaatgcatgcataagtcaaacatgtccccttgcatgcgcgtaaatttag

SEQ ID NO: 99785 - DNA, 410 bp, Zea Mays
aaggcaagggcgtggcagctagctgtaggctgtagcagcgatggtgtacgaggcagctgcggccgttgcggcgagggaccaaagccagctacgcagccgagaaggcaggcgcggtggaagaagccgacgacgacagccgccggaggagaaagagaaggtcgtgatgaggtgcagcgttttcaggatccttgggagggtcctcttgctctccaaagcatcagcgtcggagaagaagtgaatggttcctgcacagttgacgcatggttccatctcttcgtgatttgtaactcgttaaagtatttactaatgtagagtaaatatcatcttaatcttggtgttgagattgtagtgttgtgggattgtaatcatccaagagtctcaatttatcgatccaaaatgttaagtgtgaa

SEQ ID NO: 99786 - DNA, 1267 bp, Zea Mays
agctcctacagcactacaaacccatccatcacctttttctcctactcttccttccaagaaccaattggaagaaaaacagaaagcgaaggaacgaacgaagctagccattgcttgtttgtcgcgattgacaccaatgcatgccccgaggaggttcaagaaggccttcatggcgcagcttctgctgagcctgcgtgcggccggccaggcgtccaagtccatgggcctccgggagcgccgggacgccgtgcggctctcctccgacgtggcgatggcgctggcgtccgcgcgggcccgcgcggcgccacgctcgacggtttgggcccgcgcgctcatcgccaggcacgcggcggagcagcgcaacgaggcgctcatgcgccgcatcatgggcggcgccggctacgagatggccgccgcggcggtgagggccaggaaggaggctcggtgccggaggatcgtgaggaggtcgcgccgggtatgcagcggcgtcgggaggaagaggaggagcttgctggcggcggagggcggcggaggcatcagatgcagcgcaatggcggcggccaggaggatggtgaaggcgaggctgcaggtgctgaggagccttgtgcctggaggggaggcgatgggtggcctctccctactcaccgagacgctggattacgttgtgtgcctcaaggcacaggtggagctaatgcaacgcttgtgcaaaggatcctgttcccagtcccagcttggctgaggagatgacatcatgtctcacatctcaggggacggagcagcaactgcgagactgcaggggccatgcatgcacaaaaggcaaggaccgcaagcaactgaagccgtctggatgggtgggcgtggcagagctccgatgaattgtctccgtgagccaactttactatacatatagctagcagtactagacgtaccggtgtaatgtaactactgtccaagtacatgtcgctgcaaagatgggcttggttttgctgtatcacctcacaggagaggatgaacacaagccatcatccatttggtgagtcatgttttgtcgttaaataataactagcaaatcttggtttattgggtgggcaaaatataatattctcttgcacgtggattctggagtcttgaagagatgggcatctttgtggtcaaaggctctgttggtgtatgttcagaatatggcataatattactagcatgtatgtaccggtaaggataacaaagaggtggtgtgatcaatggtgatttaattataatgaaattaaaa

SEQ ID NO: 99787 - DNA, 1191 bp, Zea Mays
aactttcttgggctctcacctagctagctgctttatattcacataaacctctgctcttggagctggagctcctacagcactacaaacccatccatcacctttttctcctactcttccttccaagaaccaattggaagaaaaacagaaagcgaaggaacgaacgaagctagccattgcttgtttgtcgcgattgacaccaatgcatgccccgaggaggttcaagaaggccttcatggcgcagcttctgctgagcctgcgtgcggccggccaggcgtccaagtccatgggcctccgggagcgccgggacgccgtgcggctctcctccgacgtggcgatggcgctggcgtccgcgcgggcccgcgcggcgccacgctcgacggtttgggcccgcgcgctcatcgccaggcacgcggcggagcagcgcaacgaggcgctcatgcgccgcatcatgggcggcgccggctacgagatggccgccgcggcggtgagggccaggaaggaggctcggtgccggaggatcgtgaggaggtcgcgccgggtatgcagcggcgtcgggaggaagaggaggagcttgctggcggcggagggcggcggaggcatcagatgcagcgcaatggcggcggccaggaggatggtgaaggcgaggctgcaggtgctgaggagccttgtgcctggaggggaggcgatgggtggcctctccctactcaccgagacgctggattacgttgtgtgcctcaaggcacaggtggagctaatgcaacgcttgtgcaaaggatcctgttcccagtcccagcttggctgaggagatgacatcatgtctcacatctcagggtaaagtctcgtgtcctcgctctagctctgcaatcttttgaacttgttggacggagcagcaactgcgagactgcaggggccatgcatgcacaaaaggcaaggaccgcaagcaactgaagccgtctggatgggtgggcgtggcagagctccgatgaattgtctccgtgagccaactttactatacatatagctagcagtactagacgtaccggtgtaatgtaactactgtccaagtacatgtcgctgcaaagatgggcttggttttgctgtatcacctcacaggagaggatgaacacaagccatcatccatttggtgagtcatgttttgtcgttaaataataactagcaaatcttggttta

SEQ ID NO: 99788 - DNA, 747 bp, Zea Mays
atcagaggaagcacaaagcaccaccatcgccatgagatgagagccaagcagagtagtagagagagaagaacaggggttagccgcgtcgtcgtgcgaactctggtcgtgcatgcagaagatgtccatggccttttcgtgagcaaacagagacgagagggccgaagattccttgccggtcactgacctcagccaagctcgtagccataagccgctatgaccagctcatcgaaattcgagttccctcccgaactctagcgataacttcgacaacgaggttacaagtcacctaaagagcaagttggtacctggaatctcaagtcccaggcaagttgtgcccttgatcacttctttttatccaatcatgctcttattaatcataatgatctgcataggttaattttgatgggacccaataggttaccctagtttgactatctttataccttgtttaccactgaattttttggtagtacctgctattgctatatgtggttttgggtatagaggtacacattattcatgatcctacttacattatcaatttgatatttactatgcatgataagatcattatgttaattggaacatggagaaccacccgggaaaacagtgctaccacgagggtggtatgggacgcccttggctgactaattatgaaagctagtggaagactaccttacccaaaagggacaagggcagtaggggagtggtcagtatagggagttcattgggttgattttgctgcga

SEQ ID NO: 99789 - DNA, 1210 bp, Zea Mays
ataagccaaacactccggcagctgtggtggagacgcctccgcctcccaaacacccgaatcaaactaacagccaccgatggcgtcgccatcgcggttgctcccgcccacgcctccttcggccgcccagccccgcggcccgcgggatcgcctcgccttgccgcgcctccggtgcctcgccgccgccgcagcctccgcctcgcccactgatggcgctgtgctgctggagcgtggcggttccgcggcggtggccgtgcgggagttcgtcacgcttgacgagctccgcgctgccgtgcgcctccgcgtccgcaccttccacgagtacgcagacgactccgtcggaaccgaggatcacagaaaggctcttgcagatagggagtttgaagcattacaggataggatttctgggaagatgataaattttcgaagagtttcttgcataaacgggactgttccactgtccccatcattaatgtcagctgaggaactttgttctatgtgcaagtttgtggaggatggaaaagagagattagtagttggtagtttagaccttaatcagtgtctttggctaccagatgaattgactggaaagaggcctggggtaaatgaagacatccagacaagagcatatctaagcaatgtctgtgttgccaaggagcttcagaaaaaaggcttaggctatacattagttgacaaatccaagaaattagctcttgaatggggcataacagatctgtatgttcatgtcgccatcaacaacgtagcagggcaaaagctgtacaagaagtgtggatttgtttatgaaggcgaagaacctgcatggaagggtaggtttctggggagaccaaggaggctgcttctttggcttgatatgagcaaagtgcttgtgcgatcgtgcatgtaaatacatatttagctatttgtaatcatattattgcaattgttggttttaatattcgacccaaatctccaattgattgcagtctgaatcatccctcttttctgaccacacctttctcaacgatgtcctacaaaagtttttggaggcagattaggaacaaaatcctagaaatgctttagatgttacacaaagggcagttggatttggaaagaattgattatgggggtgattgtgttgttgccaaaaattaaaggggcataccatgtaagagcaactcaaacaaaggtgttgaattatgtcatatcttaaaat

SEQ ID NO: 99790 - DNA, 774 bp, Zea Mays
ataagccaaacactccggcagctgtggtggagacgcctccgcctcccaaacacccgaatcaaactaacagccaccgatggcgtcgccatcgcggttgctcccgcccacgcctccttcggccgcccagccccgcggcccgcgggatcgcctcgccttgccgcgcctccggtgcctcgccgccgccgcagcctccgcctcgcccactgatggcgctgtgctgctggagcgtggcggttccgcggcggtggccgtgcgggagttcgtcacgcttgacgagctccgcgctgccgtgcgcctccgcgtccgcaccttccacgagtacgcagacgactccgtcggaaccgagttttgttaggatcacagaaaggctcttgcagatagggagtttgaagcattacaggataggatttctgggaagatgataaattttcgaagagtttcttgcataaacgggactgttccactgtccccatcattaatgtcagctgaggaactttgttctatgtgcaagtttgtggaggatggaaaagagagattagtagttggtagtttagaccttaatcagtgtctttggctaccagatgaattgactggaaagaggcctggggtacgaccgttgtttcctctttctacgctattgcagaatacttatgatcaaaacatatttttgatagttgttattggtatttttgaacttgctttggtcatcgctttgttgttgttttggcaataaagatagactcactacatctaacttctttcttgtcataataa

SEQ ID NO: 99791 - DNA, 765 bp, Zea Mays
ataagccaaacactccggcagctgtggtggagacgcctccgcctcccaaacacccgaatcaaactaacagccaccgatggcgtcgccatcgcggttgctcccgcccacgcctccttcggccgcccagccccgcggcccgcgggatcgcctcgccttgccgcgcctccggtgcctcgccgccgccgcagcctccgcctcgcccactgatggcgctgtgctgctggagcgtggcggttccgcggcggtggccgtgcgggagttcgtcacgcttgacgagctccgcgctgccgtgcgcctccgcgtccgcaccttccacgagtacgcagacgactccgtcggaaccgaggatcacagaaaggctcttgcagatagggagtttgaagcattacaggataggatttctgggaagatgataaattttcgaagagtttcttgcataaacgggactgttccactgtccccatcattaatgtcagctgaggaactttgttctatgtgcaagtttgtggaggatggaaaagagagattagtagttggtagtttagaccttaatcagtgtctttggctaccagatgaattgactggaaagaggcctggggtacgaccgttgtttcctctttctacgctattgcagaatacttatgatcaaaacatatttttgatagttgttattggtatttttgaacttgctttggtcatcgctttgttgttgttttggcaataaagatagactcactacatctaacttctttcttgtcataataa

SEQ ID NO: 99792 - DNA, 881 bp, Zea Mays
ataggagagatggatgggagcagcaaatacagatcaaagggctatgcaatggccaatgccggcaggaagctcccctacgtcttcctgctgctggtggcccttgcagctggcgtgttgagcgtcgtcgtcctgcagaaggtgagggagcagcgcgtctttgctcggcgtctccaggaacgtgaccgccagcttgtcaccctgcggatccttctccagaaagaaaaggcatttaacaaagagatgaagaggaaggtggaagaaatgaaagcaacaacatcttcacttagaactcagaagactgaccagaaaaccaaactcaagggactggaaacaacagttgcagatcttaagaagactcaaaaagatctggaagtagctctcgctgaaaaagataaccgcattaatctaatggaagaggcagccacaaaccttgagaaagtctaaaaaacaattggaggcgacactcacagagaaagacagacacatcaaacaaatggaagagaagaacaaaagcgctaccaacactcaaaaagaattggaagcagttctctccgagaaagaccgtcgcatcagacaaatggaagagaaagccaccggttcaaaccctgaccagatggcagctctgatggaaatcctgcaacggaaggaagccgaactcgaagagatcaagaccaggttccaagatttcaagaaaccagacagagtcgaggtgaataacaaaagcactcccatgcaaatgaacaatgcaagcgcaacaccagacgtcatgatagtcacaaaggctacaaactcgagcagtgtggctgttcccatcaagtctgaagaaaagcgtcctttccttttccacagcaatgggaaatgccaaaccgaagaaaaaacga

SEQ ID NO: 99793 - DNA, 716 bp, Zea Mays
gagttttccccctttctcgcttctcctcgtggttcctcaagtcccgctgctgccgccctctccttctcgtcgcgctccgtgaccgcctcctctccttccactacagatgcctcctcatcggctcaccacccaggtttacccaccttgcagatccagtggcgattccattcctctccgtgtggacgcaaggactcagtgaaccacttccagatactcgctgcttctcccgtgcccatgggaaactgccagtgcagagaaggtcaaagaagcacacaagagagtgatggtggccaatcatccagatgcgggtggaagtcattaccttgcttcaaagattaacgaggcaaaggatgtaatgacagggaaaacaaaagggggtgggtctgccttttgatcggtacacggacaacgtgttcttccactgaaagagcaattttgtgtctccagactcgcattagaagatatgccgaaatctttgtgtgttttatgaaaatttgtggacaaaaaaaaaagtagtggacctttatggagcaggcaattcgttgcttagtaaagctcggctcagttgtgcttgtgcccgaatcaattggacattgttgctaattgagtcccctgtcctttgtttttccttttttttcattgatatcctgaaattcaccaacacaaagtatcatgaactgccttttattgataaattctgtatctgttttgaccaa

SEQ ID NO: 99794 - DNA, 895 bp, Zea Mays
gagttttccccctttctcgcttctcctcgtggttcctcaagtcccgctgctgccgccctctccttctcgtcgcgctccgtgaccgcctcctctccttccactacagatgcctcctcatcggctcaccacccaggtttacccaccttgcagatccagtggcgattccattcctctccgtgtggacgcaaggactcagtgaaccacttccagatactcgctgcttctcccgtgcccatggctacaccacttatagcaggacttgcagttgcagcagctgcccttgccggtagatatagcatccaagcttggaatgcttataaggcccggcccgtagttccaaggatgcgcaaattctatgaaggtggtttccaacctacgatgacacgaagggaagctgctttaatccttggtgtcagggaaactgccagtgcagagaaggtcaaagaagcacacaagagagtgatggtggccaatcatccagatgcgggtggaagtcattaccttgcttcaaagattaacgaggcaaaggatgtaatgacagggaaaacaaaagggggtgggtctgccttttgatcggtacacggacaacgtgttcttccactgaaagagcaattttgtgtctccagactcgcattagaagatatgccgaaatctttgtgtgttttatgaaaatttgtggacaaaaaaaaaagtagtggacctttatggagcaggcaattcgttgcttagtaaagctcggctcagttgtgcttgtgcccgaatcaattggacattgttgctaattgagtcccctgtcctttgtttttccttttttttcattgatatcctgaaattcaccaacacaaagtatcatgaactgccttttattgataaattctgtatctgttttgaccaa

SEQ ID NO: 99795 - DNA, 786 bp, Zea Mays
cggcatccccccccctgcagccggtgagctgctgtgagcctatccagtggcgattccattcctctccgtgtggacgcaaggactcagtgaaccacttccagatactcgctgcttctcccgtgcccatggctacaccacttatagcaggacttgcagttgcagcagctgcccttgccggtagatatagcatccaagcttggaatgcttataaggcccggcccgtagttccaaggatgcgcaaattctatgaaggtggtttccaacctacgatgacacgaagggaagctgctttaatccttggtgtcagggaaactgccagtgcagagaaggtcaaagaagcacacaagagagtgatggtggccaatcatccagatgcgggtggaagtcattaccttgcttcaaagattaacgaggcaaaggatgtaatgacagggaaaacaaaagggggtgggtctgccttttgatcggtacacggacaacgtgttcttccactgaaagagcaattttgtgtctccagactcgcattagaagatatgccgaaatctttgtgtgttttatgaaaatttgtggacaaaaaaaaaagtagtggacctttatggagcaggcaattcgttgcttagtaaagctcggctcagttgtgcttgtgcccgaatcaattggacattgttgctaattgagtcccctgtcctttgtttttccttttttttcattgatatcctgaaattcaccaacacaaagtatcatgaactgccttttattgataaattctgtatctgttttgaccaa

SEQ ID NO: 99796 - DNA, 1228 bp, Zea Mays
gagccgcttttgatgtgcagtacggtctcttcaaggagacggctgatcatcttttgtacccaaacccaggatcaggattggttcatgaactacatctgcaatatttcaattttcttggaagtctacttgggaaggcaatgtatgaaggcatacttgttgacttgccatttgcaacgttcttcttgagcaaggtgaaacaaaaatacaattttttaaatgatcttccttcattggatccagaattgtatcgacatcttctatttttaaagcattacaatggtgatatctcagagttggaactgtattttgttattgtgaataatgaatatggtgaacaatgtgaagaagaacttctccctggtgggagggacatgcgtgttacgaatgataatgttattacttttatccatcttgttgccaatcatcggttaaactaccagatccgtgcacaaagtacacacttcttgagaggttttcaacagcttataccaaaagactggattgatatgttcaatgaacatgaaattcaggttcttatatctggctctttagaaagcttggatattgatgacttgcggtcgaacaccaactattctgcaggatatcatccagatcatgagcttgttgagatgttttgggaggtcttgaagagcttaagttcagacaaccagaaaaaatttctcaagtttgtgactggatgttctcgtggccccctccttggatttcagtatctcgaaccgaaattttgcattcagagagctggtgttccaggtctggaggagcatgcagaccgcttgccgacatcagctacctgcatgaaccttctgaagctccccccctataaaagcaaggagcagatgcaaaccaaactattgtacgcgataaattcagaagctggttttgatctaagttgatcatgatcgggattcagtatttgcagttcagatagtcgctattaaaggcaccaagggccgaactcaaccaaccatcggccccatttgaagccccatgaatgaaggaaatgaaggaaaaaaagaaagaaacgcagttgtttctcagagtagttgaatgtctggagggaggctgcaatatagctgtctgctaactaagggcttcgttctccaagagaaataggcagacgctgtctaatcaatcatgggcatgtacatatgtgcatcattttatacagaaattttatatgtatctaatcaatgctggtttgcggtca

SEQ ID NO: 99797 - DNA, 653 bp, Zea Mays
tgatgagacacccatggatgttgatattaaaattaatcttgatgttgatttggaaagacagataactgcagcaattgatccaaagctacttcaacatttggtgaatgctctcttcagaggtacattaagcataaatgattctgatctgtctgaaccatcagatgctgaagtggatgctgtaggatgtatttgtgcttttcttcatgtcacattcaatacattccctctagagcgaattatgactgtactggcctaccggactgaaattgttcctgcactgtggaacttcataaagcggtgccatgcaaaccgaagatggccatttttttcgaagtttgcatcttcattacctgctgatgctcctggttggctccttcccatgtctgtattctgtcccatatacaagcacatgttgaagatcattgataatggggagttttatgagcaagagaaacccctttcccttaaagatttgaagtccttggttcttattttaaagcaggcattatggcaacttttgtggattattccatcctcttctactcagaaagtgtcatccaacccttcaggccttaagaagttgtcagtggagaatgtcaagatcagagctagggttgggttgtctgaattgctcacacaggttgataatctcg

SEQ ID NO: 99798 - DNA, 85 bp, Zea Mays
ttctttccaaaccaggcggctgacatcattgctgtttctacctcgttgttggataccttgccagcagtcacaacacctactgaaa

SEQ ID NO: 99799 - DNA, 611 bp, Zea Mays
ctcgctcgcctcttcccgaggtctccacgatattacatccccgatcgtgcccggggcttcgttccggtacgtgagggggtcggcgatgttcttctcgggtgacccgtcggcgcggcggcgggtcgacctcggcggccggagcagcaaggagcgggaccgcaaggtgctgctcgagcagacgcgcgaggagcggcgtcggcgccagggcctccgactacagaacacctccgccacgaagatccagaaattcttcagagggaagaaggctttggaattggcacgctcagaggttcggaagaatttttgctcaacttttggggagcattgcgagcggatagagtggaacaacttcggaactaattctgactttcttcgtcaattactgtttttctttaatgcaaatgaagacaatgacatagctatactttgtcaaatctgcaacttgctgctgcaatatgttaaacaaggcggagatgttgtaactctctttactggtgtgaatggctcctcactgcaacctctcgttgctcacagagtaaaaaaaattactctcatctgtgtgcaagcagtctatcaaaagaggcatgattggggcagccaacttttgacaa

SEQ ID NO: 99800 - DNA, 489 bp, Zea Mays
ttgcaggaatgcttgcttggggctttgtcttcaaaaacagtagtttatgttactcatcagattgaattcctaccagtagctaatctgtgagaatttttttggtaaaatttccatccataattcatcgcaataaaacaaatgcctatccttactagaactatattgcaggttatgaaagatggtaaaatagcacaagcttacaatgaaattctttgttcaggagaagagttcatggagttagttggtgcacacaaggatgcactcgcagaattcgacacaatagatgatgcagacagaagcaacaagggatccccttccagaggtatagcaaaattaaccaaatctctatcatcagctgagaagaaagataaataggacaaagggaaaaatcagagtggacaactggtctctaggaagaagaaagaaaggcaaggttgggttttgggtctactcgaattttttttgaacgtaatggcaggagctctctgc

SEQ ID NO: 99801 - DNA, 1116 bp, Zea Mays
atggtggtgccttccacgacgccggtggtgcgccagcaaacgacgccgccgcagtcatcccacgccggcggcataccgacggtggacctatcggcgcacggcggccgcggcgctctgtcgcggcaggtggtgcgcgcgtgcgcggagcacggcttcttccgggccgtgaaccacggcgtgccgccgggccccgccgcgcggctggacgccgccgccaggacgttcttcgcgctggcgccgcgcgacaagcagcgcgccggcccgcctagcccgctcggctacggctgccgtagcatcggcttcaacggcgacgccggggagctcgagtacctgctgctccacgccaacaacccggccgccgtcgcgcacagggccagggccatcgacgcggaggagccctcgcgattcagtaatgtggtgaacgagtacgtgggagcaatgaggcagcttgcatgtgagatcctggacctgttaggagaggggctagggctcgaggaccccaggtccttcagcaagctcatcaccgacacagacagcgactcactcctgaggatcaaccactaccctacagcatgcaacgctcacaaccttgaccatgacagccagtgcaagatgaagagcagcgtcagaaccaagactactagcaatggcgtgaagccgtcggcaggtggacgggtcggattcggggagcattcagacccgcagattcttagcttgcttcgagcaaatgacgtcgacggccttcaggtgcttctgaacgccgacggcaaggaggtgtgggttcaggtgccggccgatcagtcagcgttctttgtcaatgttggtgacctcctccaggctttaacaaatgggaagctggtaagtgtccggcacagggtaattgcaagctccagcagggcaaggctgtcgacaatctacttcgcagcgccgccactgcatgcgcgaattttggccctcgcagagacgatcacagccaacgcacccagccagtaccggcccttcacctgggccgagtacaagaagacaatgtactcgctccgcctgagccacagccgcctcaacctcttccacatcgaccatgatggccacagcaatgtcggtgaaggagaagaatag

SEQ ID NO: 99802 - DNA, 2050 bp, Zea Mays
ccctcggccccacgcctccatggtcaccgccacgacaaccccgccgcaatgctggcgagggctccccgccttggcccgggcacctccacccctctcctctcctcttcggccgcgtgccgtagcggctgcggctcccatctatcctctcaggcgccgcatcgctattactacaaccagaggaaggcgaggcacactggactgttcccccaggtgtacgctggaaaccgccggccctggcttctaccctctggggctctacgaggaggggtctaattctctgtcgcggtctcccctgtctaccttctttggtatcatggcgccggtatttgggagctccagcggcggtggtgcaagtagggagaaggcgtccgggcgaggagcagcagctgcaattgaggatagctccattgacattggtgacttcttcaagggccctctacctgggaagttcctgaagctccttggttttttggccttgtctcggcttggtgtgtatatacctttgggtggggtcaaccgagaagcttttgctgggaaccttgaccagaacagcctgctgggcactttagattctttctctggtggaggcattggccggcttggaatttgctcccttggcattgtaccatttatcaatgcacagattgtgtttcaactccttgcgcaactctacccaaaattgcaagaccttcagcggaaagaaggggaagcaggaagaaagaaggttcttcagtatacaagatatgcttctgttggatttgcaattgttcaggccattggacaagttctttatctccgtccctatgtgaatgatttcagcacagaatgggttctaacatctgtgacattattgacacttggatcggtctttactactttcattggtgaaagaatatctgatctgaaacttggaaatggaacatcacttcttatatttacaagtataatatcatatttgcctgcatcatttgggaggacagttgcgcaggcatttcaagatgggaattatgttggacttctcacaatcatattgtcattcttactattagtccttgggattgtctatgttcaagaagctgagcgcaaaatacccctcaattatgcttctcgttacagcagtcgaactggggaacttcagcgatctgcatatttaccatttaaggtcaacagttctggagtcatgcctatcatattttctacatcttcactggctttgcctggtactttggcacggttttctggcttagactttcttaagaaggctgccatagcccttaatccaggaggtgctctctatcttccaactaatgtattacttatagccttcttcaactattattacacgtttctccagttagatcctgatgatcttagtgaacaattgaagcggcaaggtgcttcgataccacttgttagaccaggaaaaagtacagctgcttatattaaaacagttcttagtcgcatatctgtcttgggatctgcatttctggctgtgctagctgctggaccatctttagttgaacagacaagtcacttgacagcattccgtggatttgctgggacttcagtgcttatccttgttggatgtgcaacagacacagctcgaaaagttcaagcagaaataatttcccagaaatataagaatattgagttctatgatgtcaaccgttttggccaatagttgatctcactggtcattcttttcaacctgtacttagatttttatttgtgtaattgaatatcggatccgtaaggccgtaactaagtatttccttgttgttcacttggatcttaatttttttctactgtgtatagtactgaaatctgtactcaaggtacacaaatcattcatctgtacgctaacatgtcagagcactcaaatcttaaacctatgaatgcttattgttattcacagttcttgttgctgatgatgtaacatgtattgttacattatgattcccttccatatttattgtgttcaactttattagatcaactgaagaattggcttagtcgtcatgatttctattagacaaggtgagatgtactg

SEQ ID NO: 99803 - DNA, 372 bp, Zea Mays
ctcttgcattgtctgaatgcaggcacctgatctttgctttgggaaggaagggatgtagcagcacggccaccacacttttaaataaaggaataactgattaacaatgatgttaaacaggaagagtcaagtctagggaattattgcattctaatctttcatggtagttgaactgtttagtttggtgggctgagatgtctatcttttgtctggtcatgaatgttcctttctaccgttgcattttgattatactatgtcaattatctttcttttatatcctgtataaactatatgcttcccttgttatgctactttcaagggaggtgctgccggattttgcaatactttctttctctatgtgttgcataagttttg

SEQ ID NO: 99804 - DNA, 478 bp, Zea Mays
acacccgatagtgatgccagcggcgcaaacgcccagggagatggcgccatggttgaagcaaccccggccgatgctatggacgattctgcgggagtcgggcgctacaaccatggtaaagaaaccagatttacttacagtggtgaagcagaggctctcaacgggactccagcgacaaggccgtggaggcgaccggacgacgatagcgcgcgggtcccgccgaggtactggccttgggtcacggcgaataccggcgtccatgatattcaccagtggagagggagatctcacatcggatggtcgatcccgcgctaaagtctttgttagacgcagtcctctccccaatcgctcagaggacgaacagccaggctcggctttggtccgagcttccggcggcaatggtgaaataggctgcggggacaactttcttcctttcttgtccactctctctcggctcgcacagctcaacgatagtagatga

SEQ ID NO: 99805 - DNA, 85 bp, Zea Mays
gtttggggattgattggtggtgagttgcactcttcggaccactgcatacacctagttgttgcagattttggtcgcgatttgagaa

SEQ ID NO: 99806 - DNA, 715 bp, Zea Mays
gctccagcgccgcacgccctacttctctccctggcagccgcgccctggatcgcgtgctccctgccggccgagctccccatggcgcgcccctcccttgctcctccagctcggcgctcctctgctcgccatggctggcgcgcgttctccctacgcccggccgctcctctctttccctctctgctcgccgtggagcttccttgccggcgctcctccttgttcagctctccagcgcgagttccgtcatcccctgtcgtgaccctgcagtggagctcccctgcagcgcgtcccttgcttcccatgtcacttgccctcttctcccctctgctcgctcgagcccagccgagctcgcctcagcccatgtgttaggagaggtgagtgagtctctggtacgtgaggctatgtccttgggtcactagtcagtggatcgtatgtaatagtataagtacgacgatggttgccttgtgcttgggaggaaaaactacgaagaaacggaatacagataagctctctgctgtctccttcccaacctaacctatctctctctcgcctacctccttctcctcttctccaatccaatccacttgtgatctatgtgctaacaattggtatcagaggagtcgatcctcgatctagttccatggatcccgctgctctcaagtttctccttgacgagatcggcaaaaagttcgacgaggccgagtctcgactcaatcgg

SEQ ID NO: 99807 - DNA, 672 bp, Zea Mays
ccatctctctctcgtggagctccctggcgagcgcacctgctccctctgccctctcccctgcagctctctcttggtgcccagaatcttttgcttacatcccctggccgtgtgcccctgcgccggtcgagttccctgcgctcgcccatgccgcgcgctcctccatgccggcgtcctctgctcggccatggcgtggatagcagacgagcccctgcttttctttccctccctctcttctctacccctgttcggcctccaactccagccatggtggccaccggatgcgttcctcccggccccggcttcccatggcgcccgctcggtccctgctcggattttatccgtaccgagctccctcgccttcaattccttggccgtcgcacctctcaaatcgcccggccgtgcgctcgccttcaagctcgctcttcggcgtcgcacagcgcagcttggctcgacggcatggagagtctcgtcctcgcctcctcctgctccccttcgcgaactccctcagcgccctccgtagccgtgccgagctccttgcacggagccgcgcgctcctttgctgggccttgtccttgtcttcttccctgcgcgacctgccgatgctccctccccagctgcgtctgtggtcgtcgagcatgtcagctgtcgcgggctcacctcacccagctatag

SEQ ID NO: 99808 - DNA, 600 bp, Zea Mays
atgacggacgcggctgcggtggcgcagagggctccctgcgcctggcgaagaagattgatggccacgacgtggaggattggtagctgtggcgtggagggttatcctgcagcagcacctctacaggttgggccaccatggtggccgattgttgcggattggttgatttacgcaggatatacctgcaagcaaggatggttctttacgcaatgtattagtgatcctgagttaagtgtgagggcaatcgttgcattaaatcttcacaattatgcaagtggaagaaacccttggggaaatttgaagcctgaatatttggagaaaagaggatttgttgaagcccaatcagatgatggtcttcttgagatatttggactgaagcaagggtggcatgcatctctcgtgatggttgaacttatatctgccaagcacatagctcaggcagcggcaatacggatagagatcaaaggtgggtattggcacgacgcgttcatgcaaatggacggggagccatggaagcaaccacttagctccgagtattcaacatttgtggacatcaagaaggtgccttacccctcactaatcatcaatggtggagaccgttag

SEQ ID NO: 99809 - DNA, 228 bp, Zea Mays
gagaacctaaccactattctaggaaagaggacgtgtctggctgtggagataggcctcgaagacccaccatttgtaacagctcaaaccaaaattgctgagaggattaagaaactagaagatggaatggatgctcaagtggcttatgggtttcaccaattacgtgatgaaaagccatttcttgcaagtggacctttatccaataagggttcttactcatttttcacttaa

SEQ ID NO: 99810 - DNA, 1223 bp, Zea Mays
tccttcaatgaatatgtgaatatgtccttaatccttcaatgttcttggtacaataaattcagtgtctaatataataatttagtgtctgatataattaagtataataacttcttctgggaccatcacttcttctaggaatcaatgcaaccagaaggtggtggcttacctgagggaggtgtgctgcagcagattgaaaaggattttggctcgtttactaattttagggaagagtttatccgctcagccttacaactgttagggtctggttgggtttggcttgtcttgaagagaaatgaaagaaagctttcggttgttcatacacgaaatgctatctccccacttgcttttggtgacattccaatcatcagcctagacttgtgggagcacgcttactacttatactacaaggatgataagctaacatatgtcacaaactttatggaccatcttatctcttggcatactgtcactctacgcatgatgcgtgcaaagtcttttgtgaaccttggtgagccaaatatcctagaggcttgagctacagatacaccttagttatcatcatgaggcattcttcggatacatcggaacaaatcctgctggaggaaccagagagttggaaaatctcatgtctcacaagaaatgcttatcaccccaatgtcatatacgccaagataagctgctgggatttcaccattgcccttggatattgctataaggaaatcactagtcaacatccagtttgaagacatgcaacaaaacaactctagaagctatggagttggtagattctggagttggcagtgaggcagtgatccaacttgggctttgaagccatggtgctttctctagacaactattatgtctatagtgttgttagaataatcctggttctgtgttttcataacttcatcatgctagtgttctgttgtagcggaacgcagaatggaacgaacgatattcttgttttactggttgagcactacacgacagttgtttttctagggtgttctggacaaagaaagcttgtaccttaaaataggaggatacaagaagctggagtggttgtctgaaggcttttgaactgcttgaagcattagggtagctctggagcttttgtgaatgatctagctagctatctgtaaatgatctagttgtgaatgatattataattctgatgcttttgtgaatatataattgtgtttgtgtatactgattaactgtgt

SEQ ID NO: 99811 - DNA, 1407 bp, Zea Mays
actcaaaaacacaaacgcaagcacaagcaaaacacaaagaagctcaagaaagctgaggcaagcccagaagaagaaaaaaaaaactagaaggagagatgggaagaagcgaaggcagcacaagcccagcggctgggggagccgcctgcgcgtgcgcggtctgcggcggcgccgcggtggtgtactgcgcggcggacgctgcggcgctctgcagcccctgcgacaccgctgtgcacgctgcgaacctgctggcgtcgcgccacgagcgcgtgcccctttccatggtgactgctgcatccggcgtgtacgacgacgacctcttcgcgcccgacgacatcgacgcggcgtcgtcgtgggcgtcggcgcctgcgcaggggcagggaagcccccagaacgggagctcgtcggcgagcttcaccaccggcgacagcggcgcggagggcaggggcctgttcgacctgctgtccgacgtcgacttcgctgcctgtgtcacgggcggcggcggctacctgccggacggcgtggcgcccgtcgtccatcacggcgctgcacctctgtgggcgcagcccggtctggccgccgccgcatggacggccacgtggtcgcccgctgtcgtcgtcccgggcgccgccgtggtcgccgcggcggcggcggagcgggaggcgagggtgcagaggtaccgcgagaagcgcgagaggcgcaagttccagaagaccatccgctacgcgtcccgcaaggcctatgccgaggcgcggcccaggatcaagggccgctttgtcaagcgcgccgccggcacctcctcctcctcctcctcgggtgccggcacatcggacagcatcgacgctgctgccaagttctggctctccttctccgacgacgccagggacggcttcttcgtggacgccggggcctacggggtcgtgccaagcttctagaaagtttgtgccttgaaaatttaggggtcacactcgcatcacagcgggcagcgcttctgggcttctggcggtggcgttcgcccagtttgaagcaagttaagcaaccgcccttctcgtttgtgtcgtgtcgtctcgtcattcatgtgagcagcatccgtggtgaaattccgccatcgctatttttaaatgatggcgcggaatttcgatgggtcatcaccagttggtgaacgaactaggggatttattgtgtcttgtaagatacaactttactgggttgtctatcaaattctgcgttggctcatcgtcatcgctttactggggctaacaatatagttgtggtggaaatctgccatccatgcttccatagcaagctcttagatgatcggaataaaaggggattttgatgggccaatcaggaagtgggtttggttaatctatatatggagcatatagcttatgcagctgttcatccaca

SEQ ID NO: 99812 - DNA, 290 bp, Zea Mays
cggagaggtacttaggaaacaacctgagtcccctaaagtatcacaagatcatcatcgggataacatcatcgtatcataatgctcacatcatgtttgttgattaaggtaaagcaatagcataaagctaaccataataacccaaaaggtaaacaaggataaggtaaatacagactagtcaatccttaggtttcaataaagtaaggcgggacgatgaattataaagtatgtaggatagaataggtcagaggacacttgccttcaccaggttgttgctcaggaagatcttcggc

SEQ ID NO: 99813 - DNA, 149 bp, Zea Mays
agctctcggtcgtctctcgagtaaccagccaccacacagacgcaacatataggattaggggtggggtggttatgttgtgttccttacttgtaacctttgtaacctatgtacatgtaacatgttggtctattgcaagattaggccttggg

SEQ ID NO: 99814 - DNA, 1177 bp, Zea Mays
atagtttaattttttgtgttcctatatttcttatctttatttggttctcactaggtggatttggaacttgcaaaggcagaagctgacaaagtagaagacgatgaagagcttaggaagaagctgtggcttaaggttgctaaacatgtcatcgagcaagagaaaggtgtcaagagagagaatataaagaaagcaatagaattcctttcggagaccaataacttgttaaagattgaggatatcttaccattcttcccagacttcgtattgattgacgatttcaaagaggaaatatgcaaatctctgaaggactacaacagccagattgagcagctcaagcaggagatggatgatgccacacgtggggcagataatatcagaagtgatattggtgccctcgctcagagatatacagtaattgaccgtgagcaggattgtggggtttgccggcgcaaaatattgactgttggagggttgcaccaggtagggagaagctatacatctgttggacacatggcccccttttatgtgtttccctgtggacatgccttccatgcaaattgcttgattggacatgtgactcgttgcagtaaccaggtgcaagctgagagaatattggaccttcagaaacggcttagcttgatggacaggaaagcagcaaaagacaatggggcaagtgttaatggcgaacctattacgagcacaaccccagttgataagctgagatcacagttggatgatgctgtagcaagcgagtgccccttctgcggtgatttgatgatcaaggagatttcacagccgttcattctcccccaagagtcggatgaaaaggcatcatgggaaatcaaacctcaaccaacgcctcaaaagattctcccgatgaccatgtctatttgatgctacggacagtacagcctaagatggatttggttttaaatttttatattgtttttgacttttgacactccttttgaccatgttttaatcctttttatgttgtggtatatggtattcaatatcctactgctgttgggttatcttgttttatatttacccaacttgtaaccctagaacaatgtagtcatcaatcgcttaccttgtggttgtggttcttgtattggatgcatcgtgttggaacatctcggtacacttgttatttgggattgtttttttttctgaa

SEQ ID NO: 99815 - DNA, 2017 bp, Zea Mays
atcccatatctcactaccaaaagcatccgatcccacacatctgctaaaaggatggctgccccaacactaactgcagatggtcctcgcctcggccagcaggagatgaagaagatgtctccctccttccatccaactctgtggggagatttctttctttcttacgaggctccgaccgaggcacaggaagctcaaatgagagaaaaggctgcagtgctaaaggaagaagtgagaaacatgattaaaggttcacatgatgtgccagaaatagtggaccttattatcaccctgcagcgactaaatctggactaccactacgaggatgagataaatgaaaagttgactgttgtttacaaatccaattatgatggtggtaatttggacttagtttcacgtcgattctatcttctgcgtaaatgtggctacgatgtttcatctgatgtattcctaaaattcaaagaccaacttgggaattttgttgaggctgataccaggagcttgttaagcttatacaatgcagcattcctgaggattcatggagagacagtgcttgacgaggcaatttcttttactatgagagttcttcaagatagattagaacatttggaatcgccattagcagaggaagtgtcttctgctcttgacacaccactttttcgaagggttggaactttggaaatgaaggattacattcctatctacgaaaaggacgctaaacaaaataaatcaatattagagtttgcgaaactaaacttcaaccttttacaacttcgttattcatcagagctaaaagagtgcacaacctggtggaaagaacttcgcgtcgaatcaaacttgagtttcgtcagggataggatagtagaggtgtacttttggatgagtgggggatgctatgatcctcaatattctcattctcgaattatacttacaaagatagttgctttcatcacgattctagatgatacccttgactcacatgctacttcttgtgagagtatgcaacttgcagaagcaatcgaaaggtgggatgaaagtgcagtctctctactcccagaatacatgaaggatttctacatgtatttgttgaagacattttcatcgtttgagaatgagttaggaccagacaagagctaccgagtgttctacttaaaagaagcggtgaaggaattagttcgggaatataccaaggaaataaaatggcgtgatgaggattatgtgcccaaaacattgaaagagcaccttaaagtttcactcataagcattggaggcactctggtgctatgttctgcgtttgttggaatgggtgatgtagtaacaaagaagatcatgaaatgggttatgagtgatgctgaacttgttaagtcttttggtatatttgtacggctctccaatgatattgtatcaaccaagcgtgaacaaagagagaagcattgtgtctccactgttcagtgttacatgaagcagcatgaaataacaatggatgaagcatgtgagcagataaaagaacttacagaagattcatggaagttcatgattgaacaaggccttgcactaaaagaatacccgataattgtgccacgaacggtactagagtttgcacgaactgtagactacatgtacaaggaagctgataagtacactgtctcacatacaatcaaagacatgttaacgtcgctttatgtgaagccagtactcatgtgaaggttctttattgttatcttggatcaagagaatatattagcatgaagcactactccaaggaggcaaaaataactacatgagctatatatattaattgtatagcttaagtaatatcaaggggtatggtggtatatatgtattactcaaataaaaacgacaacaaccatcctatagttgttgttctcaggcattgtaggaaaatacatatgttgccatctattgtattgtgctatgtttccttcagctaaaataagaatttttttctctttaatagatgtgtgttgtactacatctagatattataattcatcatcattgt

SEQ ID NO: 99816 - DNA, 1967 bp, Zea Mays
atgcatctcatatcacactaccaaaagcatcccacacatctgctaataaggatggctgccccaacactaactacagatggtcctcgcctcggccagcaggagatgaagaagatgtctccctccttccatccaactctgtggggagatttctttctttcttacgaggcgccgaccgaggcacaggaagctgaaatgcgacaaagggctgaagtgctgagggaagaagtgagaaacatgattaaaggttcacatgatgtgccagaaatagtggaccttattatcaccctgcagcgactaaatctggactaccactacgaggatgagataaatgaaaagttggctgttgtttacaactccaattatgatggtggtaatttggacttagtttcacgccgattctatcttctgcgtaaatgtggctatcatgtttcatccgatgtatttctaaatttcaaagaccaatatggaaattttattgaggtagataccaggagcttgttaagcttatacaatgcagcatacctgaggattcatggagagacagtgcttgatgaggcaatttcttttactacgagatgccttcaagatagattagaacatttggaatcaccaatagcagaggaagtgtcgtctgcccttgataccccactttttagaagggttggaactttggaaatgaaggattacattcctatctacgaaaaggacgctaaacaaaacaaatcaatattagagtttgcgaaactgaacttcaaccttctacagcttctttattcatcagagctcaaagagtgcacaacctggtggaaagaactccgcgtcgaatcaaacttgagttttgtgagggatagaatagtagaggtgtacttttggatgagtgggggatgctatgatcctcaatattctcattctcgaattatacttacaaagattgttgctttcatcacgattctagatgatacccttgactcacatgctaattcttatgagagtatgcaacttgcagaagcagtcgaaaggtgggatgaaagtgcagtctcactactcccagaatacatgaaggatttctacatgtatttgttgaagacattttcatcgtttgagaatgagttaggaccagacaagagctaccgagtgttctacttaaaagaagcggtgaaggaattagttcgggaatataccaaggaaataaaatggcgtgatgaggattatgtccccaaaacattgaaagaacacctaaaagtttcactcataagcattggaggtacactggtgctgtgttccgcgtttgttggaatgggtgatgtagtaacaaagaagatcatggaatgggttatgagtgatgctgaacttgttaagtcttttggtatatttgtacggctctccaatgatattgtatcaaccaagcgtgaacaaagagagaagcattgtgtctccactgttcagtgttacatgaagcagcatgaactaacaatggatgaagcatgtgagcagataaaagaacttacagaagattcatggaagttcatgattgaacaaggccttgcactaaaagaatacccgataattgtgccacgaaccgtactagagtttgcacgaactgtagactacatgtacaaggaagctgataagtacactgtctcccatacaatcaaagacatgttaacatcgctttatgtgaagccggtactcatgtgaaggttctttattgttatcttggatcaagagaatatcaacatgaagcactacttcaaggaggccaaaataactacatgagctatatatattgtacaccttaagtaatatcaagggatatggtgatatatatgtattactcaaagaaaaatgtcaacaaccatcctatagttgttgttctcgggcattgtagtaaaatacatatcttgccatatgttgcattgtgctatgtttccttcagctaaaataaagaaaattttctctttaataga

SEQ ID NO: 99817 - DNA, 1701 bp, Zea Mays
atcccatgtctcactacataccaaaagcatcccacacatctgctaataaggatggctgccctaacacaaactacagatggtcctcgcctcggcgagcaggagatgaagaagatgtctccggcctccttccatccaactctgtggggagatttctttctttcttacgaggctccgaccgagacacaggaagctcaaatgagagaaaaggctggagtgctaaaggaagaagtgagaaacatgattaaaggttcacatgatatgccagaaatagtggaccttattatcaccctgcagcgactaaatctggactaccactacgaggatgagataaccgaaaagttgactgttgtttacaactccaattatgatggtggtaatttggacttagtttcacgccaattctatcttctgcgtaaatgtggctatcatgtttcatccgatgtattcctaaatttcaaagaccaatatggaaattttattggggcagataccaggagcttgttaagcttatacaatgcagcatacctgaggattcatggagagacagtgcttgatgaggcaatttcttttactacgagatgccttcaagatagattagaacatttggaatcaccaatagcagaggaagtgtcgtctgcccttgataccccactttttagaagggttggaactttggaaataaaggattacattcctatctacgaaaaggacgctaaacaaaacaaatcaatattagagtttgcgaaactgaacttcaaccttctacagcttctttattcatcagagctcaaagagtgcacatcctggtggaaagaactccgcgtcgaatcaaacttgagttttgtgagggatagaatagtagaagtgtacttttggatgagtggaggatgttatgatcctcaatattctcattctcggattatacttacaaagattgttgctttcatcacgattctagatgatacccttgactcacatgctaattcttatgagagtatgcaacttgcaaaagcagtcgaaaggtgggatgaaactgcagtctctctactcccagaatacatgaaggatttctacatgtatttgttgaagacattttcatcgtttgaaaatgagttaggaccagacaagagctaccgagtgttctacttaaaagaagcggtgaaggaattagttcgggaatataccaaggaaataaaatggcgtgatgaggattatgtccccaaaacattgaaagaacaccttaaagtttcactcataagcattggaggcaccctggtgctatgttccgcgtttgttggaatgggtgatgtagtaacaaagaagatcatggaatgggttatgagtgatgctgaacttgttaagtcttttggtatatttgtacagctctccaatgatattgtatcaaccaagcgtgaacaaagagagaagcattgtgtctccactgttcagtgttacatgaagcagcatgaactaacaatggatgaagcatgtgagcagataaaagaacttatagaagattcatggaagttcatgattgaacaaggccttgcactaaaagaatacccgataattgtgccacgaacggtactagagtttgcacgaactgtagactacatgtacaaggaagctgataagtacactgtctcccatacaatcaaagacatgttaacgtcgctttatgtgaagccggtactcatgtga

SEQ ID NO: 99818 - DNA, 2036 bp, Zea Mays
aatgtaagaaatacacacaaaaaaaaagtcaaatcttaaaatggcgaacatgcgagcccctagaaacgatgacaaccaagagagtgcctcctgtcctcctaacatcgattttcctccggaatcgtaacctcagaaagccaaatctcattctccggcgctcaggcccacccaagcgtcgactctcccgatccaatcggtacctcctagttcctcgccggcggtagcggcgtcgggcgaacagcggtgacttggcgagggcgcttggccggcgacaatcatccactaggatggaaggtgaggcagagaccgtggttggttcttgttctaaaccatgtgggcctctggaggactactacattccagattacattctgaagccaggtgcccaacaagtacttgttgatcatgcggcaccctgccccgttgtagtgttcatcaactcaagatctggaggccaacttggaagtagtttaatcaaaacatatcgtgagcttctcaatgaagcacaggtttttgatctctcaaaagaggctccagataaggtattgcatcgtttatatgccaaccttgaaaggctgaagatggaaggagacattcttgcagttcaaatttggaggacactgaggctaattgttgcaggcggtgatggtacagctagctggctgcttggggtagtcagtgaccttaagctttcccacccacctccagtggcaactgttcctctgggaaccggaaataacctccccttttcatttggatggggaaagaagaatccttctactgaccaagaggctgtaaaatcattcctcgggctagtaaagcatgcaaaagaaattaagattgatagttggcacatcattttgagaatgcgagttccagaggaaggtccatgtgatcctattgctccattagatttgcctcattcattgcatgcgttccatcgtgtctcaagtagtgattctctcaatatggaaggttaccacacattccgtggaggattttggaattactttagtatggggatggatgcagaagtgtcttatgcatttcattctgaaaggaagaagaatccagagaagttcaagaatcagctgacaaatcagggtacatacgctaagcttggacttaaacaaggatggttttgtgcttctcttagtcagccatcatcaaggaaccttgctcaaattgcaaaagtaaagatcatgaaaagagctggtagcctctgggaggaacttcacattcatcacagcattcggtccatcgtgtgtctgaatttgcctagtttttctggaggtttgaatccttggggcacacctggcacgaggagagcagaagatagggagttcactgcaccttttgtcgacgatggacttcttgaggttgttggcttccgtgacgcctggcacgggctggtcctgctggcccctaatggacacggcactcgcattgcccaggcccataggatccgctttgaattccacaaaggcgcagcagagcacacgttcatgagggttgacggagagccctggaagcagccccttcccaaggacgatgacacggttgtggtggaaatctctcaccttgggcaggtcaccatgctagcaaatgagccgtgcaggtccaagagcgtcaacgaccagtcgtcactgtcgccggcgcacgacagtcatggtgattacaatgatatcgctgaggaggacgaagacgagtgggaggacggcaggaggaagtttggggcggcagatacatttaagattcctgacgagattgacattgctcatttcagttgagctttgactagtgcatcgtcgtgtgcgttctgatcatacgagtatggtttggtttataaccatctcctttcttttgatttcatatatttgcgatatgattgttgcagccatgtgtaagtgaatcctaggtaaccaagtgctgcgttgctatatatgaccaatgtatgtatagattcagtggaacggtaaaaacacgcgaactctacggttttctccttaaaaataaaaaagaaaataaaataaaaa

SEQ ID NO: 99819 - DNA, 1391 bp, Zea Mays
cggcaagaccattatgtacctatactatccagttgtttatttatattttttatcttgatatgtgatcctgggtagtagttcatgctacaaaggctagtgtttcgccaacccactaaggaaagtagtgcaagtctagtgagattattgttatggcatcattctctttttaattaaatctatatctggtgagttcttaagcagataacaaattaaagaattcaggcactagagtcaaacatgatgatcatgacttgacatgttgcagggatggatgcagaagtgtcttatgcatttcattctgaaaggaagaagaatccagagaagttcaagaatcagctgacaaatcagggtacatacgctaagcttggacttaaacaaggatggttttgtgcttctcttagtcagccatcatcaaggaaccttgctcaaattgcaaaagtaaagatcatgaaaagagctggtagcctctgggaggaacttcacattcatcacagcattcggtccatcgtgtgtctgaatttgcctagtttttctggaggtttgaatccttggggcacacctggcacgaggagagcagaagatagggagttcactgcaccttttgtcgacgatggacttcttgaggttgttggcttccgtgacgcctggcacgggctggtcctgctggcccctaatggacacggcactcgcattgcccaggcccataggatccgctttgaattccacaaaggcgcagcagagcacacgttcatgagggttgacggagagccctggaagcagccccttcccaaggacgatgacacggttgtggtggaaatctctcaccttgggcaggtcaccatgctagcaaatgagccgtgcaggtccaagagcgtcaacgaccagtcgtcactgtcgccggcgcacgacagtcatggtgattacaatgatatcgctgaggaggacgaagacgagtgggaggacggcaggaggaagtttggggcggcagatacatttaagattcctgacgagattgacattgctcatttcagttgagctttgactagtgcatcgtcgtgtgcgttctgatcatacgagtatggtttggtttataaccatctcctttcttttgatttcatatatttgcgatatgattgttgcagccatgtgtaagtgaatcctaggtaaccaagtgctgcgttgctatatatgaccaatgtatgtatagattcagtggaacggtaaaaacacgcgaactctacggttttctccttttgttgttaccagttcaattgaacaatatagcgggtgtttggtttgggtaatcacgctattcaaaatattcaaaataaggtgatacattatgggtctattatgtaatcactccattctaaataagttggtgcatcata

SEQ ID NO: 99820 - DNA, 353 bp, Zea Mays
tgtatcgaagcgtggggaagacgtggatcacgacgagatcagcttccacgaggcatacaccttccttcggccatcgaatcgaggcgtgcaactttcttcgcagtcaaccttgcacgttggggagttagttgtcagggcagctgcgcgaggaccatgatagtattcctaaatggtgacggttatgttggagattgtatatgtccccattactttgtcgtgtttaaattccttcctccccttgtgtttgtggatgatgcggattcgctgacctaagagaaatgatatagggtttcatttgcactggcattgtttgatggcctcactgtctggattctgccctcggtcgcaatttc

SEQ ID NO: 99821 - DNA, 110 bp, Zea Mays
atcaaatatatcaagcttcgaattaaatcaaaccgtgtcacaggtgccgtcgacccattttatatatcgctaaaatctggattcaaaaatatatgcaaaattctttaaag

SEQ ID NO: 99822 - DNA, 205 bp, Zea Mays
atgaataccatagccatagcatccgtataccaacatctcatgtcacgtggaccgccaataaatgacgtcgacaacatagttcgcttcccaaccttctctgctctaatatctccatctaacatctatccaccaaaccctggtataggtctgcccttaaccgatcctgattcttacgtatgaaatctattggtcacttgttctcaaa

SEQ ID NO: 99823 - DNA, 1729 bp, Zea Mays
cgcactaccacatgccacacccattactcgccactacatactcttgcatcgcatgcccggccgcccctcactcactctttctctctccctccccccctctctctctctctctcgctccaccacagctatctactatacctttctagcttagctacatacctaactaaactgccaagaatttggccaaagcaagatctcaatcccatataacacatcgatcggaccccgcccatgtatctgtagatagatagatatagatcgatatggcagatcaccagatgatccacccaccagctgctgccaccacgggcagcaagactcacggacatgccggcgattggtggaccacgacggtgtcgtgctcgccggaccagctacctgatggattcggcggcgccggctggtcgtctgctgcagctactactgcagctgaaggcaacaggtccaggtccggcaacgcggcagcctcctcggagtctcccggctccatccactcgctccccaccgccggcagctccataaccttccaggagtctgcagtcggcgccgccgtcggcgatcaaggcgtggtcgccatgccgccgcacccagtggcgtctggtcacgccggcagcagctggaaccagccttcttactacttcgaccagcaggctcatcacctcagtctgaggagcccctcatcgaataacaccagcacgatggtaccggactcccaccacgacgatccaaaccaccagttcctgtccaaccttgggctggagctgctctcgtcgtcgccgacttcgtcctccggcgggttccggacctcctcctcactgctcagaagcctcacggagccatcggcagttgccacgggcttccagcagtaccagcagcaggcggtgaaccaagcgccgcctgaaagcatcagggacgacgctctgcagttcgttaatagcacgccgttttggagcgcctctgccgtgtttgcttccgcggcggagggggctacaagccgcttaccagcgagtgccgccggaccaccgtccgcgcagtctatgccggcgaattttgcagtcaagagcgcattattagaaggtgcccgcggagactccagcagcatcactgcgaataagacgagcaccgatccaacgccgcggctaaaaaaatcgaggacagggacaccgtcaccattgcctgctaccttcaaggtgaggaaagagaagcttggtgacagaatcacagcgcttcagcaactagtctccccttttggaaagacggatacggcatcggtgctccacgagaccatcgagtacatcaaattcctgcacgaccaagttggttcactcagtgttccttacctaaagaagaataggcagcaagaagtgccccctcacaaggtattgtgggacggaggtggtgaggcagcgggagcaaatggagaactcactggccgagggctgtgcctggttccgatatcgagcacctttgcggtggccagcgagacgacgacgacgccgccgctcgacttctggacaccgtttggaggccctgccttccggtagcagacgtgtagtatcatccgggagctggcttttactaattacaataatttgacagttgatctagctgtagtcacaatagatcaagtcctaactcacatcgtataatgcagttactagtgatcatatatatagcaatctatatatggctgacgttatggagtatatacaacaaaataaactttggc

SEQ ID NO: 99824 - DNA, 335 bp, Zea Mays
gagccgtccctatcgcttccgtcgtgtccaccattaacgagcgcagagagatttgtgtgagtgccgctgcggttagattctatcctggtcgtcggtccggcctcggagggagggcgaagggctaccggtgtgcagcgaacctggagataactccctggagcaaggagatggacggactcgtccaaattgctcgtcggtcggatgctgcggccacggatcctccatgcggcatggtcaaccacgtcgtcgactccatagccgaagagcccgttgctgaggatcctggtgagcagcagattgaagtagctgagcaggagctcattgaaggcaagttg

SEQ ID NO: 99825 - DNA, 153 bp, Zea Mays
atggcggcgacgagcgtggtgagggggacagatgcggtggctgcgacgggtgcggtgcaaagggcgggtgctgcgatggcaggcatggcgatggaggcagatgtggcggcgaaagggcgggtgctgcgatgtggatctaactcaagctactag

SEQ ID NO: 99826 - DNA, 924 bp, Zea Mays
ttttcagtttctttcttcttcatttcatacgagggcctcaatcgtatattggattagacagaaaaggctaatcttactacattagtctgcaaattacaatcattttctactgctgccgtggcagcgtcgggagtcgaaactaccattaggaaaccctatgaggctatgacacctaattagcgacaattgtttcagcctgcaatcatctgcacaattaacataaccaaatcatatttgtttgtttagagaactaagttcagaacttcagatcaagatgtaattgctttgctgttatcgtctatttgctacattcaggcagactgctgctgctcctcttcggggggctctgccgcttgcccttgcggcgtctgccacatataagtcactgggtgaccctgctggccaccatacatcatacctgctccttgcacctgctgagctggcacatagtaatatggatgagaaccatgatcagctggagcccccatagcaggcggcaggccaactatgggattatgtccgagcccctcctctttcatttcatccctcgggattatgtccaccaggaagtcatatatatcagtcctggtgatggcagctgcaatgtcgttcttctgcaaggtccggcgcttgttctcctctgtgtgcatccatgacctcaatgtcagctctaatatgaatacctcgcatgccttcgcaaacacaacaggagcttctgcagagatcatccgcacatcctcatcagccttcattatcttctttatccttgcaagtggcaaggtgtggatcttgaagtcatttgcttgcttgatctcatccatctgggtagtccagaactccctgagctgttgttcctgctgttgctgaagttgttgatgaaattgctgagcctgctggtacaccatctggtgctgagcactgagt

SEQ ID NO: 99827 - DNA, 1394 bp, Zea Mays
ccaaaccgcccgctccgatcggcggacgcacacgcacccactgtggaagaaccgttgagctgagccgagcagggagaaggacgcgagagcagcatggagacggcggagaggggcatcaccgtgtgcgtgaccggcgcggggggctttgtggcatcgtggctcgtcaagctcctcctctccaccggccgctacaccgtccggggcaccgtgcgtcatctcggtgatggcaagaatgcccatcttaagacactggaagatgctgaggagaggttgcagttggtcaaggctgacatgctggactatggcagcgttgcgtccgcggtcgccggctgtcagggtgtcttccatgtcgcgagccctgtcccctccggcaaatcctccaaccctgaggaagatgtcatagctcctgctgtaactggcacactgaatgtgttgaaagcttgctatgaggccaaagcgaagagagttgttgtggtatcttcagtggcggctgtgttcaataatcctgactggcctaagggcgaggcctttactgaggatagctggtcagatggggaatattgcagaaaaaatgaggaatggtatttcctttctaaaacattggcagaacatgaggcttttgcttatgcagccaaaactgggctagacattgtaactatttgcccatcattggtaattggacctttgttgcaacctgcagtaaatacaagtgttaaagtcttcctcagttatatcaaaggagatcaggagatagttaaagatggacccaaaaatcttgtggatgttcgtgatgtcgctggtgcccttctgttggcttacgaaaatctgcaggcatcaggacgatacctctgcagttcaccagcaataagagtctctgatattgtaaacatactgaagaccgaatatccaacatacacttaccctcaaaaattcgttgaagcggaaggtagcaacacatacaacacggagaagcttcggaagctagggtggacctctaggcccatggaggacaccctccgagacagcatcgaatgctacagagctatgggcatcctgaactgagcttcccttcagctttgggctttggctgctgctgctgctactacttttcagtttctttcttcttcatgtaaacagtgaatcagaaattcagaatacgctggtataggaactagagaagtggatcatggaagatgctgctgctaaaaatgaatttggatactatccatcatttgtgcctgccggattgagggcaaattaattaagtacttatatttgtaaatctggggccgtcgaactgaaccaacaatgaagaggtgaagaacacatcgaagtggtagatgagtgcattgctgtgaatagcttatagcgggaagctctgtttcttggccaaa

SEQ ID NO: 99828 - DNA, 399 bp, Zea Mays
atgggctggacatgtgctgcaggaaaccgagcagggcgcggtccagtgaaggaaatcgacgacgaggtgtgcttggtcggacagggagaggaaacggaggtggagaccgagctaggagtgggcgcgagctgggcgagcgcggacctaaggaggggcgagcaccagggagaagagggcgctcgacgcaggggagatggccgacgactccatggatgccaggcggagaagaggacgcgtgtgggaggggatccggcgccaggaacaggaagcggggcacgcagggagctcgggcgagctgcagagatggggctggggcaagcggcatggtggcctgaggtagtggccggtgtgagctcggtgctcggcggccagaggagtatgcacgcatgtgaccgatag

SEQ ID NO: 99829 - DNA, 125 bp, Zea Mays
tttttggatttttataaataaaattatggagagaagcaagttcatttgttttgtaaaccagtttttaaatatgaatttctacagaaaaacttttccactaaaacataccaacatatagatctaac

SEQ ID NO: 99830 - DNA, 1600 bp, Zea Mays
agtgaggacatggatggcaagtaccactccactctggggtgacttcttccttcatcatgtcccatgccctccacgacaatatttgattatgaaggataacgtcgaaataatgaaggaggaggtgaagaaaatgttactggatgttggatcctctgatttgtctcataagttagactgcattgatacactagaacggcttggactggattaccactataccaaggagattgatgaattaatgtgcaatgtcttcgaagctagggatcaagatcttgatcttactacaacatcacagcttttctatttgcttaggaagcatggatatcatatttcttctgatgtatttttgaagttcagagatgataaaggagatatcgtaacaaatgatgcaaggtgtttactgaggatgtacgaagcggcacatgttagagtgaacggtgaagaaatacttgacaatattctcattcacaccaagagacaacttcaatgtattgtagatgatctcgaaccaacactgcaagaagaagttagatatgcattggagacacctcttttcagaagactcaacagagtacaggccaggcaattcatctcaacatacgagaaaagcactacgcgtatcaatatgctcctggagttctcaaaattagacttcaacatcttgctcaccctatactgtgaggagctaaaagatcttacgctgtggtggaaagagttccaagcacaggctaacacgacaatctatgcacgagataggatggtggagatgcatttctggatgatgggagtcttctttgagccccaatactcctattcacgaaagatgctcacgcagttgtttatgatcgtgtctgtactcgatgacttgtatgacagccattgcaccacagaggaaggcaacgccttcactgcagcattacaaaggtgggatgaagaaggcgtggagcaatgcccaacatacttgaggactctgtatacaaatatacgtgccaccataaaagccatcgaggaggacttgaattttcaaaacaacaaacatgcaaagttggtaaaaggactgataatcgacatggccatgtgctataatgccgagacagaatggcgtgacaagaaatatgtgccagccaccgttgatgaacatctgaaaatttcagcacgcagcagtggctgtatgcacttggtgagccaggggttcatttcgatgggagatgtggcaactagcgaggccctcgagtgggcctctacctatcccaaaatcgttcgagctgtctgtatcattgcacgcctcgctaatgatataatgtcgtacaagcgagaagcatcaaacaatactatggtgtctacagtgcaaacttgtgcaaaagaatacggcaccaccacagtagaacaggccatagaaaagatcagagagctgatcgaggaagcgtggatggacatcacccatgagtgcctcagacagccacagccgaaggctcttctagagagggcggtcaacctggctcgtacaatggattttctgtacaaagatgcggatggatacacagattcacggagtatcaaaggcatattggattcattgtatgtgcatctaatagactaa

SEQ ID NO: 99831 - DNA, 116 bp, Zea Mays
gcctgaaaaaggaaagaaccataaatcgatggtttataagcaaaatttggagaaacaatacaaacacaaggtgtctcacaactgttttgataaatgaaactaatagttcgtcgtcc

SEQ ID NO: 99832 - DNA, 1004 bp, Zea Mays
gcgaggcgatgtctagtcagcacagaccagactatgattggaggatctcacctattgaaccacaggttgtgtatgcaagtggtggaaaagctcatggaaggtgagggttcagcgtggaggttcatcgaggcctgctgctcgtagctcccgtcgctccactcaagatccagcagaagtggagcaactacgagaagaacttaggcgacatcaggattacttgaagcaacaagctgcgcaacgtgaatattatgctacacagattcaacaacagcaaacactcatacaacaactagcacaggcccaagggatacacgtcccgatgccccctccaccacctcccgttcattatccttggtcttcacctccacctatacctacatatccatctatcgaacatcagaccccttcagctaccttgtcgatgcatgaacaagaagacgggttagactttgtcaaaaccctcttcactagtggaggtatcgaccatcactcgtcactgtaacccgatggtgatcggcgaccgtgagcttccatgttattgtgttctgatacttgagacttttattatgactatgtatgagatattgtctcttattagtactggatgatgagatgtgtcttattatgactatggatgagacttttgtgatgtaattgatgagactatggatttaaatattgttatgagattgtgtgtgagatgttttatgtgaaaatatggtgttctatataactgttgatatatttgttatgttgtggaatgtggtgtaaaataaaaataaacagcatttgtaatgctggtcaaattaacttcctagaggcttattgggtcgtaggaagttagccagctaactttctagaggctacagtcagccgtaggaagttagccagctaacttcctaggggctacggtcagccgtaggaagttagtcgtaggaagttagtcagctaacggtgctgacggcgtgaagctactaacttccgagaatctactaacttccgag

SEQ ID NO: 99833 - DNA, 832 bp, Zea Mays
gtttggtcctaccctggtgaatttaaaagcaaagatgctgctggtcaagttcgtggttcccctaatgaatttcctgggattggtgctacatctcctcttctttggttaactagagggtttgtgattctgtctggtccgacaatcccaattatcggtgaaggcgatgaagaggccaatgacagatatgtggaacaactagtagtgcaagtgacccaaacttcttcagtgagaggtagatttgtaagaagtataatcacgcacactaccaaggactacacttttaattgttgtaccaggatagcaattttaattttgcatatgtgatattagacctgcttgatttggagtgcctttaccattaaactgacttgtttgcttctcgttgttttatgcaagtcttcattattttctgtggaaatattctctatgttctcatgatttaattttctgcttatttttgttactggttaatgacttttactaatttgcgttattgatcttatggtttgtcctttttctttttgcagtcagaccgattcttcaatgccttgaaagcattgtctcctttggtaatacttccttttgagagccatgggtactctgccaaggagagtatcatgcacgtcctctaggagactgataggtggttgcagaactaccgtgtaaatggtactagcaaggttgactcagtgtcagaggctaacagtaaaaataaaacattgtcagctaatggtggcagtgtagcccgtgaaggtctaaaccctgaggaactctcatcattaccaagatcgcttctgtggtaaattttttccttggttgctgcttctcaaga

SEQ ID NO: 99834 - DNA, 1097 bp, Zea Mays
acaacgcaccagctcgccatagttgattcatacacaatacaagcatcctctctactacgttcagggtagatagaaatggcatcctccagcttttatcttctcagcgttcttctcatcgtgatcgcttcttgcgcctgggctacggatcctagtcctctccaggacttctgcgttgcagacaaagaatcgcctgtacgtgtgaatgggtttccctgcaaggatgttaaggatgtcaaggtcgacgacttcttcctagcagccgacctcgacaagccaagggatacgacgatgagcaaggtcaagtcaaatgtcacattgatcaatgtgatgaagctggccggcctaaacaccttgggcatctccatggctaggattgactatgcccctcaaggacagaacccaccacatacgcatcctcgtgccactgagatcttaactgttcttgaaggatcactctatgttggttttgtcacatctaacccagacaacaaattcattagcaagctactcaacaagggagatgttttcgtgttcccacaaggtctaatccactttcagttcaatccaagtcatgacaagccagcagttgccattgccgcactcaacagccaaaaccctggtgccattaccatttctaacgcagtatttggttcgaaaccaccaatcgcggacaacgttcttgccaaggcatttcaggtggacaagaaggttgtggattggctccaagctcagttttgggaggacaaccataactaagtgaaggaggctattgcccttgtttttacacaccgatgtaataagtaacaacattgttttcattcatttgtttgatgtatcaaactactatataccttttgccatacatatattctgttaaaatgtcaaatgaccacagttataaacgtgaaatcttatattgattgattatcttcattgatatgtaatggatttcaactaatatcacatgaacacatcatgattaaaacatatcttgatccatttaactagagttaaagtaggatgacatgaaatttcgcatagacatctgtgtccatagaccatccaactcatcaaccaccattcaaataattagtttg

SEQ ID NO: 99835 - DNA, 792 bp, Zea Mays
ccgccgttgcaatctgcgtcgacgattcggacatcggcgccgtcaatgtctgccaccccgtccggcgatgttccggacgagttgcgggtgcggtcgacgtggctgcagcgcgcgtggacactggctggcacggcagccatcctcatgtccttcttcactaccgcccgcctcgtcgcggcctctagcactgttgtcaccgactcgctcgccgtagccttggcggtctgggcggcctactctgtcgccgacctcaccactggggtttaccactggttcatcgacaactacggcgacgcgggcacgcccgtcttcggcgcgcagattgtggcgttccacgaccaccacgtccaccctacggccatcacgcgcttggagccctgcaacagcctgcacgtgatcgccggcacggtggcggtcgcgttgccagcggtcgatgccgcgctgctttatttcgctggtggcagttcccccgcggcagcgcacgcgttcgcctgcacgttcgcggtgtgcgtcatgctgagcgtgcagttccacgcgtgggcgcacgagaggccgtcgaggctgccgcccggggtcgaggcgctgcaggccgccggcgtgctcgtgtcgcggtcgcagcacgccggccaccatcgtccgccgtacaacagcaactactgcaccgtcagtggcatgtggaactgggctctggatggatacaaggtgttcttggcagtggagaaggtgatctaccttgctaccggtgccccgccgcggtcttggcgaatgaagatgacggagcacggtgtctga

SEQ ID NO: 99836 - DNA, 207 bp, Zea Mays
atggtgaatcagagcctttatggcggcaggtcgctcaccaatctctcccctcacaccggcgagacgcacacgaagcacaaaagaactcaagacaggttgcaagatatgacgagaggcgaggggcatgggttcaagtacccggtggcgcggctgaatcgggcgcaaccatcatccctgccaggggcggacctacgtatagtggagtga

SEQ ID NO: 99837 - DNA, 1342 bp, Zea Mays
ctggaaattaaagagaacatcagctcccgggaggctactctattaaaaaaggcagtatgaaatgaattaaaaaaagttattattcgtatctatccgatccatcctgtagaacatacgtacgacaatcccacatctaaccgttaaccctaacaagctagattttcttcaccaatcacagaaccagcagtcagcaacaatgtcttatcatcatgcatgacgtgaagaccacagtcatctacctgggaccatggtagtagatattgatctaatcaaatccgtgtggaccaaatcaaaacagttgctttcacggcaggcactacaccctgagacaatttctgtagagaaagccggcccggctcattgaccacatcagaacctcaactgctctctacatatatatatgcatgtacccccgcatggacaacgcaccagctcgccatagttgtttcatacacaatacaagcatcctctctgctactgaatatcaaattccactctgggaagatagaaatggcgtcttgtagctttcatcttctcagcgttattctcatcgtgatcgcttcttctggcgcctgggctacggatcctagtcctctccaggacttctgcgttgcagacaaagaatcgcctgtacgtgtgaatgggttgccctgcaaggatattaaggatgtcaaggtcgacgacttcttcctagcagccgacctcgacaagccaagggatacgacgatgagcaaggtcaagtcaaatgtcacattgatcaatgtgatgaagctggccggcctaaacaccttgggcatctccatggctaggattgactatgcccctcaaggacagaacccaccacatacgcatccccgtgccactgagatcttaacggttcttgaaggatcactctatgttggttttgtcacatctaacccagacaacaaattcattagcaagctactcaacaagggagatgttttcgtgttcccccaaggtctaatccactttcagttcaatccaagtcatgataagccagcggttgccattgccgcactcaacagccaaaaccctggtgccattaccatttctaacgctgtatttggatcgaaaccaccaatcgcggacgacgttcttgccaaggcatttcaggtggacaagaaggttgtggattggctccaagctcagttttgggaggacaaccataactaagtgaaggaggctattgccattgtttttacacaccgatgtaataagtaacaacactattttcattcatttgtttgatgtagcaaactgctatataccttttgacatacatatgtattttgttaaaatgtcaaatgaccacagttataaa

SEQ ID NO: 99838 - DNA, 411 bp, Zea Mays
aggcaacggcgcgacgcacgtaggacgcgagacctccgcaaagttggtcaattcaactgcaaagttggtgttctctggcccaaagccaaggaaggcgttggtgtacttctcatcaggaacatcccttttcctcagcagtttcatcccaaagcattctgtcatacttgattgtgcggtccagatccccaacacggtaaactgcatggagcatcctcttgctgtcctgtttatgccagtcaaccacaacctcagctgccttcgaggcttcactatcggttgccatccctgattaaagaggccggagggagacggggcgagcaagtcgcggcggcagcgaggactggaggccgagatctggggcagggcaagggagagggcgaggtgcgacgggagaggtagggaggaaccact

SEQ ID NO: 99839 - DNA, 100 bp, Zea Mays
aaatgtctgaatagtggagacgaaattggtattaacgctgctacacaccgagtctcgtatatgcatgtagatgttgttaataaacgtcgtagagagaagt

SEQ ID NO: 99840 - DNA, 1156 bp, Zea Mays
tattatccacgacacagtcggttatttcatcatctggttccagcaaccaaagactagttcttgtgttggatgggttcaaaacctgaccttttcagttgctcaagttcacgctgcggctatataagccacgcatccattaccccgcctagccacaacatcaacaaagcaaacatactgtacacagtagtgccaacattaaatggctgcgtcctcgtacttccttcttgctgcttttctagcagtaacagcttctcatgccaccgcttccgatcctagcccgctccaggatttctgtgttgctgatattcactctcctgtgaaggtgaatggatttgtttgtaaggatcctatggcggtgatcccagatgacttcttcaaagcagccaaccttgataaggctagagacaccatgaagagcaaggtggggtccaatgtcactttgatcaatgtcatgcagctccctggcctcaacactcttggtatctccctggcacgtatcgactacgcgccattgggcgagaacccgccgcacacccacccacgtgccacggagatcctcacggttctcgaggggacactgtacgtcgggtttgtcacctccaacccaaacaagctatttgccaaggtgctcaacaagggtgatgtgttcgtattcccccaaggtctcatccattttcaattcaacccggtctatgacaagccggccgttgctatcgcggcgctcagtagccagaaccctggggttattactatcgccaatgcggtctttggatcaaagccaccgatttcggatgatgtcttggccaaggctttccaggtggagaaggggacgattgattggctccaggctcaattttgggagaataaccactactaaataaatcacatatgacttatcatataaaacaatgctttttacatatgcactttgagtaacaatacaactacatgtttttaggtttcatggtaaaataggccctaaaataaaaaggtagaggttccagtgttttgggtgctattttgtatcgcatgattcttggtgcaatgacctctatggaagttctaaataataatcttcgctcttgtcgtgggttagatttcactaaagtaatcttattgatacgatgtgggtccatgtgtgagtttttcgtggctt

SEQ ID NO: 99841 - DNA, 1001 bp, Zea Mays
aaagcaacaacagaagcaaacataattaagcagttggtggtcattagcgtactgcacagagtgcctacagaaaagctagagaagtaaacaaaatggctgcgtcctcgtacttccttcttgctgcttttctagcggtggttgcttcccatgccaccgcttccgatcctagcccgctccaggatttctgtgttgcggacatgcactctcctgtgaaggtgaatggatttgtttgcaaggactccatggccgtgaccgcagatgacttcttcaaagcagccaatcttgataaggctagagacaccatgaagagcaaggtgggatccaatgtcactttgatcaacgtcatccagctccctggcctcaacactcttggcatctccctggcacgtatcgactacgcgccattgggcgagaacccgccgcacacccacccacgtgccacggagatcctcacggttcttgaggggacactctacgtcgggtttgtcacctccaacccaaacaagctatttgccaaggtgctcaacaagggtgatgtgttcgtattcccccaaggtctcatccatttccaattcaacccggtctataacaagccggccgttgctatcgcggcgctcagcagccagaaccctggggttattaccatcgccaatgcggtcttcggatcaaagccaccgatttcggatgatgtcttggcaaaggctttccaggtggagaaggggacaattgattggctccaggctcaattctgggagaacaaccactactaaataaatcacatatagcttatcgtatcaaagaatgcttttaaatatgcactttgagtaatacaactacatgatttgagttttcatggtaaaataggccctaaaataagaaggtagaatttcgagtgttttgggtgctattttgtatcgcatgcttcttggtgcaatgacctctatggaagttcgaaataataatctttgttcttgtcgttgggttagatttcactaaagtaa

SEQ ID NO: 99842 - DNA, 2055 bp, Zea Mays
gcttaaccgacccgaaccctcggcgcatttctcagacacccttctttctctgtttcctcttcatctcgctctcggtctcggttccatccggcctccgatccccagcagcaagaatcagcggccgcggcggcgatggtgtgcgctaagtgcgagaagaagctcgggaaggtgatcgtgcctgacaagtggaaggagggcgccagcaacaccaacgagagcggcggccgcaagatcaacgagaacaaactcctatccaagaagaacaggtggactccatatggaaacaccaaatgcataatctgcaagcaacaggtgcaccaggacgcaaaatattgccacacctgtgcttattcaaaaggagtgtgcgcaatgtgtgggaagcaagtgttggacacgaaactctacaagcaaagcaatgtgtgatcatagctttactaaactgctaataacttgtatgaaatcttgtactcgcaatacaatcaagctattgacaatagttaacagaaattatgtacttgactaacaattctggaatggaacacaaaatgtctccaaaattaaagctctacggactttatgcaaagtttgggttgcaactggatattgcaaccgggtctagcataatttttcatttgagaatcagaattcctatggcctccatggcagcagtttctgcgaggtttctgagtatcctgttcgcttctgatggaaacacgttctcagatgttttaaaattcttcactgccaatggtacagtttgtctgaacgatgcattttgtttgttgccagcctgctacagtactggtacagttagtctgaataatgcttctggtttacagtttactgccacattacacataaagacgggcacataacctgtcaaatgtactgccacaattagacagctgcatcaaccatggccaggtcagcctacaaggctatagctagctatatagttctatgaagcagaaacacatgagattaagctacatactacaatggacaagggaaatgtaataaatccaatgcttggaattttatttcgacacagtgcggttctaacttaagttttctggttgagcacatggcggagctgaatcttctggctctccatccgagcttcaaggagcttcgccttcaggctctgcctctgaaccatctccatgcaacctctgaaaccccggttgagctggctgttcatcgaatccggtgagctccattgcgtggtgctaggggtgctgtcccccatatctagattcaagcctttggcagtagagtacacaccatttggaagacttgcacttgataatctcccatttatcatatccgcaacatcttttgtacggaattcacagtttttcagtggagatgacttccacagctttgatatggcggactctttcttcttggactgttccatgtccgtcaggtacacactgctcaagtcatcacacagtttgttggcctgctcaccctcagaatcatttccactggtccacgaaattctgtcaaagatcttgttgactgaatgttcactttcatacggcgaatggcttgagccttgcatctcttcatggctcatggtctcccagctgcttccatcttccttatcgctctcatcagaatggcttccatctgggaacaatctggctcgattttccagaaatatatcagctgttgggctagcttcttggatttcttgctttaggcatggttcggtttcctttttctccatctcttcacttgggcgtagctcttcaaagatggccagtatatcttctgatgctcttggtggctcatatgtgaattcaacctcttggtctctggccgacccaatggcctgtacaatgttgtgtgcggcttcaacaattgtgctgtctcctttggaagagctgaaagtcaaaatgaaagcctccacctcctcctgcagtttgctcaactgttcatatttggcctcaagagtgagcttggcatcgacaagtttcatctgcactcgctcctcacgccacacctcagccatctgtagcaatttcctatcctcatccaggtcgccgc

SEQ ID NO: 99843 - DNA, 249 bp, Zea Mays
atgaccctctgtcagtctcaaaggcgtcgacgagtgccttcaccttactcttcctcgcctcagcgactcgatcacgttgttgaacagccctggctcctgctttttcgtctccttcccgtcctgccaccaccgcagcacaacgaccttggcacccgcgtctctcgctacagcatcgccatcgctcctcctacttgtgatcctgtcgcatctgctcctggatgtcgcaaatcaaaggcaccctgggattaa

SEQ ID NO: 99844 - DNA, 512 bp, Zea Mays
atgacagacagaccagattatgctatggacacagattcttgtgatgcatgtttagtatttacaggaggcattgcccaatgtggatccatagcggctcccactcagaacagcccgaaggtgttctcgccgctgtacgtcatgtagaggaagccgtcctcgtccttgttctcctcgtagatggcggacatcagagcagctgcagggacaacaacgttacgggcggggggcaccgtggtaggttttgttttatttttccccaacactggtatgacaacagaaggaactactgtccggtacctgttggtgggagggtgttctttacgaagatgaagattgccttctcagcgctgagcttgatccgcttccgtaccacatacacaaactgtccgactgtgaggtcggcaggaacaaggtacctgcaagcaatcacaattcacatatcaggggccacacaaatgttgcagctggtcttgccttgtaccgataaacaagacctcattctgatgaattaa

SEQ ID NO: 99845 - DNA, 1232 bp, Zea Mays
gagaaaataataattaaaaaaaagcagtgaaccttctcgcgctcggcagttggcagtcctgtcctgtggaccgtatgacgtgtttatttatgggcggcgccttcgtctccactccccaccggaggaaggaagcgagaagaccagaagggatggcaaccggtagtgaagcctcgaaggcagctgaggctgtggttgactggcataaacacgacagcaagaggatgctccatgcggtttaccgtgttggggatctggaccgcacaatcaagtactacacggaatgctttgggatgaaactgctgaggaaaagggatgttcctgatgagaagtacaccaatgccttccttggctttgggccagagaacaccaactttgcagttgaattgacatacaactatggcgttgacaagtatgacattggaacgggctttgggcatttcgcaattgctaatgatgatgtgtacaagttagctgagaatatcaaatccaagggtggtaagatcacccgcgaacctggtcctgtcaagggaggatccactgttattgccttcgcacaggatcctgatggctacatgtttgagcttatccagagggctgacacacctgagcctctttgccaggtcatgcttcgtgttggtgaccttgagcgttctatcaagttttatgagaaggccctagggatgaagctcctaaggaagaaggatgtacctgattacaagtataccattgccatgttgggctatgctgatgaggacaagacaactgttctggagctgacgtacaactatggagtcacagaatacagcaagggcaatgcatatgctcaggttgccattggcaccaatgatgtgtacaagagcgccgaggcggttgatctggcgaccaaagaactaggtggcaagattttgcggcagccagggcctctacctgggatcaacactaagatcgcctcttttgttgatccagatggctggaaagtggttctggttgacaacaccgacttcctcaaggaactccactgaaggctcgggatacccagaggttgtgcttctgccagtgaggtttgggatttgctatgtaactgtgcctgcgggctccgattctggcgctgttcgtacactgtagaagccagtgaatcccaataaacccagcttcacaggctcctcttatcccgtagaccctagttgtttttgggtggagctggagccactgaccctagtccttttttttta

SEQ ID NO: 99846 - DNA, 1330 bp, Zea Mays
gagaaaataataattaaaaaaaagcagtgaaccttctcgcgctcggcagttggcagtcctgtcctgtggaccgtatgacgtgtttatttatgggcggcgccttcgtctccactccccaccggaggaaggaagcgagaagaccagaagggatggcaaccggtagtgaagcctcgaaggcagctgaggctgtggttgactggcataaacacgacagcaagaggatgctccatgcggtttaccgtgttggggatctggaccgcacaatcaagtactacacggaatgctttgggatgaaactgctgaggaaaagggatgttcctgatgagaagtacaccaatgccttccttggctttgggccagagaacaccaactttgcagttgaattgacatacaactatggcgttgacaagtatgacattggaacgggctttgggcatttcgcaattgctaatgatgatgtgtacaagttagctgagaatatcaaatccaagggtggtaagatcacccgcgaacctggtcctgtcaagggaggatccactgttattgccttcgcacaggatcctgatggctacatgtttgagcttatccagagggctgacacacctgagcctctttgccaggtcatgcttcgtgttggtgaccttgagcgttctatcaagttttatgagaaggccctagggatgaagctcctaaggaagaaggatgtacctgattacaagtataccattgccatgttgggctatgctgatgaggacaagacaactgttctggagctgacgtacaactatggagtcacagaatacagcaagggcaatgcatatgctcaggttgccattggcaccaatgatgtgtacaagagcgccgaggcggttgatctggcgaccaaagaactaggtggcaagattttgcggcagccagggcctctacctgggatcaacactaagatcgcctcttttgttgatccagatggctggaaagtggttctggttgacaacaccgacttcctcaaggaactccactgaaggctcgggatacccaggtgctgtgctaggatgtagtaatgcttgtctgtggtgtaataagatgtgggtggtttgtttctgccctgatgaacttataatactgaatgttgctacagaggttgtgcttctgccagtgaggtttgggatttgctatgtaactgtgcctgcgggctccgattctggcgctgttcgtacactgtagaagccagtgaatcccaataaacccagcttcacaggctcctcttatcccgtagaccctagttgtttttgggtggagctggagccactgaccctagtccttttttttt

SEQ ID NO: 99847 - DNA, 1402 bp, Zea Mays
agcagtgaaccttctcgcgctcggcagttggcagtcctgtcctgtggaccgtatgacgtgtttatttatgggcggcgccttcgtctccactccccaccggaggaaggaagcgagaagaccagaaggtgagaagagagagagagagtgtgtgtgatcggtacaaggatcaccgctgtgcctgcgcgtgctgcttcaccgaatcgagtcagatcctgtccgaatccgagctaagggatggcaaccggtagtgaagcctcgaaggcagctgaggctgtggttgactggcataaacacgacagcaagaggatgctccatgcggtttaccgtgttggggatctggaccgcacaatcaagtactacacggaatgctttgggatgaaactgctgaggaaaagggatgttcctgatgagaagtacaccaatgccttccttggctttgggccagagaacaccaactttgcagttgaattgacatacaactatggcgttgacaagtatgacattggaacgggctttgggcatttcgcaattgctaatgatgatgtgtacaagttagctgagaatatcaaatccaagggtggtaagatcacccgcgaacctggtcctgtcaagggaggatccactgttattgccttcgcacaggatcctgatggctacatgtttgagcttatccagagggctgacacacctgagcctctttgccaggtcatgcttcgtgttggtgaccttgagcgttctatcaagttttatgagaaggccctagggatgaagctcctaaggaagaaggatgtacctgattacaagtataccattgccatgttgggctatgctgatgaggacaagacaactgttctggagctgacgtacaactatggagtcacagaatacagcaagggcaatgcatatgctcaggttgccattggcaccaatgatgtgtacaagagcgccgaggcggttgatctggcgaccaaagaactaggtggcaagattttgcggcagccagggcctctacctgggatcaacactaagatcgcctcttttgttgatccagatggctggaaagtggttctggttgacaacaccgacttcctcaaggaactccactgaaggctcgggatacccaggtgctgtgctaggatgtagtaatgcttgtctgtggtgtaataagatgtgggtggtttgtttctgccctgatgaacttataatactgaatgttgctacagaggttgtgcttctgccagtgaggtttgggatttgctatgtaactgtgcctgcgggctccgattctggcgctgttcgtacactgtagaagccagtgaatcccaataaacccagcttcacaggctcctcttatcccgtagaccctagttgtttttgggtggagctggagccactgacccta

SEQ ID NO: 99848 - DNA, 2210 bp, Zea Mays
gttccctcgtcagtcgtcatccattcccaacacagatgcaaaacggggagagaccgggtttataagcagatagtcgaggaaggagaggttctccacacttcacctcgccgataaggctgccgcgccctccctcactcccgcggtcctgctccctatggagtcggcggcgattgggtcacagtctccgctctccttcccctccagcctctgcaaaggaaaagtatcatctagtttatcaatatacaatgtgaagatcaagagcaactgtaggcttgaggtggtttgccatgggatgttagctacaagaaagtttatgcaaaggaaaaagaaagaagaagttttcaaggatggtgctgatgagaccgagcagatgaattggaggagaatgatgagagagatagagcaggagggatcagctgtacccattctgaagacccagcgaaacaggaaagagccacttccacgggatgttattcttgggactcttattcggttcaaacaattgaaaaagtggaatattgtcagtgagattcttgaatggctcagaacacagcattggtgggacttcagtgagatggacttcttgatgcttgtgaccgcttatggaaagttgggggattttagcagggcagaaagggtcctaaagtacatgaacaagaaaggttaccagcctagcgttatatcacagactggtctgatggaggcttatggaagagggaagcagtaccgtaaggctgaagcagtattccgtaggatgcaaacatcaggccctcaaccatcacctgtgacatatcaaattattttgaaatctttagttgagggtgacaaatataaggaagctgaagctatatttgaagaccttcttaatgaaaaaagaacttcttttaaaccagaccagaagatgtttcacatgatgatttatatgtacaagaaagctggtgactatgcccaggctcgtaagctatttgcacagatgtcggagagaggaattccactatctacagtcacttttaatagtttgatgtcatttgagacagaatacaaggaagtttcaaatatttatgatcagatgcaaagagctggtctgaaaccagatgttgtgagctattccctgctcatcaaagcttatgggaaagccagaagggaagaagaggcattggcggtttttgaagagatgcttgatgctggagtcaggccgacacgcaaatcatataacattttgcttgatgcatttgcaatatctggattagtagaggaggctaatacagttttcagggcaatgagaagacacagggttgagcctgatctttgctcttatacaactatggtcttagcttatgtaaatgcatctgaaatgaatggagctgagaaattctttcgtaggattaaagaggatggtctgaagcccaacgttgtggtttatggcactctgatgaaaggctattcaaagttaaataatcttgagaaagttatgcgtgtgtatgagagaatgcggatccagggtgttgaacccaaccagactatatataccactatcatggacgcacaaggcaggaactcggattttggaaatgctgtcatttggttcaaagaaatggaagctcgtggatacccaccagaccagaaagcaaaaaatatcctactttcgcttgccaagacaccagaagaggaacaagaagcgaatgatttggtagggaatggtccagttcagctggaagtgaaacctgatggagaggtggatggtgacgatgggcatgaagttatacaaactgatgccgaaaatcaccgtttgctagacgacacacgagcaagaaatcatgtaaatggtaggatcagagctggtgatgactataattttgatgaggaggatgatgatgacgattacgaggaagaggaggatgaagagttcgatcttgtttctttcaaagataagagaaaactgaattttgcaagttgatgtcataaatctttgtgtatatttttatccaacaaacacatcatcgcatgatggcctttcctatacagagactaacttgaaatgttagtagagtttggctcgaaccttgaaagatgtttctgttagccttgtcttttgaaggaatgtaatttaaggcaggacaatagtggatctgtggcgctggtagtttatcagggcaaggcattatatttatattacttatttacttattatttattaaaacttactcgtg

SEQ ID NO: 99849 - DNA, 1009 bp, Zea Mays
ttctcaaaccaaacacctccttagtcactcgctcaccccgagctcgacgacgacgacggcgacagctttggccggagctatacatacttacggtcgatctgttctcgattcgtgcctcgtaacaagcatcctaaggcggcaaagcagctaacgaactactggtccccttctcgttcccaggtgtcgctgttgggctgttgctaaaggaacaagaatggaggcagggcctccctgcgagcctgcgccgacggtggcaaacggcagggactggtcggagctgtccctggacgcgctggtgctggtcttcggcaggcttggccctgtggagatcctcatgggctcgggcctcgtgtgccgctcgtggctccaggcggccaaggagccggagctgtgggcgtccctggacatggcgagccacagggcggtggaggagatgggcggcgacgtcctgcgcggaatggccagggtggccgtgggccgctccaggggccggctggaggtcttctcggggaagcacttcgtcaccgacgatcttctcaactacatatcgggcaggtccgcgtgtctgaggagcctcagccttgtgtcgtgccccgaggtcaccaacaaagggttcaccgacctggtcacgaacgcgcccaagctggaggacctctcgctggagctctgcccgaacgtcggcggccgccacgtgctggagtgcgccggccgagcctgcccgcggctggcgcgcttccgcctgcgcagggagtgcttcaggttctcgctcaactactcccggcgcaccgcggaggcgctcgggatcgcggccatgaccgggctgcggagcctcaccctcgtcagcagcaacatcagcaacgacgagctggtggccgtcctcgacggctgcccgcgcctggagtccctctgcctgcgggactgctacaaggtcatcgctgatggctccctgcgggctaggtgcgccggcatccgggccctcacgcttcccgtccccgatcgagtttggtga

SEQ ID NO: 99850 - DNA, 1413 bp, Zea Mays
atgggcgccttctctggtggaggcgaggcctcatctgtcaccgtcttctcacgtcttctcagtgctgctgtgcttgtaacccctatgcacgtttcagaccctcacccttcggaaagggttagaaagtttgctaggtttcagcctctcgcactgcttgtgcctcgtgccgctattcgtgtttgtggtggtcgccgtcagcgcgacacttcctggccggcaggtgatcatactcgacgatctgcacaccacctgcgcacaggtgacccccacacaccactgaaatttcctatccctgaaatttcctggctggaaggtgaccccacacaccacggcggcgacggcatcgaccactgaaagttggttgagggactattcctggccgacgacggcatcgacgacgacgaggagtgttaaaacagctcgttgttttgggatttgccgcctcaagtttcatctagctacctccaacaaaccctttaatctccatggctacatcggacaagaaaacaaggggctatgttccttggaatgatgagatggataaggtactccttgatacatttgtggactattacaataaaggtgatagctgtcagaatgggtggaagtctcatgtatacatagctgctgtgaagaatgtttgtgagaagtgtaatgtcaccattacaaaggaaaatattagctctcgcagcaagacctttgataagcactacaatatcattaatggtttggtgtccactagtggttttggatgggattgggagaagaacaagctcaaagtttatagtgacactatatgggatgagtacgttgagaggaataaggaagcaaaaggatatagacataaggttgtgaagttttgggatctactcagcctagtgtacaataaagaccaagcaaatggagagggtgctaaaatagcagctaaaagttcaaaggaaatggcaaaagataatgataccgtatgcaaggatgcttcatattctgtatcttcctcgagtagtctaaaaagacaaagatcagatgattcatttaactctatgtggtgtgataagtttgacatgcttacatctgcattgaaagatgatggtccaaagctaccgtcttccgtcgaagttctcaccgcattacaagaggttgagggacttgatgaagacacagaacttgagctttatgacatcctcacctctaatgcacgcaagtttgagtcgatgatggcactcccaatggaaaggaggaagaggtggattatgatgtagctaaggaagtgaaacaacttatatgtgaacttagatctctgtgttgaactgattgtgtgaacttgtctttgtgaaacttttgtgtgcgaacttgatggctatgtgaaactgttgtgtgcgaacttgatggctttatgaaactgctatgtgaaga

SEQ ID NO: 99851 - DNA, 877 bp, Zea Mays
cctataaatttctttgtgctagatattttgcaattttgcaacactaaagatttgtatttattcagtctagatttgtctttgtagctttataggcagcactgttcgtcgattcaagctgttagttaaatcaatcagggtccatctcagaagtttcatggtgaaaatcatacactttgtgacatgtgttatgtccctatcttgtttcagtgactgcatctaaactgtgagatgtgtgcaagattgggtttgttgtatttggagttcctcatagaaaaatcatacatatgctctagagttcctcatagatttggtgcccgcgatctgccatggatttgatttaaggtgagctccctttacttattttggcgtcttgcttggttggctcggattcgtgttatcggtcgacctatcgtggagccgagagagagatttggttctttcttcgcagatttggggagatcggtcgtgttcgcgctgcgagattcaattttttatgcctgttttattcacgaggttggctctcctcagatttcaagtcttcccgtgttcttgatcccttttttcccgttgattttgtctccactcactttctttctgttcgattttggcgcctgcagattgcaagaacgggactgctaggcaagatgagtatacctgaaatttagttctagaaattcactgctaccagtctcaggaataggctgggttgaacttatacatgagatatccacatgtccaggtgcattgtctgaatttgattagaagtgtgtaatgttagttcttataaaaaagcaactcaaaaagggccaaagtttggatgtaccttctgggttattgacgcagatatctttatcgctatatgtgcttggtttgctaa

SEQ ID NO: 99852 - DNA, 671 bp, Zea Mays
atggccagagtcctcggcatctatgacctcatcatcgccgccatcatctctgtcgggatcaaccccaaggccaagcccaagccctacttcttagacggctacgcacacctctccttcgaactcgcatgcagccttgctgtcctcgctgtcggcatggccatcagcatcgtcagagacaccagagtcaggtattgtactactctgattgcagtgtgtatgcttgaacatatatgaataagcaaagctacaacattttttcatcagaaaaaataagcaagccaaactgatctagaatacactgtttttgagaaattaagcagcaacaaagaagtctatgtgccccttcttcaatagcaaggtattgttgtgcattgggttagatgatatgtttatgtgattgttacagtgttaggtcttgaggttatggctaaatagtcaatcatcaaaatggcagttacctcacaactttgtaagaaaaacaggttatgtgatcttaggtaacttctgaaattttgttgcttagtgtagcagattgccagggttaccttacctttttctgtctatctcggtaacaaaagactgtcagtctgcagacactaaaaaaagcacactccttttaaaccaaaggaccatgatcacaagagggcatcttctgctttcttgccatatct

SEQ ID NO: 99853 - DNA, 102 bp, Zea Mays
gtcgtggaacaccagacgccgctccaatatatgttcaggaatgtgccaagcagagttagtggcatgttgtcacaccagggctttaaggaacaaagccaggtg

SEQ ID NO: 99854 - DNA, 953 bp, Zea Mays
ctcgatacctggcatgatgagttcctcaatcaagtaagccacatctcccacgagcatgtatctttctggatgtctggttacaatagcagctactcatgtggttgagaataaaatacaaaagataaagataaatattcagatgatcgtcagtatagtctcatccacgacaagttcattatgatttacatagacttcatttttacacccaaaatcaaaagaaaataaaagaaaaccggcagaaccttgcctacatttcgtttcaggctgacccatcggatcctcagcgctttccgttcattttggtcgggaacaagattgattcagatggcgggagcaaacggatggtcagttttcctgaatgtgcaagctttctcatatatatagattcgaaataccctgcagtctctttgcctttcccgcaggttcctgagaagaaagcaagggaatggtgcgcctccaagggcgatattccatacttcgagacctctgcgaaggaggaccacaacgtcgacactgctttcctatgcatcgctagcctcgccttggagcatgagcatgaccaagacatttacttcaagacagttgcggaacaagtcccggacactgaacagacaagcagatgtgtttgctaggagccagccatttcctggaaggctggaactacgtggatgttactgaaggactggcccccgatatgttccctcacagtttttcttttgagctccagtaactttattactgttctgtgttgctctcactggattttagcacttctgtaagttgtcatcttttaaagttaagaatttttacataagtcttacacatcgaacaaatccaccatatacattaagatgcaatgcttatcgaccaatcaagtaatatgctcttgtaacctaaattaatcaaaattgggcaataatcagcaactgacttgtactaaggtagaaaaataa

SEQ ID NO: 99855 - DNA, 210 bp, Zea Mays
ttgatgtgcaaatttgttgaaattatggcaactgtattctcaagggatgcatggcgctgtgtatggcatatgattcaggtccacagtggtatctcctactgttctcttaacttcatttgaagcttgtattcttatatttgttttctgcagaacgacttggtcaatggatggggccttgattttgctcttaggaaatgtgtggaggtatat

SEQ ID NO: 99856 - DNA, 800 bp, Zea Mays
atgaaacagatacatattaataaaaactcacctttctaatgttgtccaagtttgtgccatgttttcccattacttttgagatgccactagcaggtacagtcatttccaaacttgaaacatactcttcatatgcctttgatgcataggatggaagtcctccatagccatcatcccatacctgcatggaactatacccatacgaactggtacgagggaatacttccagagctcgctcaggttcacctcttctatcatagcccaagggggcaatttgttggttgtgaggtaataatgcaggcaaaggaagactgcttccatataaggaatcagaggcagcaacagttagttggccatccctgtcagaattttggctttcaacactctctttcagaacggcttccctaagtcttaaaattatctgaacaagagcatcacgcagcttgtctgcttctccagatacctacacacattaaccatttgacatttgactatttgagagatcttgctaccaaggctatttaaaattttaaactgataacacaaatgagaactcttacctcaacaagttcatcactggaagatgctctccggggcttatcgcccttcgaaatgaggatgtttgccttagtcttcttcctcatgtcattgactattgaaccacccctgccaataagacagcctataaccttatttggcacaagaaggcgaagattcattctatcatcctcagaatcattgatcttggcttgaagcagcaaaacagcttccacagcggcagacttaacatcatcggtggactg

SEQ ID NO: 99857 - DNA, 505 bp, Zea Mays
aacaccatttgaaaactatacatcttttggataagagtatagggaaagcacttccatgattcttaccaatacacatgcagaacagcagtagatttataccattcaaaaatgcgagataaaacacaccaaataggatcccactgcaacagatgcacatctcataattcccaatgactgcgtcaattagttatgggcaccaaaaggatgtccaccgaaaagaaaaaaaaacatggcattctactgtgctacaaaatttcaacaccatgctcattgtctactgtgcgatgcgaccagaagagctgttgccgcatcaacaaactctactacaatttgttaacaggcataataacactgcaactttttacacttgatggtgccatagtttcttgtgaagtgcacatatgaaggatggagtggatttagtttgatagagggcttaagagatttttacggaggggggcttgaataagattatggaatatggatgcttctgaataatgtatgg

SEQ ID NO: 99858 - DNA, 87 bp, Zea Mays
cccacatgcaagcaatcacctctatctctactatgtttaaatgtttatgcgtctacccctcagcgattccctgacttccagttatga

SEQ ID NO: 99859 - DNA, 450 bp, Zea Mays
gcgcggaacgcggcgaacaggggaaggaacgtggtccgaacaccggcgaactccaaggagcagcgcacaacgagcagagagggagaaaagagggatagctgggcgctcggccatgggacggacgccggggaaatgtcgagcagagggcagggagatggaaactcggccatggaagatgagcagtcggcgcgggagctgggcacgagcgccagggagacggagcacgcgcagcaagcactggtgagcagcaggggcgcgacagataactccgtgacgcacagggaaatggaggagggaccgctggggcatccatggctgggatgtgcaggaacccaccagggccaaggcgcgggcgagagggttcagggcgtggcaggcggaaccgagcagggagctccagccaggggcgcgcgcaacacagagatgaagcgcgcacaggggaaaggatga

SEQ ID NO: 99860 - DNA, 1052 bp, Zea Mays
gaatccgtgttcatctccctactcgatcggcagccgcaagagctgaccctccgcttccccccaaaaaccctagccatcttgaggaagggaaagatgtccgtttaggagattggaaagctgctgacattgagatcttgaatacattccagctactttcagctaagccagttgtctatttggtgaatatgagtgagaaggatttccagagaaaaaagaacaagtttctacccaagatacatgcttgggtgcaggaacatggtggtgaaaccatacttcctttcagctgtgcttttgaacagaaactagtggatatgccagaagatgaagccgccaaatattgtgctgaaaaccagataacaagcatgatcccaaaaattatcaagactggttttgcagcaattcatctgatatactttttcactgctggtcctgatgaggtaaaatgttggcagatcagacgccagactaaagctcctcaagctgctggtgcaattcacactgattttgaaaggggtttcatatgcgctgaggtaatgaagtttgaagatctgaaagaactgggcagtgaatctgctgtaaaggctgctggaaaatacaagcaggaggggaaaacctatgtggtccaggacggggacatcatctttttcaaattcaacgtgtctggtggcgggaagaagtgaataatgtatgaagatggtagcatcaacagtgttttacgtcttaccccgaatttctcattcaacagtgtttacaccttgccccgtatttccacatttttgaggtcgcttgccagtagctctaggttccggtatcgaaaacttgtacaacaaggctccagaccgttgaaggatttgtattaataacatgcacaattgtatggcttgtgcttgagctctcgctgttaccagaagcttagaatcgtttgagttctgtggttcggttttgcgtggtttattgtgtaagctggtctaactgcaaatgatttgatgcttgtggcgggaacaaatgtatcaaccgtgaagctagttgtggaagctatgtgtgggtcccct

SEQ ID NO: 99861 - DNA, 1641 bp, Zea Mays
cgttcatctcacagcccaacccagcccagcaaccgcgaatccgtgttcatctccctactcgatcggcagccgcaagagctgaccctccgcttccccccaaaaaccctagccatcccaggttgctccggccgcatccccgccgaccgccgaccgccgacgatgcctcccaaggccaagaaggacgctgcgccgtctgagcgccccatccttggacgcttctcttcccacctcaagatcgggatcgttgggttgccaaatgttggcaaatcaacttttttcaacatagtaacgaagttggctatcccagctgagaattttcctttctgtaccatcgaaccaaatgaagcacgggtgaatgttccagatgaacggtttgattggctttgcaaactttacaagccaaagagtgaggtgcctgcatatcttgaagtaactgacatagctgggcttattagaggtgctcatgctggggatggtctgggcaatgcattcctctcacatatacgtgctgttgatggaatcttccatgtcctaagagcatttgaagacgcagaaattactcatgttgacgatacagtagatcctgttagagacatggaaactattagtgaagagctcagactaaaggatatagagttcatgaaaaagaaacttgaggaccttgataagtcaatgaagaggagcaatgataagcagctcaaaattgagcatgaattatgtgagagggtcataggccatcttgaggaagggaaagatgtccgtttaggagattggaaagctgctgacattgagatcttgaatacattccagctactttcagctaagccagttgtctatttggaacatggtggtgaaaccatacttcctttcagctgtgcttttgaacagaaactagtggatatgccagaagatgaagccgccaaatattgtgctgaaaaccagataacaagcatgatcccaaaaattatcaagactggttttgcagcaattcatctgatatactttttcactgctggtcctgatgaggtaaaatgttggcagatcagacgccagactaaagctcctcaagctgctggtgcaattcacactgattttgaaaggggtttcatatgcgctgaggtaatgaagtttgaagatctgaaagaactgggcagtgaatctgctgtaaaggctgctggaaaatacaagcaggaggggaaaacctatgtggtccaggacggggacatcatctttttcaaattcaacgtgtctggtggcgggaagaagtgaataatgtatgaagatggtagcatcaacagtgttttacgtcttaccccgaatttctcattcaacagtgtttacaccttgccccgtatttccacatttttgaggtcgcttgccagtagctctaggttccggtatcgaaaacttgtacaacaaggctccagaccgttgaaggatttgtattaataacatgcacaattgtatggcttgtgcttgagctctcgctgttaccagaagcttagaatcgtttgagttctgtggttcggttttgcgtggtttattgtgtaagctggtctaactgcaaatgatttgatgcttgtggcgggaacaaatgtatcaaccgtgaagctagttgtggaagctatgtgtgggtcccct

SEQ ID NO: 99862 - DNA, 1730 bp, Zea Mays
acagcacctcgatccatcgttcatctcacagcccaacccagcccagcaaccgcgaatccgtgttcatctccctactcgatcggcagccgcaagagctgaccctccgcttccccccaaaaaccctagccatcccaggttgctccggccgcatccccgccgaccgccgaccgccgacgatgcctcccaaggccaagaaggacgctgcgccgtctgagcgccccatccttggacgcttctcttcccacctcaagatcgggatcgttgggttgccaaatgttggcaaatcaacttttttcaacatagtaacgaagttggctatcccagctgagaattttcctttctgtaccatcgaaccaaatgaagcacgggtgaatgttccagatgaacggtttgattggctttgcaaactttacaagccaaagagtgaggtgcctgcatatcttgaagtaactgacatagctgggcttattagaggtgctcatgctggggatggtctgggcaatgcattcctctcacatatacgtgctgttgatggaatcttccatgtcctaagagcatttgaagacgcagaaattactcatgttgacgatacagtagatcctgttagagacatggaaactattagtgaagagctcagactaaaggatatagagttcatgaaaaagaaacttgaggaccttgataagtcaatgaagaggagcaatgataagcagctcaaaattgagcatgaattatgtgagagggtcataggccatcttgaggaagggaaagatgtccgtttaggagattggaaagctgctgacattgagatcttgaatacattccagctactttcagctaagccagttgtctatttggtgaatatgagtgagaaggatttccagagaaaaaagaacaagtttctacccaagatacatgcttgggtgcaggaacatggtggtgaaaccatacttcctttcagctgtgcttttgaacagaaactagtggatatgccagaagatgaagccgccaaatattgtgctgaaaaccagataacaagcatgatcccaaaaattatcaagactggttttgcagcaattcatctgatatactttttcactgctggtcctgatgaggtaaaatgttggcagatcagacgccagactaaagctcctcaagctgctggtgcaattcacactgattttgaaaggggtttcatatgcgctgaggtaatgaagtttgaagatctgaaagaactgggcagtgaatctgctgtaaaggctgctggaaaatacaagcaggaggggaaaacctatgtggtccaggacggggacatcatctttttcaaattcaacgtgtctggtggcgggaagaagtgaataatgtatgaagatggtagcatcaacagtgttttacgtcttaccccgaatttctcattcaacagtgtttacaccttgccccgtatttccacatttttgaggtcgcttgccagtagctctaggttccggtatcgaaaacttgtacaacaaggctccagaccgttgaaggatttgtattaataacatgcacaattgtatggcttgtgcttgagctctcgctgttaccagaagcttagaatcgtttgagttctgtggttcggttttgcgtggtttattgtgtaagctggtctaactgcaaatgatttgatgcttgtggcgggaacaaatgtatcaaccgtgaagctagttgtggaagctatgtgtgggtcccct

SEQ ID NO: 99863 - DNA, 342 bp, Zea Mays
cgtgctgatgctggaggagtggaggtggtcacggcgaggaagccgctggcgcgcggccaccggccggtacatcgtccgggacgaaggcggcgctggaccggaccaaggatctgtacggcctgcacgagctgctggaccaggcggtggcgggctggagcagtacatggacctggtgctgcgctgcgtcgaggaggccggcgccgaccggccgtcgatgggcgaggtggacggagagatcgagcaggtactgaagatggccggcggcacaggactccatccctacgctgagtcggcggcgtccattccaactccatgaggaggtacgccggtgaggccttacca

SEQ ID NO: 99864 - DNA, 510 bp, Zea Mays
atgggaagcaggcaaagggagctccacgagcagagaggaattggggaagggctgcagcgctgggagctcggctgggggaaacgaagcgccatggcagagatggccaacagccgagcgcaacagggaagaacgagcacgcaccagagagggagcagggcgcgcggtagggatggagctccgagcgccgagcgtagggagcagggcgcagagcgcggacgggcgggtgtgccagggaaatcggcgcagcggccatgggaagggaagagagttattctgggcgccatgggagctcgacgtgagctagagcagggaattgcagagaccgtactcggcagagggagttggaggggtcgcgccgctggagattcggccggcgagcgccatggggagaagaggccgagaagggggcgcggccagcagagaggcgctgggagcgcagagggagagagagctcagctgggagcacacgcggtcaagcaggggccggaagaagtagacgcgcgcagataa

SEQ ID NO: 99865 - DNA, 321 bp, Zea Mays
atgggagctcggcagggagctcgacgcgagctggaacagggaattgcagagaccgtactcggcagagggagttggaggggtcgcgacgctggatattcggccgatgagcagaggggctgggcgccaagcgccatggggagaagaggccgagaagggggcgcggcaagcagagaggtgctgggagcgcagagggagagagagctcagccgggagcacgcgcggtcgagcaggggctggaagaagcagacgcgcgtagataaaggagatgacagagaacgatgcgcggtagagaaaaatcaagggagggcggtggggagataa

SEQ ID NO: 99866 - DNA, 2166 bp, Zea Mays
tttttttttttttgatgtgattagtccttggtgagctggtccggatggaccttttggtaagtgagggaccatgcatcccatcacaatgggttatgatgattagcctttagatgtgtgtatatatatgaggggtgagaggggggaggggcctggggagcaacacaagcactccacactgctgtgcagaacgagagcgtaaccatcagtactcaatagttagagcgaccaatagatgagttcctccccgtcctttggtctcctggccttagcagcagtactcctagcactgaacttagcacaacatggctccctcgccgcaaccgtcggccccagggtcatcgtcgtcggcgccggcatgtctgggatctcggcggcgaagaggctgtcggaggccgggataaccgacctgctgattctggaagcgacggaccacatcggcgggcggatgcacaagacgaacttcgccggcatcaacgtcgagttaggcgccaactgggtggagggcgtgaacggcggcaagatgaaccccatctggcccatcgtcaactccaccctcaagctccgcaacttccgctccgacttcgactacctcgctcagaacgtctacaaggaggacggtggcgtctacgatgaagattacgtccagaagagaattgaactggcggacagcgtggaagagatgggggagaagctctctgccactttgcacgccagtggcagagacgacatgtctatccttgccatgcagcgcctcaacgaacaccagccgaacgggccggcgacgccggtggacatggtggtggactactacaagttcgactacgagttcgcggagccgccgcgcgtgaccagcctgcagaacaccgtgcctctcgcgaccttcagcgacttcggcgacgacgtctacttcgtcgccgaccagcggggctacgaggccgtcgtctactacctcgccggccagtacctcaagaccgacgataagtctggaaagatcgtcgacccgcgcctgcagctcaacaaggtggtgcgagagatcaagtattccccgggtggcgtcaccgtcaagacagaggacaactcggtgtacagcgcagactacgtcatggtttctgcgagcctgggtgtcctgcaatccgatctcattcagttcaagcccaagctacctacatggaaggttagggcgatctaccaattcgacatggccgtgtacaccaagatcttcctcaagttccccaggaagttctggcctgaagggaaaggaagggagttcttcctctacgccagcagcaggagaggttactacggagtgtggcaggagttcgagaagcagtaccctgacgccaatgtcctcctggtcaccgtgaccgacgaggagtcgaggcgcatcgagcagcagtcggacgagcagaccaaggcggagatcatgcaggtgctgcggaagatgttccccggcaaggacgtcccggacgccaccgacatccttgtcccgaggtggtggtccgacaggttctacaagggcaccttctccaactggccagttggcgtcaaccgctacgaatacgaccagcttagggcaccggttgggagggtatacttcaccggcgagcacaccagcgagcactacaatggctatgtccatggagcctatctttcaggtatcgactccgctgaaattctcatcaactgcgcccagaaaaagatgtgcaagtaccatgtccagggaaagtatgactaggaagctacagcaaattgatttaaagctccagcaaattgagcagtgtggatgttgcatttctcagttcattttttccctgttttcaacaaagtatagatgacagccatgttccctcgcggcatatgccttttcattattccaataaagctagcggctggttcgatgagcacgatttgtgatcgagtatcctgtttaataagtacggtgtttgctttttttttcatgatgaggggtgcatggcttatgatattctatctatttgctaatcaaaactttgtaccatgggaatcactagtacacacaacattattactcgtgatttcagatctacttttaggtcttgtttaggaggaagaagacagtagagaattggtagggctagaagcatcttactatacaattttaaatagtgagttgattttagctccttc

SEQ ID NO: 99867 - DNA, 1854 bp, Zea Mays
tttttttttttttgatgtgattagtccttggtgagctggtccggatggaccttttggtaagtgagggaccatgcatcccatcacaatgggttatgatgattagcctttagatgtgtgtatatatatgaggggtgagaggggggaggggcctggggagcaacacaagcactccacactgctgtgcagaacgagagcgtaaccatcagtactcaatagttagagcgaccaatagatgagttcctccccgtcctttggtctcctggccttagcagcagtactcctagcactgaacttagcacaacatggctccctcgccgcaaccgtcggccccagggtcatcgtcgtcggcgccggcatgtctgggatctcggcggcgaagaggctgtcggaggccgggataaccgacctgctgattctggaagcgacggaccacatcggcgggcggatgcacaagacgaacgggccggcgacgccggtggacatggtggtggactactacaagttcgactacgagttcgcggagccgccgcgcgtgaccagcctgcagaacaccgtgcctctcgcgaccttcagcgacttcggcgacgacgtctacttcgtcgccgaccagcggggctacgaggccgtcgtctactacctcgccggccagtacctcaagaccgacgataagtctggaaagatcgtcgacccgcgcctgcagctcaacaaggtggtgcgagagatcaagtattccccgggtggcgtcaccgtcaagacagaggacaactcggtgtacagcgcagactacgtcatggtttctgcgagcctgggtgtcctgcaatccgatctcattcagttcaagcccaagctacctacatggaaggttagggcgatctaccaattcgacatggccgtgtacaccaagatcttcctcaagttccccaggaagttctggcctgaagggaaaggaagggagttcttcctctacgccagcagcaggagaggttactacggagtgtggcaggagttcgagaagcagtaccctgacgccaatgtcctcctggtcaccgtgaccgacgaggagtcgaggcgcatcgagcagcagtcggacgagcagaccaaggcggagatcatgcaggtgctgcggaagatgttccccggcaaggacgtcccggacgccaccgacatccttgtcccgaggtggtggtccgacaggttctacaagggcaccttctccaactggccagttggcgtcaaccgctacgaatacgaccagcttagggcaccggttgggagggtatacttcaccggcgagcacaccagcgagcactacaatggctatgtccatggagcctatctttcaggtatcgactccgctgaaattctcatcaactgcgcccagaaaaagatgtgcaagtaccatgtccagggaaagtatgactaggaagctacagcaaattgatttaaagctccagcaaattgagcagtgtggatgttgcatttctcagttcattttttccctgttttcaacaaagtatagatgacagccatgttccctcgcggcatatgccttttcattattccaataaagctagcggctggttcgatgagcacgatttgtgatcgagtatcctgtttaataagtacggtgtttgctttttttttcatgatgaggggtgcatggcttatgatattctatctatttgctaatcaaaactttgtaccatgggaatcactagtacacacaacattattactcgtgatttcagatctacttttaggtcttgtttaggaggaagaagacagtagagaattggtagggctagaagcatcttactatacaattttaaatagtgagttgattttagctccttc

SEQ ID NO: 99868 - DNA, 1499 bp, Zea Mays
tagatgtgtgtatatatatgaggggtgagaggggggaggggcctggggagcaacacaagcactccacactgctgtgcagaacgagagcgtaaccatcagtactcaatagttagagcgaccaatagatgagttcctccccgtcctttggtctcctggccttagcagcagtactcctagcactgaacttagcacaacatggctccctcgccgcaaccgtcggccccagggtcatcgtcgtcggcgccggcatgtctgggatctcggcggcgaagaggctgtcggaggccgggataaccgacctgctgattctggaagcgacggaccacatcggcgggcggatgcacaagacgaaccgaacgggccggcgacgccggtggacatggtggtggactactacaagttcgactacgagttcgcggagccgccgcgcgtgaccagcctgcagaacaccgtgcctctcgcgaccttcagcgacttcggcgacgacgtctacttcgtcgccgaccagcggggctacgaggccgtcgtctactacctcgccggccagtacctcaagaccgacgataagtctggaaagatcgtcgacccgcgcctgcagctcaacaaggtggtgcgagagatcaagtattccccgggtggcgtcaccgtcaagacagaggacaactcggtgtacagcgcagactacgtcatggtttctgcgagcctgggtgtcctgcaatccgatctcattcagttcaagcccaagctacctacatggaaggttagggcgatctaccaattcgacatggccgtgtacaccaagatcttcctcaagttccccaggaagttctggcctgaagggaaaggaagggagttcttcctctacgccagcagcaggagaggttactacggagtgtggcaggagttcgagaagcagtaccctgacgccaatgtcctcctggtcaccgtgaccgacgaggagtcgaggcgcatcgagcagcagtcggacgagcagaccaaggcggagatcatgcaggtgctgcggaagatgttccccggcaaggacgtcccggacgccaccgacatccttgtcccgaggtggtggtccgacaggttctacaagggcaccttctccaactggccagttggcgtcaaccgctacgaatacgaccagcttagggcaccggttgggagggtatacttcaccggcgagcacaccagcgagcactacaatggctatgtccatggagcctatctttcaggtatcgactccgctgaaattctcatcaactgcgcccagaaaaagatgtgcaagtaccatgtccagggaaagtatgactaggaagctacagcaaattgatttaaagctccagcaaattgagcagtgtggatgttgcatttctcagttcattttttccctgttttcaacaaagtatagatgacagccatgttccctcgcggcatatgccttttcattattccaataaagctagcggctggttcgatgagcacgatttgtg

SEQ ID NO: 99869 - DNA, 1373 bp, Zea Mays
tagatgtgtgtatatatatgaggggtgagaggggggaggggcctggggagcaacacaagcactccacactgctgtgcagaacgagagcgtaaccatcagtactcaatagttagagcgaccaatagatgagttcctccccgtcctttggtctcctggccttagcagcagtactcctagcactgaacttagcacaacatggctccctcgccgcaaccgtcggccccagggtcatcgtcgtcggcgccggcatgtctgggatctcggcggcgaagaggctgtcggaggccgggataaccgacctgctgattctggaagcgacggaccacatcggcgggcggatgcacaagccgaacgggccggcgacgccggtggacatggtggtggactactacaagttcgactacgagttcgcggagccgccgcgcgtgaccagcctgcagaacaccgtgcctctcgcgaccttcagcgacttcggcgacgacgtctacttcgtcgccgaccagcggggctacgaggccgtcgtctactacctcgccggccagtacctcaagaccgacgataagtctggaaagatcgtcgacccgcgcctgcagctcaacaaggtggtgcgagagatcaagtattccccgggtggcgtcaccgtcaagacagaggacaactcggtgtacagcgcagactacgtcatggtttctgcgagcctgggtgtcctgcaatccgatctcattcagttcaagcccaagctacctacatggaaggttagggcgatctaccaattcgacatggccgtgtacaccaagatcttcctcaagttccccaggaagttctggcctgaagggaaaggaagggagttcttcctctacgccagcagcaggagaggttactacggagtgtggcaggagttcgagaagcagtaccctgacgccaatgtcctcctggtcaccgtgaccgacgaggagtcgaggcgcatcgagcagcagtcggacgagcagaccaaggcggagatcatgcaggtgctgcggaagatgttccccggcaaggacgtcccggacgccaccgacatccttgtcccgaggtggtggtccgacaggttctacaagggcaccttctccaactggccagttggcgtcaaccgctacgaatacgaccagcttagggcaccggttgggagggtatacttcaccggcgagcacaccagcgagcactacaatggctatgtccatggagcctatctttcaggtatcgactccgctgaaattctcatcaactgcgcccagaaaaagatgtgcaagtaccatgtccagggaaagtatgactaggaagctacagcaaattgatttaaagctccagcaaattgagcagtgtggatgttgcat

SEQ ID NO: 99870 - DNA, 921 bp, Zea Mays
tttttttttttttgatgtgattagtccttggtgagctggtccggatggaccttttggtaagtgagggaccatgcatcccatcacaatgggttatgatgattagcctttagatgtgtgtatatatatgaggggtgagaggggggaggggcctggggagcaacacaagcactccacactgctgtgcagaacgagagcgtaaccatcagtactcaatagttagagcgaccaatagatgagttcctccccgtcctttggtctcctggccttagcagcagtactcctagcactgaacttagcacaacatggctccctcgccgcaaccgtcggccccagggtcatcgtcgtcggcgccggcatgtctgggatctcggcggcgaagaggctgtcggaggccgggataaccgacctgctgattctggaagcgacggaccacatcggcgggcggatgcacaagacgaacttcgccggcatcaacgtcgagttaggcgccaactgggtggagggcgtgaacggcggcaagatgaaccccatctggcccatcgtcaactccaccctcaagctccgcaacttccgctccgacttcgactacctcgctcagaacgtctacaaggaggacggtggcgtctacgatgaagattacgtccagaagagaattgaactggcggacagcgtggaagagatgggggagaagctctctgccactttgcacgccagtggcagagacgacatgtctatccttgccatgcagcgcctcaacgaacagtacgtgtgtcctatatatacctgcagctcctcaacacatacatacatacatacatacaacaacagctgaatgcaatgcaatgcaatgggcatgtgcatgcagccagccgaacgggccggcgacgccggtggacatggtggtggactactacaagttcg

SEQ ID NO: 99871 - DNA, 792 bp, Zea Mays
atgcggatgtggcatgtccttcgcggcgcaattgtcgctcttgtaaccgtcgtgctcctctctatgctgggaccagggagcaatgaccgagtcgttgaggttgaggggtcctcctcctcctccatggcggacgtgtacaaaggcgagctcacgccgctgaagaggcacattgccttcttcgactgcaataaggacgacgccatctacccctccgagacataccaagatggtatatgctttcaccttgaaacaggctttttaaatggacttttagagaatagctttcatgtgtcatttaagttagtagggaactatcaaaaacaaagagattcgagtgcttggaatagagctgaacagaaatgtctgaaagggattgatgtcataatttatgccatacaagacaacattgtcaggccgaacttgaacattgggatggacctttggactgattctccagttaaagcagagacctctggacagggtgaaataaatgctgcgacgcattcccatcatggcagcactttgtcgatgatggatgagcgagaactgaaaagggagagaagaaagcaatctaacagagagtcagcgaggagatcaaggctacgcaagcagcaagaatgtgaggaactagcgcagaaggtaactgacctgaccgtcgtcaacggcatgctcagatcagaactcgacgagcttaagaaggcctgtgaagacatggaagcagtgaccagcatggtaataaaaacagcactggtagcaatgggtagtggcagattgacacaaggaagttcctga

SEQ ID NO: 99872 - DNA, 1566 bp, Zea Mays
atggcgctcgcaaaaaccctcctactcgtgcttgtcgtcgccgccgcatggacggcggcggcggccgcgcggcaccgcaggagccacgaggattactatgagaatgtgtttgatcgtcagcaagctgaccgggtggagtccctgccggggcagccatcggaggtcgggttccggcatttcgccggctacgtgacggccaacgagtcccacggccgcgcgctcttctactggttcttcgaggcggcgcacgacgtggcgaagaagcccctcgtgctctggctcaacggaggaccgggatgctcgtcggtgggatatggagcactggaggagctgggtccgttcttggtgcagaaggggaagccagagatcagcctcaaccctaattcatggaacaaagaggcaaacctgttgttcgtcgagtctcctgcaggcgttggattctcctacactaacaccaccaaggatctcacccaatttggcgatgagctcactgccacggacgctcatgccttcctcttgaactggtttaagaggttcccgcagttcaggcaccacgatttctacctcgccggggagagctacgcggggcactacgttcctcagcttggcgtgaagatcttggagggcaacaagaaggcgcacaggaaggatcggatcaagctcaagggcatcatgatcggcaacgcggccatcgactcgagctccgacgaccgcggcctcgcggagtacgcgtgggaccacgcagtcatctcggacgaggtgtacggtgccatcaagaaggagtgcaccttctccgacgacggcgacgagagcgacaagtgcggccaggcctggaacgacttcttcaacgtcatgcgggacatcgacctctacagcctctacacaccggcgtgcacggacgccatggccaacgccagccgcagcaactcctcctcggcatcccgacgccgctcatggaacctcgccgacacgccgctcgctgtaagatcgacgactattttgtccgatccatggcctacatctacatacaaggagctgatgactggtattttatgtatgtatatgtacatgcagaaggttcaccgggggatgccgtacaacacgtacgacccgtgcgtggacaaccacgtgttcgactacctgaaccgcgccgacgtgcagaaggcgctgcacgccaacgtgaccggcatcccctacagctgggagccctgcagcgacgcgctgagcaactggacggactcgccggcgtccacgctgccggccatcaagcagctggtggacgccaagctccgcgtgtgggtactgagcggcgacacggacgaccgcgtgccggtgacgtcgacgcggtactcgctgcgcaagcttgggctggccaccgccaaggagtggcgcgagtggttcaccaccgaccaggtcggcggctacacgctcgtctacgacggcctcaccctcgtcaccgtccgcggcgccggccacatggtgcccatgatcacccccgtccaggccagccaagtcttcgcgcacttcctccacgggagcgagatgccggccaagcctgtcgtctag

SEQ ID NO: 99873 - DNA, 595 bp, Zea Mays
gagaatattttgatcagcttacgtacgtacccactcaaagagatagatcctgtgttcctccaaggaattgtcagtgtttggtcgacctgcgacagtctccattgccaataccccgaaggcgaagacgtcggccttttcagtcagatggcctctcattgcatactcaggcgccaggtagccacttgacaacggataggaggatattcagtcagatcagcattcgcagctatatacacaatatgtgcaagggtggaatcaatgcacttacaacgtgcctgcgattttagtgctgacatgagtcttcttctcatcaaagagcttggcaagcccgaaatcggaaatcttgggcgtgaggtcggtgtcaagtagaacattgctggccttgatgtccctatgcacgatgcgcacgctggactcctcatgaagataggttaggcctcttgcaatacctaaaatgatctcgaagcgagttggccagtcaaggatcgtaccactgtcacctgtatattgaaaaaacgaaaaccttgagaaatgtattttctatataaatagaaatgtgattaagggtgatgagtgaaagtgagcacaccaaaga

SEQ ID NO: 99874 - DNA, 1226 bp, Zea Mays
aaaaaaacaaattagatagagctcgccgagcaagcaagcaagccaactcggccgtccgaacgaaagcgaagcgcggccaaactcactcgctaaacgctcccgttctcctccgcctgcccccaccggctccccttgtacacgagcgccggagacgccatggcggcggcgcagccgaagccggccaagaggctgggcggcatggcggaggcgctcgccatcgccgccgacctcggattccccgcctctaccacgcaggaagatcagactagctccgacaaaagcgatgatttggtgaaggttttgagggaactgactgtcgtgcagaggaacattgccaacttgcaagtggagctacagggaagaaaggatgataaaaacattgctcatttgactcatgtgagtgagatggaaaagaagtgcgagtctttggccagaatgactgcaattttgaaagatgtaattcagaacaaggatcgtattattgctcggctgcaacagccttattcccttgactgcataccagttgaagctgaataccagaaacaattctcggagctacttctgaaagcagcaagtgactatggggcattgacagcatcagtcggcgatttccagtggagccaaaactttagggaatcaccagctgtctggggggaaatgctgcgaccgattcctgctgcacttgcttcctgcacccggttcttcgaggcaatgtctgcgatgagggaatccttttctactcttcagaaactacgcgttggccattcctctctgtcaataaccccaagtgactccagcgacgattcaaagttcttgacgccacctcagtggagagacggctcgatactcgatagctggaagcaaatggatgacatcaacctggagagcagtggaattgacgccatgaatcagaggaggttgtcttggccctccatcaagagggacccgtaggtcgcaggtcacccattggatttaggttcccatgttacataaataggattccaccttgtgtagttggcattgattctctgtatttttaatccgatcacctgcacccatttggcatgttcgacttgtgagagatggtctataagttccttaaatcaatgtcgtggcaaaatttgatatgttttaggcccctttggcagggcaacttttgctctaactttgttattgtttacataagccgtactaaacagtatttttaaaataacttttcattaatt

SEQ ID NO: 99875 - DNA, 798 bp, Zea Mays
gaaggaggctagttggaacacttgtgagcatattggagcctttcctctccctctctctcactcatattggttgggattgcattctagtgagattgagagccatctagtgcattgcatcaagttgttgatctttgaggcactagggagatcatcaagtgaggtcgttggcttgttactcttggaggttgtcgcctcctagacggcttggtggtggttccccgtgagctcttcaaaggagactgtgaagaggccgcggtggtgattgtgagaggcgttgtgcttgcctcgccggagcggtgaaaagcaactctagtggaatcgaggtttgagggttcattgaccaatccggcttaagagatcaagtggagacttgatagaggagcggttgggagctttgaatctacctcaacgtggactaggggtgaccggcaagtcatcgacaccacgggaaaaaatcattgtgccacgtgtcatcatcttcccgttggtttgcaactttcctcactagcttgtatttacttgttcatatacttatgctagtgagtatttgttgctcgtatatgctcttgtatatctagtcatatctataataaaatagttgctcacttgttgttagcttgtgtagctaatctgttttacttagcttgtgtagctaagtagttgtttctctctagtagtgcttgtgctttgtgctctttgcttactagtatgtttaggagctatcggtgtgcttagaattacatttgcataatttgtatgtcgttgctaactagatttgtatgggagagcactttcact

SEQ ID NO: 99876 - DNA, 1629 bp, Zea Mays
agacgaggaagcaaagaaaacccaacgcaaaagcaacaaacaactcccaaggtccaaagcccacccgtactcatccgagatccccaaccatggccgtcggcgacgtggagacggcggcgccgctgctgcccccgccggcgtctgccctggcggacgagccctccgcgggcccgcccccagacgaccggctcggcatcggctacctcatcttcttcaccctgggcgccggcttcctgctcccctggaacgcgttcatcaccgccgtcgactacttcgacttcctctacccgggggcccccgtcgaccgcgtgttctccatatcctacatggtctccgccttactgcccctgctcgtcatcgtgctcttcttccccaagtccagcgcccccatccgcatcaacacggggctcacgctcttcacgctcacgctcgtgctcgtgcccgcaatggacctcatctacgtcaaggggagggccgggctgtacggagcgttcgatgtgactgtcgccgccacggctctgtgcggggtcgccgacgcgctcgtgcagggaggcgtcatcggcttcgcgggggagctgcccgaacggtacatgcaggccgtcgtcgccggaaccgccgcctcagtacacatttctgcatggacttcattctgcaggagtgcttgtctcggcactgagagtcttcaccaaggcactgtacccacaggacgcgaacgggctaaggcaaagcgcgatcctctacttcgtggccggcatagtcctcatggtcatctgcatcgtgtgctacaacgtggcggacaggctcccggtcgtgatatactacaagaacatgaagaagagggcgcagaaagcggaggtcggcggcggcatgacgggccccgcgtggaggtcgacgctgtggagcatcgtcgggaccgtgaagtggtacgggatcggagtggcgctcatctacgccgtcacgctctccatcttcccagggtacatcacggaggacgtgcactccgaggcgctcggggactggtaccccatcatcctcatcaccgcctacaacgtgttcgacctcgtcggcaaggccctgcccgctgtctacctcctccagaatggcagcgccgccatcgcggggtcctttgcgaggctcctgttctacccgctcttctacggctgcctgcacgggccgagctttttccgcaccgagatccccgtcaccgtgctgacgtgcctcctggggctcactaacgggtacctgacctccgtcctcatgatcctcgcgcccaaggctgttcccatccaccactcggagactgccgggatcgtcatcgtgctgttcctcgttgttggccttgtcattggttccattgtggcttggttctgggtcatctgataccggggtacgttctctgtcacgtcgatgtatcatagcaccatgctcgtgttcttttgtgttcgatttgccacgcaatgacaacttgttagtgtatactgtaacccaggtgaaaagatttccgaaatgtgtaatttgcaactcttggaattggatttgaaggtgacctaatgtcaatgtgaagaatctcggctccttatcaaactcttcccatttcctctttactgcaacatcgtacctgttgctcaa

SEQ ID NO: 99877 - DNA, 1598 bp, Zea Mays
agacgaggaagcaaagaaaacccaacgcaaaagcaacaaacaactcccaaggtccaaagcccacccgtactcatccgagatccccaaccatggccgtcggcgacgtggagacggcggcgccgctgctgcccccgccggcgtctgccctggcggacgagccctccgcgggcccgcccccagacgaccggctcggcatcggctacctcatcttcttcaccctgggcgccggcttcctgctcccctggaacgcgttcatcaccgccgtcgactacttcgacttcctctacccgggggcccccgtcgaccgcgtgttctccatatcctacatggtctccgccttactgcccctgctcgtcatcgtgctcttcttccccaagtccagcgcccccatccgcatcaacacggggctcacgctcttcacgctcacgctcgtgctcgtgcccgcaatggacctcatctacgtcaaggggagggccgggctgtacggagcgttcgatgtgactgtcgccgccacggctctgtgcggggtcgccgacgcgctcgtgcagggaggcgtcatcggcttcgcgggggagctgcccgaacggtacatgcaggccgtcgtcgccggaaccgccgcctcaggagtgcttgtctcggcactgagagtcttcaccaaggcactgtacccacaggacgcgaacgggctaaggcaaagcgcgatcctctacttcgtggccggcatagtcctcatggtcatctgcatcgtgtgctacaacgtggcggacaggctcccggtcgtgatatactacaagaacatgaagaagagggcgcagaaagcggaggtcggcggcggcatgacgggccccgcgtggaggtcgacgctgtggagcatcgtcgggaccgtgaagtggtacgggatcggagtggcgctcatctacgccgtcacgctctccatcttcccagggtacatcacggaggacgtgcactccgaggcgctcggggactggtaccccatcatcctcatcaccgcctacaacgtgttcgacctcgtcggcaaggccctgcccgctgtctacctcctccagaatggcagcgccgccatcgcggggtcctttgcgaggctcctgttctacccgctcttctacggctgcctgcacgggccgagctttttccgcaccgagatccccgtcaccgtgctgacgtgcctcctggggctcactaacgggtacctgacctccgtcctcatgatcctcgcgcccaaggctgttcccatccaccactcggagactgccgggatcgtcatcgtgctgttcctcgttgttggccttgtcattggttccattgtggcttggttctgggtcatctgataccggggtacgttctctgtcacgtcgatgtatcatagcaccatgctcgtgttcttttgtgttcgatttgccacgcaatgacaacttgttagtgtatactgtaacccaggtgaaaagatttccgaaatgtgtaatttgcaactcttggaattggatttgaaggtgacctaatgtcaatgtgaagaatctcggctccttatcaaactcttcccatttcctctttactgcaacatcgtacctgttgctcaa

SEQ ID NO: 99878 - DNA, 113 bp, Zea Mays
caaaatagtaccaatatacctaaaaaacattaaaactcaacaaaatacaagaaagaaacaccacgatatacaatatggtcggtatatatgcatcaaatatcatcttgtaaaac

SEQ ID NO: 99879 - DNA, 483 bp, Zea Mays
atgctctccagcctgacgaagatcaagagcctgtccaggagcatcttctcgaagttgtcgtctttcttgtggatgtccttgtatccataccttgcgacgcagcggaacatgtggtagttctttggcccgatcctcttcatgatgaatcgttcctcggctggcaccgtgtagaccgggaggtacttgacgcagacaaagacaaccaccgagtggatggcagggaggttggtgacgaaatgggagaagatgtgcgggacgccactcgccagctctgtgtacacgaagcctatcccagggaccctgacaaggccaaggctcggccctagccccagaatccacgccatggagaccttgctgtgcatctcaaattcgtagcgcttcacagtgcagaaatgccacacgtgcatgatgacgaagaaggttattgcgatgactagtggaacccagccaccttgatccactttatttatgcacgccgtgaag

SEQ ID NO: 99880 - DNA, 754 bp, Zea Mays
atggaatagaagcccaaaaaggacttcataagtattaacttatttcaaatcactaatagtccaatacagctaccttggcagcagctcggatcaatgtaggcccaccaatatcaatattttcaatgccatcctcaaaagatattgcacctgaggtgaccttatcatagaatggatacaaattcactacaaccacatcaaatgtccctgtgaacaaaaggaaggccctagtcaacttacataacacactacaatgattgtcacctcatcacacgacacttgacatgtcattacaatattcaatagaaaattgcacaacgaactaaagaactcaccaatgccatgctctttcagtgctttcagatggtgctcctggtctcttcgcgcaagaataccaccatgtatactggggtgcaatgtttttactcttccatcaagctgaaacaacacaaaaaataagttagtggatatgaaaatatggaatttatgctgttacttaaagctctcaacatgatagtcaacccaacaatgtttctgcttttaacaatcagtgaaagggaaaaaggttagactcaaatggaacaagagcatctagtaagcatggaattacaaagttaaatgcagtgctctgaccagttaattcagacaaaccgtttagagaattgaggcggcacataacagaagaattttggaatggtataggattcttaatgtacttttgaaaaatacaaaaagagtaaagagttacaactattac

SEQ ID NO: 99881 - DNA, 2750 bp, Zea Mays
gatataaaataaactgttgtcgctcttaaatttttcgataagagtatacgaacatcaggacatgtatataatactgcatgcacgtgtttattgtcaagatgtcatgaccatcatcaaagcgtggcggccggatgcatgggtggacgtcgacgacacagctcatgagtactcgaacgacagacgacgacgtataggaacgatggccgtgcatgctagctgcggcgtccacacagctcggcgcgcgtacgcgtacatgtggtgcattattgcatgtagtgtagacgtatagtagtacatatttagcgaccggccacgacgtcgatccttattaatttaattaaaggccgatatagctagcttgctagatcctagagcctagctagctagcactccctgatgcacttgcactggcgcatgatgccgtcgcagttgccgccgccgtagccctcctgcaagcacacctgcgcgcagttgtggtcggacatgcagacccccttgaagcccgcgctccggcgccggcacacgcgcgcctccgccaacggcgccgcctcctctgcatgcattgcaggcacgcgtagtacgcatgatgatgtgtgcgtgtgtatatatatgttagtggtgtagctatagtgatagtgacgtacgcgcaacgacgatgaggagcagcaggaggacggccacctgcggcgtcgccaccttcctgatcgtccacatattccggccggctctgctgcttgtgcttggtcgactactgatgtgggatgagcgtcagatcgtatgctggatgaccctgcctgcttgttggctcgcagatataggcgcggccgggcgcgcggccggcggtggaccgtggacggcgcgcgcatgcaagagcggcgacgcgtggcgagctgcggcggccgcgcatgcgcacgtggctgcccgcacgggctgcatgcgcgccaggtcagctaggggcagcacgctgagccgagtgcgtgccgtacgtagcgtcgccagcagctgattctaactttctgttctaaactttctaggtgcatggtaccgatccacccacccacccctcctcgcctgtctgccacgcacgggatcggaggaggttgtccttgacgtcgtctcgagtcgacgacgagctcgcagcaccggccgctagctggcctcacgcggtgcggtggcagcaggtggcagggagcgagccgccacgtgccgcgctgccacgtgagtataagtaccctgctctgctatatagagctcgcaactcgctggccatagatccattgattgatcggacggacgcgcgtctccggtcccgtccgtaataacactgatccgatccacgccggccggcgatggagctcatcaagtccagggcgaccgtgtgcgcgctcctcctggcgctgctcctgctctcacactacgacggcgggacgacgacgacgatggtggcggaggcccgggtgtgcatgggcaagagccagcaccactcgttcccctgcatctccgaccgcctctgcagcaacgagtgcgtcaaggaggacggcgggtggaccgccggctactgccacctccgctactgcaggtgccagaaggcgtgctaagcaaagctcttgaaacacccttggcttgccagaactgaactgtggtagtactaagtaacacccttggctagctgtgcacaacctacgtaccgtgcatgcatgtaatgtggtgtcatgtaacgtgacagcaataaatattaataacaataataacacggcatgtagcctttgcatgcttctagcagcagactgtgcgatcccaccggtcagcgaccgtttccgatttccatccaccgcaagagttagtattaagctcaatcaacctcttgccaggctgacgacgtcatatatacaaaccgggacccaccgacccatcctctcgagaggcgacatttggttgtataccatgttatctcatgtgatcaactactaacagttatttccaacggacacattattaaaaatcacttatattcttgtatataaactatagttcctgcaatacagtgaacagttctgccatttgtatctttctctactctttgccactgagtatccagcaccatcagagtctccctagtagccaagaaacgccagccggcatcagcgctgggatgaaacgccagatccttccttccagccaccggccagatcgacgcagctatatagaggtccctcccatcgtccgtcgtcacggtctccgctgccaccgtcgccgtcgatcagtgcctgaagtgccggacgccggtgaagacgagggccaccccgtacttgttgcagcactccacggcgtcctggtcccggatgctgccgccgggctctgcgatcaccgccacgccgcgctggcacgcctcctccaccgcgtcgttccaagctgcatcattccagtccagttcagcaacacgctaataaataacagacgctgcatttttactattcttcgttgcatccagaatcagattcacacagccagcaactacgggcgtgcttccacgtacagttcacgagaaagttaggggcatctgacagagctcctttcattctctgaaatagaactactgctgacgaaaaaaatctgaactatttcatggtgggagttaagtaaatttagtctctactttgtattaggaagtgggagcaaaaaaacctgcttcccatcactctcaacctactccacaccctttaacccctcataaatcactttgcagccta

SEQ ID NO: 99882 - DNA, 1132 bp, Zea Mays
aactttctgttctaaactttctaggtgcatggtaccgatccacccacccacccctcctcgcctgtctgccacgcacgggatcggaggaggttgtccttgacgtcgtctcgagtcgacgacgagctcgcagcaccggccgctagctggcctcacgcggtgcggtggcagcaggtggcagggagcgagccgccacgtgccgcgctgccacgtgagtataagtaccctgctctgctatatagagctcgcaactcgctggccatagatccattgattgatcggacggacgcgcgtctccggtcccgtccgtaataacactgatccgatccacgccggccggcgatggagctcatcaagtccagggcgaccgtgtgcgcgctcctcctggcgctgctcctgctctcacgtaataaaaaaaagcatactgatttattcgttgatttaattcacgtattattcttaatttctgctgcctcatggactcttcctccttccgctatccacgcacagactacgacggcgggacgacgacgacgatggtggcggaggcccgggtgtgcatgggcaagagccagcaccactcgttcccctgcatctccgaccgcctctgcagcaacgagtgcgtcaaggaggacggcgggtggaccgccggctactgccacctccgctactgcaggtgccagaaggcgtgctaagcaaagctcttgaaacacccttggcttgccagaactgaactgtggtagtactaagtaacacccttggctagctgtgcacaacctacgtaccgtgcatgcatgtaatgtggtgtcatgtaacgtgacagcaataaatattaataacaataataacacggcatgtagcctttgcatgcttctagcagcagactgtgcgatcccaccggtcagcgaccgtttccgatttccatccaccgcaagagttagtattaagctcaatcaacctcttgccaggctgacgacgtcatatatacaaaccgggacccaccgacccatcctctcgagaggcgacatttggttgtataccatgttatctcatgtgatcaactactaacagttatttccaacggacacattattaaaaatcacttatattcttgtatataaactatagttcctgc

SEQ ID NO: 99883 - DNA, 566 bp, Zea Mays
aacatgatctgcactatcgatgcatggcaaaagcgcgatgctcctctctacggccctaagtttggtactccagtgtatatttggtggagcgccactcagcctaacttagctttatcaaaaacaggagcatcaatacttgaatgtgtcgtaatgtgggatccccatgaagttgaatatctacagtagttctaggaggtggtacattccttagaacctgttttggtgaagaatacccaatatattcaaattttggaacgtttgttggaacttgagagatgctttatctttcgagtgccatggattgatgacagaggtgaagcacatgtcaatatagttctctgttccagttcagtcatgtgtcagatccatgcaggggtggtcttcggtttcacccacccatgagctttagtgtggcaaagtgtctggcctttgaacatgtaatattgtacttgcccaaacttccctttcattctagaacacataagatatttgttttttccttgtttacaagacattgtcatagccactctacgtgaactatgaaggtgcatttgtgatgctgataa

SEQ ID NO: 99884 - DNA, 2029 bp, Zea Mays
ccgaactgcactgcagactgcagagcacctctcctgtctcctcatctcacgctgacaagatccaatcacgacgctaatcagtcgtcctaattaatcggcggccccgtgatcggatcgtacccgccgcagatcaccactgtccaagtgcccagtcgtagatcccgtgatcttttttttctcggtggggttgctgctgcggcttgaaagatgacggagatggtggtggcggctcggacgccggcccccgcggcggggaggtggggcgcggcgccgccgcaggagctgctggagaggctcaaggactacggccaggagggtgccttcgccttctgggacgagctcgcgcccgaggagcgcgaccgcctcatccgggacattgagagcctagatcttcctagaattgatcggattgtccgatgctcgcttagatcacaaggtgctcctataccaacctttgagcctgttcctgagtcaagtgtctcgacagtggatgacagaactcctgaggacaaagaaaggtggtggaggaggggcttgagagccatttcagaggggaagttggctgttgttttattggctggtggccaggggactaggcttggcagttctgaccccaagggatgtttcagtatcgggctcccatctaggaagtcacttttccaactacaagctgaacggattttatgtattcagaagctggctgcacagtgcactgatgccccaggtagcacagtgcaaattcactggtatataatgacgagtccttttaccgatgaagtgacccgaaagttctttgaaacccacagatattttggtttggagcctaatcaagtgacatttttccaacagggtactattccatgtgtatctcatgatggaagatttattatggagacaccatataaggtagcaaaggctcccgatggcaatggcggagtatatgctgctctaaaatctaaaaggttgctcgatgatatggctgcaaaaggtgttaagtatgtagattgctatggagttgataatgtattggtccgtgttgcagatccaacattcctaggatacttcattgacagaggtgtatctgctgctgctaaggttgtcaggaaggcatatccacaagagaaagttggagtatttgttcagcgtggaaagggtggacccctctctgtagttgaatacagtgaaatggatgcagctatgacaactgaaatcaatcaaactactggccgccttcgttattgctggagcaatatctgcttgcatatgtttactttggattttctgaaccaagtgacaaacagtcttgaaaaggatagcatttaccatctagccgagaagagaattccttcagtccatgggtacacatcaggattaaagcttgaacaatttatatttgatgtattcaactattctccttcaacagctctttttgaggttttgcgtgaggaggaatttgcgccagtgaagaatgctaatggtgcaacttatgacactcctgacagtgccagattaatgctgcttcggctacatagccgctgggtggttgctgcaggtggcttcttgactcattctgtgcccttgtatatgacaggagttgaagtttctccgctttgctcttatgctggagagaatctagaagctatatgcagtggaagaacattccatgcaccaagtgagatttcattctaggcatagtagttgttgcaagcaatctgaatacaggaagatgagatcaggccaattttgattacaacatgactactcttgcaaatagaatgttgatattagtaaactattgtatgttatgcaaggatcaaatattgtaacgcaacacctgaagttgcctcctttctcccctagcattaatgtgtatctgcctttcgaatgtagattatgacatgcttttgtgtaataattttttttgaaaacagcaaatgtaccaaatatttattatctttgaacaattgtaattcttgattctatgaactatgatgtaagaaaaatcaaacaatgagatgttctattttct

SEQ ID NO: 99885 - DNA, 712 bp, Zea Mays
ccgaactgcactgcagactgcagagcacctctcctgtctcctcatctcacgctgacaagatccaatcacgacgctaatcagtcgtcctaattaatcggcggccccgtgatcggatcgtacccgccgcagatcaccactgtccaagtgcccagtcgtagatcccgtgatcttttttttctcggtggggttgctgctgcggcttgaaagatgacggagatggtggtggcggctcggacgccggcccccgcggcggggaggtggggcgcggcgccgccgcaggagctgctggagaggctcaaggactacggccaggagggtgccttcgccttctgggacgagctcgcgcccgaggagcgcgaccgcctcatccgggacattgagagcctagatcttcctagaattgatcggattgtccgatgctcgcttagatcacaaggtgctcctataccaacctttgagcctgttcctgagtcaagtgtctcgacagtggatgacagaactcctgaggacaaagaaaggtggtggaggaggggcttgagagccatttcagaggggaagttggctgttgttttattggctggtggccaggggactaggcttggcagttctgaccccaagggatgtttcagtaagtcttcccacccaagccattgaattttagttttgctttcttcaattagtgctatgaaattagacctaaaagcacacattt

SEQ ID NO: 99886 - DNA, 96 bp, Zea Mays
cattttgttgtttcagtttcagtagcgagtcagcaaggacgcggcaatatggagtttggaacatggacagttcacagatcaaatctcacaagtgac

SEQ ID NO: 99887 - DNA, 104 bp, Zea Mays
ctccgtttttcaactttgtcattttacccctccgttttgaaaacaaaactaccgtttgcccctccctctcaacgccgttagtgaaaatcagaattagtgattaa

SEQ ID NO: 99888 - DNA, 161 bp, Zea Mays
tgtgacagcaaagcctctacatttgcgtgttcaaaatatcaagaacagttccatctgcacaataacctagagcgccatgcacaggcccttttttttaaagttagaactggcttgtttacaacgaatgggtttattaggcaactgcacagaagcaaaacgtg

SEQ ID NO: 99889 - DNA, 1410 bp, Zea Mays
gaattctttgtaattttctcctgtatctggttctgttatcatcattattttcctggtgtggggcaatcatgtcagagagcgagttagcagtaataaaaccagaggcattgaaaacttatatctggcttcagtgctttgatggctccatacaacaagtggaggaagaagttgccatgttctgccctatgatatgtcgggaaataatgaaaaatgggacagggtcatctaagaatcatgctatagttctaccggaaagagttaatccggcaagtttgagtttgattcttgattattgtcggtttcatcaggtccctgggcgctcaaacaaggagcggaagtcattcgatgaaaagtttgtcaggatagacacagaaaaactgtgtaagttggcttctgcagcccttggtctgcagttaaggccactagttgatcttacttgtggagcacttgctcgaatcattggaggaaaaacacctgatgaagttagagatattttccatttaccagatgacttaacagaggaagagaaactggagccactaaaaaatttaaatgatgatcctacaattcgtttattgaaccgattgtatgcaaagaagcggaaagaactgcaggaacgccagaaactaaaggatgttcaaacacaagaagaacaaaaagacgagagatctttggatgagttactttgttttataaatggagatggagattccagaggtgggaaagcttctaagagtaagaaaaagaataaaagaaggaaagatcaagctaagaatcccacaaaagcgaactccgaacctgtaaataaggagggagcttcctgtgtggttccgtgcaaagcagataatggtaacatttctaggcatccttgccaaagtcaaaatttgcaagataccgagtaccccttcgacaatgctgaccttgacgatggacttgatcctgcaatgagggaggagattgatagagaagtggccgacttcgagatgaagttgaagctagcttggaccgaaagaatgagtttggagcaggaccaacaaatggagtcacatgttgatacgcggtggtaatggttctgtggtgggaatctctgttaggtttttttccgaatagaattttcttgatgaggttttcttttgctgttagagtcggcagaaaaccttaggcaggaaggagttttggtcgagaggtacaggatgacattgcgaggtgctattgtcatatgctgtgatttgtatgtaccctgctcttcaagaaagtagtgcccaaccatgttactgttaccccccaaagaaaggtgggtgactttgttagtgtaaaaaccagaagttttgaatctatgtatgttcattaattttgacaggaactcttatcattatgaaatgaataaaagggaaaatgatgtgttgttgg

SEQ ID NO: 99890 - DNA, 1330 bp, Zea Mays
gaattctttgtaattttctcctgtatctggttctgttatcatcattattttcctggtgtggggcaatcatgtcagagagcgagttagcagtaataaaaccagaggcattgaaaacttatatctggcttcagtgctttgatggctccatacaacaagtggaggaagaagttgccatgttctgccctatgatatgtcgggaaataatgaaaaatgggacagggtcatctaagaatcatgctatagttctaccggaaagagttaatccggcaagtttgagtttgattcttgattattgtcggtttcatcaggtccctgggcgctcaaacaaggagcggaagtcattcgatgaaaagtttgtcaggatagacacagaaaaactgtgtaagttggcttctgcagcccttggtctgcagttaaggccactagttgatcttacttgtggagcacttgctcgaatcattggaggaaaaacacctgatgaagttagagatattttccatttaccagatgacttaacagaggaagagaaactggagccactaaaaaatttaaatgatgatcctacaattcgtttattgaaccgattgtatgcaaagaagcggaaagaactgcaggaacgccagaaactaaaggatgttcaaacacaagaagaacaaaaagacgagagatctttggatgagttactttgttttataaatggagatggagattccagaggtgggaaagcttctaagagtaagaaaaagaataaaagaaggaaagatcaagctaagaatcccacaaaagcgaactccgaacctgtaaataaggagggagcttcctgtgtggttccgtgcaaagcagataatggtaacatttctaggcatccttgccaaagtcaaaatttgcaagataccgagtaccccttcgacaatgctgaccttgacgatggacttgatcctgcaatgagggaggagattgatagagaagtggccgacttcgagatgaagttgaagctagcttggaccgaaagaatgagtttggagcaggaccaacaaatggagtcacatgttgatacgcggtgagtcggcagaaaaccttaggcaggaaggagttttggtcgagaggtacaggatgacattgcgaggtgctattgtcatatgctgtgatttgtatgtaccctgctcttcaagaaagtagtgcccaaccatgttactgttaccccccaaagaaaggtgggtgactttgttagtgtaaaaaccagaagttttgaatctatgtatgttcattaattttgacaggaactcttatcattatgaaatgaataaaagggaaaatgatgtgttgttgg

SEQ ID NO: 99891 - DNA, 1722 bp, Zea Mays
gaattctttgtaattttctcctgtatctggttctgttatcatcattattttcctggtgtggggcaatcatgtcagagagcgagttagcagtaataaaaccagaggcattgaaaacttatatctggcttcagtgctttgatggctccatacaacaagtggaggaagaagttgccatgttctgccctatgatatgtcgggaaataatgaaaaatgggacagggtcatctaagaatcatgctatagttctaccggaaagagttaatccggcaagtttgagtttgattcttgattattgtcggtttcatcaggtccctgggcgctcaaacaaggagcggaagtcattcgatgaaaagtttgtcaggatagacacagaaaaactgtgtaagttggcttctgcagcccttggtctgcagttaaggccactagttgatcttacttgtggagcacttgctcgaatcattggaggaaaaacacctgatgaagttagagatattttccatttaccagatgacttaacagaggaagagaaactggagccactaaaaaatttaaatgatgatcctacaattcgtttattgaaccgattgtatgcaaagaagcggaaagaactgcaggaacgccagaaactaaaggatgttcaaacacaagaagaacaaaaagacgagagatctttggatgagttactttgttttataaatggagatggagaggtgggaaagcttctaagagtaagaaaaagaataaaagaaggaaagatcaagctaagaatcccacaaaagcgaactccgaacctgtaaataaggagggagcttcctgtgtggttccgtgcaaagcagataatggtaacatttctaggcatccttgccaaagtcaaaatttgcaagataccgagtaccccttcgacaatgctgaccttgacgatggacttgatcctgcaatgagggaggagattgataggtgagggcataagatatcttatgggttgatgcacgcagctctttgttgtgctactggcctgtttctcaatcgaaaaagcctgtttttgtacatgaaacagcaaggttattgatgcttatatactgtcattttgataagtataagctgatttctggactttgaatcgataaattctgttaaatgcttccactcatctttttctgcagttctgcttgaactttgtggttggtgcttgtgcctgtcgcttgatccacccatttactgttgacatgcatgaaacactgccgtgttttgatataacaagcgattgttcttgacaattgacatacagagaagtggccgacttcgagatgaagttgaagctagcttggaccgaaagaatgagtttggagcaggaccaacaaatggagtcacatgttgatacgcggtggtaatggttctgtggtgggaatctctgttaggtttttttccgaatagaattttcttgatgaggttttcttttgctgttagagtcggcagaaaaccttaggcaggaaggagttttggtcgagaggtacaggatgacattgcgaggtgctattgtcatatgctgtgatttgtatgtaccctgctcttcaagaaagtagtgcccaaccatgttactgttaccccccaaagaaaggtgggtgactttgttagtgtaaaaaccagaagttttgaatctatgtatgttcattaattttgacaggaactcttatcattatgaaatgaataaaagggaaaatg

SEQ ID NO: 99892 - DNA, 1218 bp, Zea Mays
atgtcagagagcgagttagcagtaataaaaccagaggcattgaaaacttatatctggcttcagtgctttgatggctccatacaacaagtggaggaagaagttgccatgttctgccctatgatatgtcgggaaataatgaaaaatgggacagggtcatctaagaatcatgctatagttctaccggaaagagttaatccggcaagtttgagtttgattcttgattattgtcggtttcatcaggtccctgggcgctcaaacaaggagcggaagtcattcgatgaaaagtttgtcaggatagacacagaaaaactgtgtaagttggcttctgcagcccttggtctgcagttaaggccactagttgatcttacttgtggagcacttgctcgaatcattggaggaaaaacacctgatgaagttagagatattttccatttaccagatgacttaacagaggaagagaaactggagccactaaaaaatttaaatgatgatcctacaattcgtttattgaaccgattgtatgcaaagaagcggaaagaactgcaggaacgccagaaactaaaggatgttcaaacacaagaagaacaaaaagacgagagatctttggatgagttactttgttttataaatggagatggagaggtgggaaagcttctaagagtaagaaaaagaataaaagaaggaaagatcaagctaagaatcccacaaaagcgaactccgaacctgtaaataaggagggagcttcctgtgtggttccgtgcaaagcagataatggtaacatttctaggcatccttgccaaagtcaaaatttgcaagataccgagtaccccttcgacaatgctgaccttgacgatggacttgatcctgcaatgagggaggagattgatagagaagtggccgacttcgagatgaagttgaagctagcttggaccgaaagaatgagtttggagcaggaccaacaaatggagtcacatgttgatacgcggtggtaatggttctgtggtgggaatctctgttagggctagtttggaaacactaatttcccatgggattttcattttcccaagggaaattagttcattttcccttgggaaaatgaaaatcccatgggaaattagtgttcccaaactagcccttagtttttttccgaatagaattttcttgatgaggttttcttttgctgttagagtcggcagaaaaccttaggcaggaaggagt

SEQ ID NO: 99893 - DNA, 132 bp, Zea Mays
atgtttttgccgacagacatatctttgccgtcagacagacttttgccgacatattcttgtgttgacggcttgtgtgtcgctaaaagtctatatgccgacagattgtctgatgttattccctatgtgcagttt

SEQ ID NO: 99894 - DNA, 1567 bp, Zea Mays
atgggcgaggtggcaccggtgattccagtcacccggaggaggacgatgtctcgcaaggcagcgggggcagtggaggcggaccgacccgccgaagatgtatctgaggagaagacatcaaagattacaatagctttgaatcaggaagctgaggcagtggcggtcgcatcaaaggaggaaaaaggctgcaactttaggtcgacagtagcagcaacattgtatattaagaaatttgatagagtacaacagttttttgagagtatattaagaaatgaacatagctatgtgtacataaacactggccctcacataacacagacaactccttcagatttgacaaaaaatgtgaacatcttgaaccttgatttgggtcttgggctattatcaaaaccaaagcttgctgacattggttggcctaggaggaggtgccgacaatgtggtgctagacggctattggtcgccaccgacgctgcattctggaggatggtcgtccatggcgatgggagattgaatggcatcagcatcggaacgaggctgacgcgagtgcacagaaggagagttgtgaaccatcttgaagtatgcctcgtcaaatgtgcactcttcattaaaatcgtctttaggatgccattcgtaaatggtaacgactgctaccttgtttatgacaaaaatatgaatacctttataacagtgtactttaaagaatgtgcccctgttatcccggattttctcttgtttaacatagatttgattctaagttgtagaaaaactagttgcactgtacctttacgactttaccatttcttgaacattgtctacaaaacaagagagtatgagttcttgaggcttaccagcctgggtgtgatcggtgctcttgtcaagctatttcagttaccagaactgtttgatgatcaagtgtcttacatggttgttccccagggcatgagaatattgaatcatcaggtggatgatgatcgcatagagtgcctaagccaccacctcaagaaagtagtgttgaaagaaattctggacaagaattctaggtgtgggccctgctcttcgtgctattgcttcgatgagaagatgcaccggtgttgtcagtttctttgggcggatctcattccttgtcgaacacaacaatcaagcatcatatttcttcatgatagcaaaatgtcgcaggttgcagcagccacaccacagacaacagctatcagagccgatcagaagcgccaagagcgagcgcctcatgtctttatattgctctcacaccctccgtttctcgctcccacccactgccactgtacttgtgttgtgttgtgttgtgtgctgcaagaagaagaggaggaggaagagcaggtgctgagaagcctaccggcgcgcgttacgacaagcatatatgggggagatcaccaagccttcgcgaagcagaagcttccgaagatggcctacgactactacgcgtccggcgccgaggacgagtggacgctgcaggagaacagggaggccttctccaggatcttgagcagcggttgatgagataagattgccaagaaacgaagtctgaggctggctt

SEQ ID NO: 99895 - DNA, 670 bp, Zea Mays
atggagcgcccaaccgtccgttccggccgcccctcggtcagctccatgacggcacgacgtcagctctccaacctgggcctcggctactccatcgccatcgcgctcggcttcctcatcctgttcgcctccttcctgctggctttctacttctgcttcggccgcggcggggactactgggccggggaagcagtcaccacggcgtccagctccggccacctctccatcaccgtcccgcgcgtgctcttcgtcgcggaggggtccgagtcccccgaagacgacgcttacccctcctcctccgccgccgcggcctgctcccccgtcgggctcgacgcggccgctatcgcttcctaccccaaggtcgccttctccagcagggccgccgaggccaacgccatgtgctccatctgcctcagcgagtacagggacggcgagacgctgcgcgtgatgcccgagtgcaggcacggcttccacgtcgcgtgcctcgacgcctggctgagccggagcgcgtcctgtcccgtctgcaggtcctctcccgtcccgacgcccaatgccacgccgctcgccacgccgctctccgagctcgtcccgctctcgcagtacgccgccgaccggaggcgccgcaggtgatgggcatggacacatgacactggtgcaacgcattgctcttcct

SEQ ID NO: 99896 - DNA, 1818 bp, Zea Mays
tccggcccctgcccgaatgttccgtgcctgccagaagtagaatcattcgattccccaaagcgaaatccgcagcctcgcctctctcgccattttccaggcgcgcgctcggcgcggccgccgccagcgatacagatccttgcacggacacaagggctccgcgctcccaccggatcggatcccgtcccgatggctcccactcccactcacacggcggcggcggtggcgctcgccgcgcacgactcgtccggccacctcgcgccgctcaccatcacccgcaggagcaccggggacgacgatgtagcgataaagatcctgtactgtgggatgtgtcactctgaccttcacagcatcaagaacgagtggcacaacgccacgtaccccatggtccctggtcacgagatcgccggagtggtgacggaggtgggcaagaacgtgaccagcttcaaggccggggaccgcgtcggcgtgggctgcatggtgaactcgtgccagtcgtgcggcagctgcgacgaggacttcgagaacagctgccgggccgtcatcttcacctacaactccgtcgaccgcgacggcaccgtcacctacggcggctactccagcagcgtggtggtgcacgagcgcttcgtggtccggttccccgacgcgatgccgctggatcggggggcgccgctgctgtgcgcgggcatcacagtgtacagccccatgaagtaccacggcctgaacgtgccggggaagcacgtcggcgtgatggggctgggaggcctgggccacgtcgccgtcaagttcgccaaggcgttcggggccaaggtcacggtcatcagcacgtcgcctgggaagaagcaggaggcgctcgaccggcttggcgccgacgccttcgtcgtcagcaaggacgccgaagaaatgaaggcggctgcgagcaccatggacggcatcatcaacacggtgtcggcgaacctcaccttggccccgtacatgggcctgctcaagcccaacggcaagatgatcatggtcggcctgcccaccaagcctctcgagatcccgccctttgatctcatcattgggaacaagaccctggccgggagctgcatcggcggcatgagggacacgcaggagatgatcaacgtggcggccaagcacggcgtgacggcggacatagaactggtggccgcggactacgtgaacacggccatggagcgcctggccaaggctgacgtcaggtaccgcttcgtcatcgacatcggcaacaccctcaagaattcagagtgatcagacctaaaacgccggcgacacctctactgctgctgcttgttgtgccctgtcggctttatacgatgaaccgcgtccttttttttctgtgtcagtgataatattttagctaaggcagacgtaaacgtagttcgcgaggattgccttcccatgcatgttatggaagttggatgcttttattgttgttgccgtaaaacgagatatgatgcagcatttttttattttccctctatcatttggttgctgcatcctctcggttctaaattataaattatttaagttttttaatgtatatttttcattgaatatctagataatactttatatttagacagtgtcggtcttacaccaactcaagcaggccgtgaaaatggacgtacaaaacattgttttatactgctatagatagtcttgtttgtttcacccttaatccatgtggatttttgtggtattaagtcggtttaaatccatattaaattaaaatacaatcccattcattccaatacatttgaatccacatgaaattggaataaccgaataggctccttgttc

SEQ ID NO: 99897 - DNA, 518 bp, Zea Mays
ttttcaagctggtttcacgaacttggatacaaatgcaataatacaagaatgagatgaatatttctgtatttatttatttgttgtttgacccttataattcctattaattgattatgcacaaagaaagagaacctaataaatctccaaaggctccacaattccaaacacttttatatcaatatatgcatttatttatttttatattttttttattacactaatttttttagggctttacaataatgcatatatatcattgactttttgcctcatgctcgataataatcttgcaacagttgcgccttgcttccttcacaacactagaattttctttttcttcgcctctttctcttcagttgcttctgcaatctctttttcaggctcttcacaggctcttcagttaggttctctggcatcggaacattctcaattaattctagttgaggcattctctcttctggttgtgccatctgcaaatgagaagtccttaagcaacattggaacaacattcatatttg

SEQ ID NO: 99898 - DNA, 1616 bp, Zea Mays
gcacacacacagccagctgcacaaacatacgttcttggatctcagctcgcgcgcgccatggttgtggaggccaactcagggagcacgctggcggccgtcggcgtggccggcaccggcagcagcatggccgtgcacggccaccagctttcgaccgtggtgccgagctcggtgaccggggaggaggtgaactacgagctcgcggacgccgacttgctccacaagctgcattacgtacgcgcggtgcacgtgttccgcgcgccgaccggcgtcgcagcgcctccgctcaccatccgggagctgaaagagcccatgttcccgtggctggacatgtacttccccgtcagcggccggctccggcggcgtcaagcggccgagggcgaagaggccgccgcggcggcggtggggcggccctacgtgcggtgcaacgactgcggcgtgcgcatcgtggaggtcacctgcggcgccaccgtggagcagtggctggaggcggaggcggagcgcggcgggctgtgcaaggcgctggcctacgacaaggtgatcgggccggagctcttcttctcgccgctgctctacgtgcaggtcaccagcttcaagtgtggggggatggccctcggcttcacgtgggcgcacctcatcggcgacatcccctccgccgttgccagcttcagaaagtgggcgcaggtcctcggcggcaacaaggccccggcgccaaccctgcgagacccactcgccgtgccgccgtcggccccacctaccagcgtgacggtcccgccgtcggtcaaggccaccgcggcccccgtcggcgatcactgggtggtcccgaccacccatgacatggtgtccttctccttccacgtcaccgagcagcagctgcagggactccagctcagcgcgaccaagggtcatcatcggcgcgaggttgtgggcccgtttgaactggtctccgcgctgatgtggcgggcgctggccgcgatccgaggccccgaggaggaggaggcgacgcgcatggtgaccgtcgtgaagactggaccggcgccgacgtcggggggcggcccccgaccggcgctgaccaacgagcaccgcatcggccacgtcgtcttcgcgaccggcggctcctcgccagcgacggccgacgtggccaagctggcagcgctgctggccggcgcacacctggaggaggccagcgcggtcgcggccgccgcgttcgcgggagcggacgacgccgacgtggtcgtgtacggcgccaacctgacgttcgtggaagccgagggcctggaggtgtacgagctggagctcgcggggcggcgcccggcgcacgtggagtacgccgtggatggcgtcggcgacggcggcgcggccgtcgtgcaccgcgacgccggcgggcggggccggaccgtcgcggccgtcctgcgccggggcgaggcgggccgcctccgtgccgcgatccgtgacgcgctgcgggttgcttgatgatcttgcgggcagtagtcttgtggttttcagtacttgtcaggttgaataaattagaggatgttgtaggatgtactcttgtggcgcatatgctcgcctgtatgtggaccgatcctgcccttccatgccagtgcgtgtgtttaatt

SEQ ID NO: 99899 - DNA, 606 bp, Zea Mays
ctaataataataaacatctcttaagtcatgatatgaattcacaatagttagcttgcagatccaccatagcattccacatatgaatacagttgcttgtctgctaacaagcttcaactacttactagtcgaaacctaaactcagaaccgattcatgattaccagcacatggttccaccatgattgtcttcatggattaatagtctgcctaccgactgaatttgaatgaacaaatgagagatctgatggacctgaatgccaaatgaagcatctacagcatcttataacctttaagagagtgcacaatatccatctcaacagaatccgcacgcaatctgctaggtgatataacttcagtagttcatcattcagtcgccagaaaattaccagaaaaatgatgtcacacagcgacacagagcagttatgaaggtttctagtgccaaatcttgcagcgtgcatccttctgttgtgtttgaaagggcttctccttggtgtagatgatatccttgaatgcatcaaccagttgggcaaccaagcttgcaggatcaccgataagaacatctactaaggcgccaacgattcgcctgtcctgcgctgttgccttcagac

SEQ ID NO: 99900 - DNA, 89 bp, Zea Mays
atttcccgtgcagcgaggcaaccaggtccgatacgcgtgacacaaccttcttctccgtcgtcagaccaccgttcacccacaggtcatgc

SEQ ID NO: 99901 - DNA, 1166 bp, Zea Mays
cgcctttgaaaactacccacaccacaaagaaatcgaagaggggaacagaggagagagaagggagatggcggaggcgacggcgtacgaggagcagcgccggaggcaggtggaggcgaacaagcggaagctggaggagcttcagctccactacctctccgccgccgtcagagaggccgcagccgccgccaagccctcgccggtcaagaagcggaaggcgcgggtgccgcttgacgccgccgactccgtgatggagccactacggcggtccggccggctcgccaacctccccgataagtccgtgcaccgcgaggaggttccaactttttggagaaagattaggaggacgtatggatcagtgagaaaagatctggaaaaccgggtgtacgcgaccgacgaggcgaggagctacgccatctgtaaggcggaggaagtggagcaagagctggactccagcttccccgtcttcatcaaacccatgacccagtcccatgtcaccggaggcttctggctgggcctcccaaatcatttctgccggaagtacctgcccaagcgtgacgagacgatcaccctgctggatgaggatgacaacgagtcctacacgctatacctcgcattgaagcgaggcctcagcgctggatggagagggttcgctatccagcacaagctggttgatggagattgcttggtcttccagctgactgagagaacaaagttcaaggtaatcataattagagcaagttcttactatgaaagtgaggactgatgaaactaatagcttgtaatgtggtgtttggagcacagtttatggaggtgggctgcattggacaagcttgcatctggaaattgctgggtgtcttgaaccttttgggttacagagttatctcatgtacaaaatgtttacacagcccagtagctaccaattgctgatttgtgtacttcttgggcttaccacttgcacggttcagaaacctgcactatgtaagaggatgttgatggcaattgacctcattttgtaaatgatcctcgtttatcttggattcatttttagtgttcagtttggcagttgaccaccattgttggctttgtgtggtgttaatctacaaaaatgcgatcttgtgaattgcaccgggctagttatttgtgaggtgagagggccagggcatggc

SEQ ID NO: 99902 - DNA, 1557 bp, Zea Mays
ctgaaatcaagttagaaataagacatatgtaagaaacaatacaaaaccatcatctaatgatagaggtaaatgttcaatggctttggacgccccttcaatttcgttggctattctaattgttctggccacttggaagcctttggcttgtatggaacccttgtagagagtttgcaagatgaatagttgctgcagagttaatctaccatgaataaatgaaatactctataaaaggtgcttttggttgtgctgtttgctgtgagaaaagttgctttctgttgtgtactgtgaaaaggctgtagttagctgtctgttgctgaaaagttgaaagtcgtttgttttaaactgctgtgacattgtagatatatatgatttgttgccaaattgaccatggcgtaacattattcgtgatggctgacataattttcaccattataatattccatacttataacaaactaggaaataactaagtaattgaaaaatatatcataaaatataaagaagtccataatttatcttataaagtttgtcaatcacatagctatcttatgtagctcttgtactagccaatgtggtagctatcctatcgagaatggtgtttaactgtgtcttcttctttatcctatcgtgactggagccacaaccatgggaagaattgcgtccttaatcaaagaacatagttgagcttaactcagtcactttactaagtcttaggacatatctaacatttgaagcatccatggaacttgcattatgcccgactgttgaaggcaactgtaacagtaactgtgatttagggaataaaaatttctgtagaaagaattaaaacttgtttcaagcacggcctttttgcaggacgagattcacatgtgtacaaaggtagtctaattatttctggttacaagatgttactatggcctgctatctatgtattgcaatgctgaccaagcaatttctgttgtgcaaatggtgcaggtaatcataattagagcaagttcttactatgaaagtgaggactgatgaaactaatagcttgtaatgtggtgtttggagcacaggtaaaattcgaccttcattgtttgaaatggttgaatgagtgttttttgctttctattttctttttggcacattcttccatttcaacgttgggttctttcagcttttgatcaacaaacttcaacgcttaccacttgcattaaaactatctgtacttccattattcgtgagtgacctagtttttactgaacattgcacaactttcagaatgatgaatgcctgtcatgatgttaagatgttccttttttttactttactcagtttatggaggtgggctgcattggacaagcttgcatctggaaattgctgggtgtcttgaaccttttgggttacagagttatctcatgtacaaaatgtttacacagcccagtagctaccaattgctgatttgtgtacttcttgggcttaccacttgcacggttcagaaacctgcactatgtaagaggatgttgatggcaattgacctcattttgtaaatgatcctcgtttatcttggattca

SEQ ID NO: 99903 - DNA, 584 bp, Zea Mays
atcaatagcatgtggatcaaagttttctcatctcctttccatgacgtgtggggaccacctgtaggaggtttcctcttcaccacaacatagcagaaatcatatcgcacagccgcccctactgtacgctggaaagcagaccgccgccgttcacgccacgggcccgcgccgcaccacctactactgcgcacccagcagcgatatgccttctctcctcttctcctcctttatagctcggattactggcccattagagccagccgtttcctccatcaatggtgttcaaatcctccgtttctcatcttcaatccctattaatttggccacgaatcttcctctcctaccgcctataaaatctgagccgagcttgttctcctctcccctgctggctccggttgttctcatgctccaaatatttgctcccttgcgctgagttcgttacttcattgtcgcgaagtcatctgtgtgcgtcgtctgcgctccagcagcctgccagccagactcgtcgccggagttcgccgttcatcgccggagctacgccacccgtcatccgaagccgagccctgctcttctccacccggccgaaa

SEQ ID NO: 99904 - DNA, 961 bp, Zea Mays
ccctattctctctcctttctctctctcctccaggaagccgccgcaggtgccgtgacccgacgaccgagcgcgccgccctgcatcgaccaagccagccgcgacaggacgccagccgacctcgactccatcggccgaggaccccaccctgcgccgcgacctgaccgcccaggcaaccggacgtcccgtgcaccgaagcgcagccccgaccagcctgcgcacccaactgcgaagctcccacgccgcggccgagcccaggaaccgccacgcgacttccaccccgaccggccagcgacccgcaccctgcactcaagcccgaccgaagccgccacccgcgccgtccgcgtgaatggagccgtttctttggcgttaatagagctttaacatgttcgtttctctcccattactctcatccatgaagtcccggccgccattgatggagccgccgaccgttcacttcctcccctcggcgtctctctctccccgtccgctctataagaccgccgaatccctcctctctccttacccgaacgccctccctctctcacgctttctctctcccttgctcgccgttcgccatcgcgccggagcccgtccgtgcagcaccccggcacccgcagcagcgccacgcacctgccgtatgaagccctcctctgctctcgccgtgcccactccgttcgtcgctcgtccgccatccgtggagcctcaccggaactcatgccccaccgtccgaacgcattgccggagttacaccgttcgtcgtcgacgcgaccgcgcagcacgacgaccacactcgttccctgcccgaccgaccactccctgctcgtcgacgttcacccctgcagatgagcgaacccaaggttcaagacaaccccaacccattaatttattgtctaaattatgtgttgaattaatttatgaatttgtaaattatcgttgtaatattatgcgacttgacgattca

SEQ ID NO: 99905 - DNA, 596 bp, Zea Mays
ctgtattcttagggtgctttgccggagcctgcattatgtgttggaggaaatgctgcttctctaatactcaagcttttgaagtaatgtgctgaatttggaaaaaaaagccagaataatccatttttctcccacagatcgacataactcttgttctataggcaaggaggcaccatggtgacatatagtggaatgtccaagagacctgtcactgtcgctacctcatatttcatttttaaggatctttcgctgcgagggttttggctccagatcagtgggtgaactcagcataaaacaggagactgtagaggaatgacagactagctcttggaccttttgtgcatgaaggcaaactcaaatacgagtatgtgatagaaaaattaagtgcctttggaaacatatttgattgaagtacatctgggcaaacatggaagccggccaaagcaagttgtcaggttctgagacgaggctaggctaggggatcagagagcatgcaattgccattgatgtgtatgaatgatgaatcaaacagctggtatgacaactgtaagagtgacttggagttgtaaacaaaataaagaaaagtaaaggcagcaatc

SEQ ID NO: 99906 - DNA, 336 bp, Zea Mays
atgaccatctcggcgggcggaggcaggttgaggtcgaagtcgaacccgaggcccgccagcaccgacggcggcgaccgggagcagcagctccgctcccgctccccttcctccctctccaccggcgccgggtccaggaacaggcacggctgggtggccaccgtcgccgggaagagcccgaggcccaggccgagcgacgacggcgccgtaggcagcggcggtggcgggtggccgtcgtcccttgacgacgacgacgacgacgactcggtgctgccgctcgcgctcgcagccagagccggggccgtgcacggcgcttctcggacgacgtcgccggggtag

SEQ ID NO: 99907 - DNA, 1887 bp, Zea Mays
ataaaaaaatggcgaaatgaaattcacggtaccagggtcaaccgagcacggacgcgtaaagccaacaaggggggaccgggggagcacgaggaaaccgaggagactgacccaacccgtgcttgcggcggcgctgcgctggtgccggccacggccatgatcggcggcgggcgggcagcggatagccacccggcgtcctgctcgtcctcgtcctcgtcttcctcctcgccgtcaggcccgtcgacggggggctcccgccttcaccgcagcaagaggcgtcccgacatcctcaacatgctcatgagtgcagcatgtctcagttcatcatcttctgatactggaaaaggacaaagcaagttttcaagcaacaaagtaacacacggatttcacttagtggaaggaagatctggccatgatatggaagactaccatgtagcagagtatagatatgaaaatgatcacgaacttggtctttttgctatttatgatggacatctgggagatagtgtggccagttatttgaaagctaatctttttgacaacatactgaaagagcctctcttttggtcagaccctcaagaagcaattaaaaacgcatacagctctacaaacaaatatattctggaaaacactaggcaactaggaccaggggggtcaacagcagtcactgctattgtagttgatggtacagatatgtggattgcaaatataggtgattcaagagctgttttgtctgaaactggtactgccagccaggttactgttgatcacgaacctcataccactaatgaacgaaagaggatagaagaaaaaggtggttttgtctctacgttccccgttgctgataggtgacgttcctcgtgtaaacggccaacttgcggttgcaagagcatttggtgatcagagcctcaaggcacacttgagctcagagcctgatgttaagcatataaagataaattcaagcacagagtttgtcatacttgccagtgacgggttatggaaggtaatgaagaaccaggaagccgttgatctggtgaagtcaaccaaggacccgcaaacagcggcgaagcgactgacgtccgaggccctgggaaggatgagcaaggacgatatctcatgcattgtcatccgttttcgatgctgactcttgggtaatccagctcatccattgccctaagctgcctgtgtgcatcagcagaactgtttcctccgtatcgtagctggtagcgtctggatctgtttgcagctcaggatcagattggtgattggactggacaggttattgaccaaagaatagaagaatgctgggtttgggtgttttcagcgtctgcaggctgttctttttttcttcttctgtgcatatatacacgttggaatcaaatatataccgtcggactggagccaagaaaaaccatatatataccgccccaagatgcaaagatgatacagattatgtaagcttgtagacatgtagtagttggattatggcttttagtgactcgtgtgtgtggtgtgaattcctgtgtgtattgaagataaagttccgttgccattcacgtacggaaccagcgatatgctatgaacgggatcaacttcaaataacattcgtctctcctttataaaacaagaactctatcagaaattgcatactgccgtcgcgtatccagtggcaacagaaagctggatagcagggttgaaggttgaaagttttctttttttgtttgataagtgctagcacgagactgattcttacaaacaaagtgacatgtttgaggaacagcagactggcgagcctgtttggctagtctatctgctatcttgttgcgttgcactggaatcttgtaaaaagcaacattctgatttgatgtatctgagcaacattatggtacc

SEQ ID NO: 99908 - DNA, 1589 bp, Zea Mays
aaccgagcacggacgcgtaaagccaacaaggggggaccgggggagcacgaggaaaccgaggagactgacccaacccgtgcttgcggcggcgctgcgctggtgccggccacggccatgatcggcggcgggcgggcagcggatagccacccggcgtcctgctcgtcctcgtcctcgtcttcctcctcgccgtcaggcccgtcgacggggggctcccgccttcaccgcagcaagaggcgtcccgacatcctcaacatgctcatgagtgcagcatgtctcagttcatcatcttctgatactggaaaaggacaaagcaagttttcaagcaacaaagtaacacacggatttcacttagtggaaggaagatctggccatgatatggaagactaccatgtagcagagtatagatatgaaaatgatcacgaacttggtctttttgctatttatgatggacatctgggagatagtgtggccagttatttgaaagctaatctttttgacaacatactgaaagagcctctcttttggtcagaccctcaagaagcaattaaaaacgcatacagctctacaaacaaatatattctggaaaacactaggcaactaggaccaggggggtcaacagcagtcactgctattgtagttgatggtacagatatgtggattgcaaatataggtgattcaagagctgttttgtctgaaactggtactgccagccaggttactgttgatcacgaacctcataccactaatgaacgaaagaggatagaagaaaaaggtggttttgtctctacgttccccggtgacgttcctcgtgtaaacggccaacttgcggttgcaagagcatttggtgatcagagcctcaaggcacacttgagctcagagcctgatgttaagcatataaagataaattcaagcacagagtttgtcatacttgccagtgacgggttatggaaggtatgtgtcttccttgcgtatttcactttacgttgccgtcgccttccctatatagttcaagatttcgatatccaatctgaatcgttttctcttagttctctcttttctcgttgttcatattcactcttttaccctgtttctggtgaaggtaatgaagaaccaggaagccgttgatctggtgaagtcaaccaaggacccgcaaacagcggcgaagcgactgacgtccgaggccctgggaaggatgagcaaggacgatatctcatgcattgtcatccgttttcgatgctgactcttgggtaatccagctcatccattgccctaagctgcctgtgtgcatcagcagaactgtttcctccgtatcgtagctggtagcgtctggatctgtttgcagctcaggatcagattggtgattggactggacaggttattgaccaaagaatagaagaatgctgggtttgggtgttttcagcgtctgcaggctgttctttttttcttcttctgtgcatatatacacgttggaatcaaatatataccgtcggactggagccaagaaaaaccatatatataccgccccaagatgcaaagatgatacagattatgtaagcttgtagacatgtagtagttggattatggctttt

SEQ ID NO: 99909 - DNA, 1018 bp, Zea Mays
tgataagcacattgttctctatgttttcaattgcaaatgttcagttagcaaattcaatacttgaagaaaggctgaaagataaagcaggttcttctagtgatggattctatgagtccagaaaagaatgggcggggagaagacactttctgctagctttcgaaggttcagctgaaggattgtacatagtaattcggccagctgttggggaggcttcgagggaaatgtctttggttgagcttaaaagcaagtacaggaaggtctcatctgttgacaaaattagtaaaggctggcaagaagagtacgactcttcatccaagcagtgtatgcacgggccaaaatgcaaactcggaagcaattgcacagtgggtagaaggttgcaggagattaatatattgggtggtctaatacttcctgtatggggtgcagtagcaaaggcactggctaagcaggcacggcagattcacaggagaatacgtgtggtccgcttggagaccacgactgagaacaaacggtttgttgggcttatcattccaaattctgcagtggagtctgtactcgaaggtttgcaatgggtccaagatattgacgaatgatttggcaagaagctactcctttggcagtccttcctttgctttggaccaaatctttgtcgctgaggcaacttgtgcatttcgcttgtgaaacggttgtggttgtacgcagtcaggaaaagtatacgacaacggctgggccacttttgtgttatatatatgaaagttacgtaaacgtttatatcagaccggggtgctgttgtaagttagcctgttgttggaggctacatgcctaaatgctgcacgatgtagtggtgtggagatgtggtggctgtggctcttatgggcctgtgttgtttccctgacaagggtggctcatatggctggcctgagaccgattgggttggggtttgttttctataaacaaaacgaggttgaggattggtcattgtttggtaggctgtacaaacgaatctggttaccgtgca

SEQ ID NO: 99910 - DNA, 102 bp, Zea Mays
gcggctgcctccaaatggccccctacgcgctgcagcgcaaggggaggccacgcctgtcccctagatctaggggagcactatggtcccctatttaataattgg

SEQ ID NO: 99911 - DNA, 1313 bp, Zea Mays
gcagcagattcagatcatgaatcaacagaatctgatgaggacttctatatgtgtcagatttgcaacactgaagaggagaaaaactcattgttttgttgctgtatttgtgcttcacgggttcaccctggttgcctcactccaccttcgactgacatcgtgaatgatgattggtcatgttatggttgcaaggagaaagtaaaaagctacttaaaagaaagagatgcttacttgactgaactctcaaagaggtatgatgctgcattggacagaaagtcaaaaattcttgacataatccgttccttggatttacctagtaatcctttagatgatatcatcgatcagcttggtggtcctgacaatgttgcagaaataactggacgacgtggtatgctaataagagcatcagatggaaaaggtgttatttaccaggcgcgaaacacgaaagaagttgcattggacatgatcaatatgcatgaaaagcagcaattcatggatggagaaaagaatgttgccataatatcagaagcaggatcagctggcgtttctctacatgctgatcgaagggcaaaaaatcagaggagaagagtgcacataacactagagcttccttggagtgcagaccgtgcgattcagcagtttgggagaacccatcgttctaatcaaacttctgcacctgaatataggcttcttttcacaaaccttggtggtgaaaagcgatttgcatcaatcgtggcaaagagactggagtctcttggagctttaacgcaaggagatcgaagggctggaccatcacttagcgccttcaactatgacagtaattatggaaagaaagccctgacaatgatgtacagaggaataatggaacaggatgcctttcctgttgtgcctttcgaatgctctgagaatcaagctacccttgaagagttcatcactaaagcaaaagctgctttagtgtcagttggaattattagggaccctataatgtgcaatggtaaaaatggtggaaagcttactggtaggattattgattctgatatgcatgatgttgcccgtttccttaatcgtattctgggattgtttccagacattcagaatagattatttgaccttttcacaagcatacttgatatagtcattcagaatgcacgaattgaaggacaacttgattctggtattgttgatatcaaagctaaaagtgtcgaaatgaaagaatcaccaaagactgttcatgttgatactgtgtccggtgctagtacaatattatatacttttacagttgaccgtggagtttcttgggaggtaactttcatatt

SEQ ID NO: 99912 - DNA, 230 bp, Zea Mays
ggtgccctgccactcaatctcaacgatgctctgttactctattgccgtgcgccgacgatcaccatcgtcagactgctgcatcatcgtcataaatccgccggtgcccgtcgccaaggcctcaccgtcgctgctgcttgccggagacctatccctcgacgtcaacaaccgcgttcgactcctcaccgaccgtcgagtccctgttgtgccctcgtggagacattgcacgtgct

SEQ ID NO: 99913 - DNA, 229 bp, Zea Mays
gtgccctgccactcaatctcaacgatgctctgttactctattgccgtgcgccgacgatcaccatcgtcggactgctgcatcatcgtcataaatccgccggtgcccgtcgccaaggcctcaccgtcgctgctgcttgccggagacctatccctcgacgccaacaaccgcgttcgactcctcaccgaccgtcgagtccctgttgtgccctcgtggagacattgcacgtgct

SEQ ID NO: 99914 - DNA, 246 bp, Zea Mays
gcacgagcaatgtcaatggagggtggtgctttaggatctacagctgtgactgactctgctatggcaaaagctggtgcagttgaccctgacttagcgttagctcttcaaatgtctgtccaggatgcaaacatgtccagtgacactgatatgagtaaggtgtttgaagacataacgtttgtgtcatctatccttaattcacttcctggtgttgatccgaatgatccatctgttaaaggtctctgtatt

SEQ ID NO: 99915 - DNA, 790 bp, Zea Mays
catttttccctagccgccaccagcagctcttctctgtttcctggacgtgcgcagggagctgagctccttctcccatggcgcctccacactcccagccgccctcctctgcccagcagccgagcgcccagctcctcccctcggcagccatggcgtcctccccttcctcccgccctctgctgtccacggcgagctgcagcagggagccaagctccaagctcccacggcgctcgagctccactcctccctgttcgtcttcaacccaagtcggcgccctcttgctggttgtcctctccgtcgcgcccctgctggccgtgcccctcatgctggcacacaggcgcccaggccagcttccccatggcgctcgactccctgttccatggtgccctgtggtcgcccccttcttccccttgtggctgcgctcctctgctccctccatggcgccccctgctccttcctcgacgcgctgtaggtgctcgacaaaatgcgcagctccatttctcccatggtcgtggcctgcttttcccggcgccctgcgcagcatctccctcccccaagtccctgcgcgcgcacagcagcagctcgccccaccttccctcgctgcgcagcccctcggcgaaacgccgctgttcctgcagccccgacaccttccctggcttcctcgctgcgcgcgtgccacgtgttcggcgatctgtccaagtggggtgttgagcagtgagcagcatgccgtcgacgcccgccgtgtgctcgctgttttgcgcagcccatccgcgacgccgtcgaaaaccgtggt

SEQ ID NO: 99916 - DNA, 2568 bp, Zea Mays
gaattcccgccggggctgtgatctcggggcgggccctgctgccgacgtcgcggtggggggctctgttggggctccctaggtcaagattggttccggagctgcgattcctttgctcagcggaagcctcgtagctgcgaatgttccgtcggggttgcgtgctcgcacctagccgtggaagaagatgcgcggagcacggggcggctgggatttgtgctgattacgttgccccacgtcttcgcgagggcaatagcgtcttttcttcctttttttcccaccccttctgctggggcacgtccgcctacaggtggacggttcaggcgttcaggggattgctagccgtagcgactagccgttctacacgaggtagcacggcaatgttgctgccagtacgagcagggttttgtagatagtgtgattccgctgcagtctgaacctgcacttgataataatccctccaagagtgcaaacgctagggaccagattctttctggtacggagaatgtgactacaggcaatgcacgcggcggcagctccttgaaatcgcaaaaaggcccgccagagaaggctagctctgtcggaaaacctggagaacaaccttttccctaccatcaaaatgtgtatgcaccacagccacaaccactctatcctggaggctacatgaacccttcaggacaatgggaggaatatccccattatgtgagtatggaggggctccattccgtatctcccggaatctacaatgacaaccagtccctcatgctatctcctggatatgcaaacaatccccaaatgatgtatggagcatattctcctgtttccaccgttggggatggccaacaatacctccctatgcattttcccttctcaagtccttactatcaaccaccagcttctcctagcatgggatattcaagctctgcgactggaatatcccaaggagaccctatgctgcagcaagagtacttccttcctgatggtcttctatattcacccacacaagggtatcatcaaccattcagctcattcgacagagcaccaacacaactaaataatgctcctgggttgtttggtcaagggaatctaccactggcttctggaatgcaccatggatcgatgtatggtcctggatcctacaagggacgccagcaaggtagcaaatttggtggcagtactacaagttggagttctgctggccgcagatttggtactatcgacttgagtggcaatcaacaaaggggcagcatgccatttggtagtcacaatggctctctggagttcatgaatgagcaaaaccgtggaccacgcgctacaaaaccgaagatacaaggcacagagaacacctcaggagatgagagaagcgagaaaattgttcctctgattgatagcgaactgtacaatcgctctgattttataactgagtacaaggatgccaaattctttgtaataaagtcctacaccgaggaccatgtacataggagcattaagtataaagtttgggccagcacagccagcgggaacaggaagctggattctgcttaccatgcagccaaagagaaagaagagcattgccctattttcttgtttttctcagttaatgggagtggccaattctgtggcgtggctgagatgattggacctgtcgatttcgacagaagtgttgattactggcagcaggataagtggagtggccagttccctgtgaagtggcacataattaaagatgtaccgaacaaccttctgcggcacatcattcttgagaacaatgacagtaaacctgtcacaaatagcagggacacacaggaggtgaagctggaacagggcctccagatgctaacaatcttcaagaaccatgaggctgagacaacgatcgtggaagatttcgacttctatgagcagcgggagaaagccttgcaggagaacagacgtcaacagcagcctcccaccacctatcctcagaagctggtggataccaacgctcaaggtcctgtggccgatatatcagatgcatttgccaaggccgtccagttgaaggatactgcgaacagcgggacgaccccgaaagctgagggtgcctcagctgaaaatggatccgctgccacagccaaggttgaagggagtgcaaacctgaacacaggccctgtggagtagagtccgtttcccttctttctgctaatttggagcagcagatgaattgcatgctgcaatgtgaatgccggaaaagtggaaagtgcaggttgatcgtgttaaatatggtcgtggctgcgtcagttgtacaacatcataggctttgttttatctccatttatgttatataagttcaatatcatagttccaaaattattgttcccagttctcttctttcctgctttattttgcttccgacttccgtggtcctcgtgtcgcaccatgaatgatcgttccattttagcgggtttataggcataagaagctgcagaattatgctgcgatgaagttgcattttctgcagttgaatgtgatactgtcgagtcttgcactgtctgtaatttcagagatcctctagtgtatcttcgtcttgttactctcagc

SEQ ID NO: 99917 - DNA, 1547 bp, Zea Mays
tttgtagatagtgtgattccgctgcagtctgaacctgcacttgataataatccctccaagagtgcaaacgctagggaccagattctttctggtacggagaatgtgactacaggcaatgcacgcggcggcagctccttgaaatcgcaaaaaggcccgccagagaaggctagctctgtcggaaaacctggagaacaaccttttccctaccatcaaaatgtgtatgcaccacagccacaaccactctatcctggaggctacatgaacccttcaggacaatgggaggaatatccccattatgtgagtatggaggggctccattccgtatctcccggaatctacaatgacaaccagtccctcatgctatctcctggatatgcaaacaatccccaaatgatgtatggagcatattctcctgtttccaccgttggggatggccaacaatacctccctatgcattttcccttctcaagtccttactatcaaccaccagcttctcctagcatgggatattcaagctctgcgactggaatatcccaaggagaccctatgctgcagcaagagtacttccttcctgatggtcttctatattcacccacacaagggtatcatcaaccattcagctcattcgacagagcaccaacacaactaaataatgctcctgggttgtttggtcaagggaatctaccactggcttctggaatgcaccatggatcgatgtatggtcctggatcctacaagggacgccagcaaggtagcaaatttggtggcagtactacaagttggagttctgctggccgcagatttggtactatcgacttgagtggcaatcaacaaaggggcagcatgccatttggtagtcacaatggctctctggagttcatgaatgagcaaaaccgtggaccacgcgctacaaaaccgaagatacaaggcacagagaacacctcaggagatgagagaagcgagaaaattgttcctctgattgatagcgaactgtacaatcgctctgattttataactgagtacaaggatgccaaattctttgtaataaagtcctacaccgaggaccatgtacataggagcattaagtataaagtttgggccagcacagccagcgggaacaggaagctggattctgcttaccatgcagccaaagagaaagaagagcattgccctattttcttgtttttctcagtaagaacaactcatctcctttggttttttgcttttcccttcgaggaaaaaaaaagagtaacagtacatagtgggtgtttgatcctttattagcatgtgctaaggtgtttccgattttggtaatttcttttatgaataattgttccttttataggttaatgggagtggccaattctgtggcgtggctgagatgattggacctgtcgatttcgacagaagtgttgattactggcagcaggataagtggagtggccagttccctgtgaagtggcacataattaaagatgtaccgaacaaccttctgcggcacatcattcttgagaacaatgacagtaaacctgtcacaaatagcaggg

SEQ ID NO: 99918 - DNA, 740 bp, Zea Mays
atgcccccgtcgtatccgattgagccatgcgtggcggtgctgacaataggcgtgacacttccagcagccaccgtcactaccatcctctctcgctcacccttgccccatccaatcctctccttgccttatcttgtctcgttggcagcttgggcacgcacactaggtgttcaacaggagtcctcgccggcgcggaagatgtacgtggtcaagcgggacgaacgccgggagacggtgcaattcgacgagatcacggtgcgccttaagaagctcagctacggcctcagtcaggaccacttcaacctaatgctcgtcatgcaaaaggtctgcacgtgggtctataagggcgccaccagcagccaactcaatgagcttgtcgcgactacgcctcggtgaggagcccaccacgaattccccctagttttagctatcctatctatctatgttgtgctaacgtggggttggtcgcccctgttctccattgtgattcgtgaagctagtggcgaggtttattgtgtcgatcctgcacaagaacacaaagaagtccttctcgaagacgtaagtaacgtctggctttggttcaatttcattcattcatagtggcatggatttgttggattaggttatgagttgggtgtgactgttatggacgcaagataaaggaaatctacatgtacttcaatgagacttttacgatatctaagatgatggcccctctagttgctgaagatgtttgtgaactc

SEQ ID NO: 99919 - DNA, 360 bp, Zea Mays
gaagctagcactggtgtagtgcccagtgatgttcaaatataccttatggggcacagaggaccagatcctgcaaatccagatgtcttgtgcagccaaaaggcaacagatcgtctgactgcatatggcgaggcgatgtctagtcagcacggaccagactatgactggaggacctcacgtattgatcctcaggttgtgcatgcaagttgtagaaaagctcatggaaggtacacaatgtttgctaacgtcatcgactcgagccaggaacgagatgacgggttagactttgtcgaagccctcttcactagtggaggtatcgaccatcactcgccactgtaccccgatggcgatcggcgatcgtga

SEQ ID NO: 99920 - DNA, 280 bp, Zea Mays
ggcaagtttacggtcatgttgagtgagcatggtgctcgaagtttccggtccgctcctgaaatcggtcgtaacttttgctaagtagcatggatatcatttttgcatgcacggttttccaagttttgagtgacctgcagtttaaatctgaattttctgaagaaattcaaataaacaaactaaatgtactagctatagaaaacactattataattgtcccaaaatggtacatgttggtctacatagtgtaggaacataccacaaaaagtttggtgaccaaaat

SEQ ID NO: 99921 - DNA, 946 bp, Zea Mays
agaagactagaagaggacggtgggaaagaggggtccaagaagcagggcacggcaccagacgcgcccatggaccccaccggcgtcgacggcgattccgcggcggcgagggggagcggaggcggaggcggaggggggacaggggccggccggtgggcggttggcgcggtgtgtggggggctggtctactaccactgcgcggtacggcgagccagcgcggtgtcccttgcagcagacgtgctcctcgtcctcctctgctcgctctccatcctcggcctcctcttccgccacctccacatctcggtgcctgtggatcctcttgaatggcagatctctcaggagatggcaaatagcatagttgcatctttagccaatacagtaggagctgctgagtctgtattaagggtggctgcaactggacatgacaagaagctgtttttcaaggtggtttctacattgtattttctagcagctttgggaagggtggtgtcaggcgctgccgttgcgtatgctgccctatgcatcttctgcctctacatgtttgcacaaagcaccgatctgtttgatcagctcccttcttgggtccctgtgggtagggattctttgggcggtactcaggataccgcgtgattttccacatgtacatggattgcagagtttttcttctcttccactgtctgtatatggtcttgcaggctaatagcttgaactatagcatctatctctgcccccacggtattacaactgtacccagtgtttagcaatggagtaatgatctttgtatatatatatgacacgtttgcaacttgccagatgccagtgatgcatcctgtatgttttcggagctcattgcagatctctctggcttgacatggttgttggtcgtgagattttgtgatggtgtgttttgcctgtaatctaaatatctaataaagatctgtctttcatc

SEQ ID NO: 99922 - DNA, 939 bp, Zea Mays
agaagactagaagaggacggtgggaaagaggggtccaagaagcagggcacggcaccagacgcgcccatggaccccaccggcgtcgacggcgattccgcggcggcgagggggagcggaggcggaggcggaggggggacaggggccggccggtgggcggttggcgcggtgtgtggggggctggtctactaccactgcgcggtacggcgagccagcgcggtgtcccttgcagcagacgtgctcctcgtcctcctctgctcgctctccatcctcggcctcctcttccgccacctccacatctcggtgcctgtggatcctcttgaatggcagatctctcaggagatggcaaatagcatagttgcatctttagccaatacagtaggagctgctgagtctgtattaagggtggctgcaactggacatgacaagaagctgtttttcaaggtggtttctacattgtattttctagcagctttgggaagggtggtgtcaggcgctgccgttgcgtatgctggtaataacacagcaagctaactcttcccctgatgtcctgttctccatttgttgtgtatatgctttgttgaaactttttcctatatgagaaattaagccctaataggaatggtggctaatgaccctctgttttgttgctgcccccagccctatgcatcttctgcctctacatgtttgcacaaagcaccgatctgtttgatcagctcccttcttgggtccctgtgggtagggattctttgggcggtactcaggataccgcgtgattttccacatgtacatggattgcagagtttttcttctcttccactgtctgtatatggtcttgcaggctaatagcttgaactatagcatctatctctgcccccacggtattacaactgtacccagtgtttagcaatggagtaatgatctttgtatatatatatgaca

SEQ ID NO: 99923 - DNA, 420 bp, Zea Mays
atggccggcgggaagaggagtaagctgctgcagggtgctccgccgccgccgccgccgccgcaatggtctgacgtccgtggcctgctccacatgcggttgacggacgccgccgcggagctcaacgtctcaatcacctacctcaggcgcctctgccgccagaacggcttcgctcagtggccaggaaagaagatccggtacatgaacagtacagggaagaaggtgatgctggaggcagatgatgcgctgctggacgcctcgccgtctgctggtctcgctggtacttccgggctccggcaggccatgagcgcggaaacccggaacgaggaagaggacgacgaaccagttgcgaatcaggaactcaccactttaaacttgatagacaagctttgttggttaataagtcacttgcgttgcaactga

SEQ ID NO: 99924 - DNA, 582 bp, Zea Mays
atctgttcccatctcttctgcctccgtctcaatctcgaccggtcaccccatctccaccgccacatccgtcgtcttccgccgccgccgatggcccgcctcctcacgcaaaccctcaccctagcccgccccgcctcctccccctccactaccgccgcatccgcttccctccgtggcctcgccaccaaggtcgagatcatcgagatcgatctcgccgaggaagacgctggctcctcgtcccacggctccccctcctcgtccccgtcggtcgaggcggtcgggatccggcgcctggaggaggccatccacggcgtcatggtgcgccgcgccgcgcccgactggctccccttcgtgccgggagggtccttctgggtgcccccgctgcgccgcccgcacggggtcgccgagcttgttggccggatcgcggctgctgggggcaccgaagggggcgccggggccgttggtggcgcggtcgaagtcttggagctcgacgcgcccatgacggaggagcaggcgttttgtttctccaccacgcgcggctggccctcggcctctttcttcgtcgaaggtgaatccccttcgtga

SEQ ID NO: 99925 - DNA, 522 bp, Zea Mays
atggagtggccggctgtgccagcatgccgtagggagactggggggcgcttccctgcagagggccggtctgcagagtgtgctgcagtggggcgcctccctgtccttaaagagcaccatgaacgtattgctgggtctgatgggccagcagcgcctggtgaggagcgatggatactggagcagcgtagaaagcctgctgttgctgggccgtcgaaggcagcagggcctggtgctgcgccaggagaccttgctgctgctgtggggtcggcgcccgtgggccgggccacatctggatggccccagtccaaggattttggatggagggccacaggccggaggcactcccgtgctggccgccgggaccagtgcctgggaatggaaggataccctggcggccttggccacccctcttgctgcgatggttggggtggtcgaaacgtggggccgaaggcgccttgttggaagcagcaggagccttgttggaggccgtcgaagtcacgccttgtggaggtttggtggaggtaa

SEQ ID NO: 99926 - DNA, 115 bp, Zea Mays
ctgtgcggggtctggggaagggtatctttaagcgccaagccttacccgcataatatgcagaggctggggctcgaacccgggaccttctggttacagacggtaggctctaccgctg

SEQ ID NO: 99927 - DNA, 111 bp, Zea Mays
cccaactcgctctcgcgacagctcccgaccaaacattctactgatttactgatgaatgcctcccaaaattccaaacccctaaagcgcatcacccaaaagagagaagaataa

SEQ ID NO: 99928 - DNA, 2120 bp, Zea Mays
taaaccagaacaaaagttttttaacctttcatgtcgtgcctccccttggtgagtctctatataaagcgagtgatctaggcaagtcttctccaactccaagctactaagtaataaaaccacgcattgatctagcgcgcgggcaccaggccagcaggcagcagctagctagccatccagtccagagatggccacgagcggccccgtccttctggtctcgcaggcgcagcagcgcaagtcacggacctacaccccgagcccatggggtgacttcttcctccaccacgtcccatgcactccgtcacagctcttgtccatgaaggagagggcaaaggtcaaggagcaacaagtgaggcagatcatacacgaaacgatcgcctcctccgacctgcttcgtaagatggagctcgtggacacactacagcgcctcggggtggactaccactacaacgaggagatcgaccagttgctttgctctatctacgaccaccacgacgacggaggagacggcctcgacgatctctaggtcacctccctgcggttctatttgctcaggaagcatgggtacacaatctcttcagatgtgttcgagaaattcagggacgagagcggggccatcgtctcaggcgacgatgccagctgcttgctcatgctgcatgacgccgcgcatgcgagaactcacggggaggagatacttgacggcatcgtcgcttggagcaagagccgcctgcaatccctggtggtgcagaagaacctgctggagccggagcttgccgaggaggtgaggtgcgctttggagacgccacggttcaggcgggtgaagagggtggaggcgaggcgctacatccccgtgtacgagaagaagagcacgcgagatgaaaccatactagagttcgccaagctggactacaacatctcgcaagccatctactgtgatgagctcaaagaacttacaatatggtggaatgatttccgattgcatatagacctgagctttgcgcgggacagaatggtggagcttcatttctggatgctcggagtaatacatgatccctattgctcacggatcatgatagtcaagatcttcgtattcataagcttgtttgatgaccttatggacaactatagcaccacagaggagagcaatgtcttcaccgcagccatggaaaggtgggacgaacagatggcacagcagcttccagcaggcttgaaggcactcttggtcaggatatttaacgctacgaacaagatcgaggaggagttaaaacttcaggggaacatgcatgctgaactcatcaaaaaaatggtgattaatagtgccaagttctaccatgctgaggtcaaatggcgcgacgaacacttcgtgccaactagtcttgaggagcacctccaaaaatctatccctaccagtgcttgtatgcagatggcaaatcttgcgttggtttcactgggaaatgtgactactagagaggacgtcgagtgggttttcaccttccccaaaatcatcagaggtgcttgtattgtgggccgcatcgccaacgacatcgtgtcacatgaggtttaccaaaacctctccaccacattctagctagtcatatattccccatcagctgactatatacgtattctctaaagactcacattgcttgttcttgctttaatttccttgatgaagcgggaacaagcttcttcagaccatgtggcatccacggttcaaacttgcatgaagcagtacaacgtgacaataaaggaagccaacgagaaacttagagcggtaatcgaagaggcatggatggacatcgtccaagatagcctcgagcaggaacgccctagagcacttctcgacatagccatcaatgttgcacgagttgcagatttcatgtacaagcgcgaagacgcgtacacgctctcattcgtcatcaaggacattatagcttcaatgtacatctattccgtgtgagcttattgatctactgctagtaagaaagactttttcagtgatgtacatgaattgaaaaaggtccgttaattgatggtacatttaattaatcccaaaattattgtataagtagtatgtgtgatgtactgcatatcctaataaatgtgtttgtgttccaaacata

SEQ ID NO: 99929 - DNA, 2957 bp, Zea Mays
agcaagcccttccggtcctgcattttgttgtcccctctccgtagcggagacgttcgttcacttcctctctctcgcctcccgtttgccccgcgtgcgctctgtgtcgctccctctcttgtgaggagtgaggacgactggggcgaccgccgccgccgccgccgccctacgccagatgcccaggtaggggccattcgctagctcttcttcgtgcccttcgccggcgacgagcattcaccagttgctgatgcaaggctttcaaaagtttaacagtctcacttgatgcaaaagcaacacaatcactctaaaggtttggatcagtcatttcagagcatgggttcgcggtttccatcccatcagctaagcaatggcttgtatgtctctggccgacctgagcaacctaaagagaaggccccagtcatttgctcctcggctatgccgtacactggcggggacataaagaaatctggagaacttggaaagatgtttgatctccatagaaaatctggtccattgggtaatccgccttcaaggaatacttcctttggtggtgctgccgccaactctggaccagtttccaatgctgtcggtcgctccaactactctggttctatttcgtctgcagttcctggcactggaggatcttctaggacaaaatctaactctggacctctcaacaagcatggagaaccaacaaagaggctatctggcccccaatcttctggagtaaacccgatggcccgtcagaactctggccctctacctcctgtacttcctacaactgggctaattacatcaggtcctatcacatctggtcagttgaattcgtctggtgctcaaaggaaagtatcaggccctcttgattctagtgtatcaatgaagatgcgtgttacctcttttgcacacaacccagccgtcacaaatatcaatgtgggagatggttactcgattaggggcagcattccgaccacaataatctggttggtcgcgttgctctttttggttgggtttgtagctggtggcttcattctcgctgccattcataatccgatcttgcttatagttgtggtggtgatatttggctttgttgctacactggtgatctggaacatctgctggggaagaagaggtgtgattggttttatcagtcgctatcctgatgcagaccttagaaccacaaaagatggggagtatgtgaaggttactggggttgttacttgtggaaatttgccccttgagtcctcgttccaacgggtgccgcgatgtgtgtacacttcaacttgcttgtatgagtacaggggttgggattcgaaagctgctaactccacacatcaccgatttacctggggtctcaggtcaatggagcgtcatgcagtggacttctacatctccgatttccagtctgggctgagagcgttggtcaggacagggtccggtgcacgagtatccccatatgtggacgagtctgttgttatcgacataaacccagacaacaaggacatgtcgcctgagttcctgaggtggctccgcggaaggaatctctcgagcgatgaccggattatgcgcctcaaagaagggtatatcaaggagggcagcaccgtgagcgtgatgggtgttgttcaaaggaatgagaacgtgctgatgatcgttcctccggctgaacccatctccactggctgccaatgggccaaatgcatcctcccgaccagcctcgacggtctggtcctgagatgcgaggacacgtctgacctggatgtggtaccagtctagttggttccggcgcggaggaggagaaaaagatgccttgactcgatttgagttggtttctgtgggttgttagtgttggagggaaaaaaatgtgcaaatgcagggtgtgattatgggctaagtaaagttacaatgtcagtggtcggtcagctacctggagattggtcgtacagtatgtcatgtgtaatttttgtcgtctcgttttggttgagccatgggtggtgcttgtaacaaaaggatggcttggtgtcagtactacctaccctaccatggagcctgtttggagattcagtggtctggtttcccattcatattttgttcttttttcttttggcgtagggttccgacaatgccctggaagcctgcagtttccttctgtacccagatctacatggaaatcgcttacctaaacttgagaggcatatttccggtggtgagaaaccaatgtaaaaaaaagttgattccaattcgtgttgacgcgtttccgaagcttaccggaggacaaaatctattgccgtgggtcgttgagatgctcagagtcacatgatattccaagttttacagcgtacatgcatgcacgaccatcaatcacatccataccgaccggccggtgtgccgcactgtcaacgttaggtcagtggttagcaacacacaagcaggctgcattgcatttgcattaccgttggacttggacaggaattagggaacaaccgggggttgccgcccaggaaccttattagctggtagcatggtcctgtctgtcacaatcttgtgccttcgtagcatcactcatctaccaaccacaacttagaagacaagtctggatggatctagcaaacgacacggatatgacacaactgctgctagcggagcgtgccaagttgctgaaatgaaaatcttgcaccaacatcaacaagctacgcgatcttcaaaactttgtcgcatgtatcatgaaagcaacaacgagagttgaggaatcatttaggtcaggtccgcgcttcttgtttttctatggtttcttggataaacccctaccaaatgcaagcacgtaaagaagccgtttttcttagggcatgttgggtatatctctgttgtacactatagcagctctaaaactttagattggagcaactatgttgttgagttttagtgacatttaggtaaaataaatggttcgtagcttttagaacaaa

SEQ ID NO: 99930 - DNA, 572 bp, Zea Mays
tatattgcagacaacagccatctcagatgtcaagcacacagataccatcgcatcacttttctaaattacatcaaaagtaaacaaactccaaacatggtctaatgagagtctatattaaaaaacagttccagcatttgatattactgttaaaagaagtggtactggtcttccattccatcacaagaatcgtgacaatttaaactatgtaggaacaaaggaggagaaaatagagcagcagaaacaggttagacgccttgccattttccagagcaggcccttatgccattacagctttaatttcttcctcaagttgttttagctctatcaaccttgctacccatgcccgctctcttgccacagcagccatcttcctttctgttcgttctgcctcctttctcttaacagcagcagaatactgagctctgcgcttcttcttctcagcctgttcaatccttgcgctgcttgatccgcttcttctccttcctccctcgcacgctcccttggttcggctgactaactggtatgggctcgtcaggcttgcacttcacccagtagtacggacctgcggacga

SEQ ID NO: 99931 - DNA, 2512 bp, Zea Mays
cgcctcctctgagctgcctgcttgttcgagctcccacggctccagtgtccccgacacatcagccgctccctccactcgccttcctttttgacgttccaggatcatccatggcatccaaaccaagtagggaagactagcatcgaacccgctcgtcacaggatccaaccgcctaagaaacaaagcagccgtggcgacctcctagaggagtcaaccaggaacaagaaggcatcaagcatgttgccgtaggtgggagggggagggcaagggcgcaaaaatggcaacaaccatggccggcgatgggatgcggcggcggtgagcgcatggaggaggacgaggcggggacggcgtcgtcgtcgtcgtcgccgcctattgtgcagctgggctacgaccaggtcttgtccgtcctccgtctgctcccgcccgaggccgtgctgtccttcgccgccacctgccgcgttttccgggcctgggcctcctcggacgcgctctgggaggcgctgtgctgccgcgactggggctcccgcgccaccgctgcgctcgccgagcgccggcgcgaccgcggcggcggccttcaggcgccgtggcggagggtctacgccgaggtcgccaggctcggcgcgctgtccgcgcgacgcgtccccgccaggggcgcctcaccgcggccccgcgcgtcgcactcacttaacctcgtcgccggctggctcgtgctcttcggcggcggctgcgagggaggtcaccatcttgatgatacttgggtggcttatgctggaagtggagctggaaataggccgccccctatacttagctggcagcaattagcatccggcactccaggtggtcgtttcagtcattcttgccttctagttggtgacacattagtcttgtttggtggaatcacagatcagggacagcgtttgaatgatacatggactggtcaaatcatctgtgaagagcctcgaaggccacggatctcatggagattgctggaggtaggtcggcttgcaccacctccacgtggagctcatgcagcctgctgtgtggatgacaagtttattgtcattcatggtgggatagggctctatggaagccggcttggtgatacatggcttcttgatctctcaaatggccttcagtctggcagctggcaccaaataggcaacacatggcctttgcctcaacctcgttctggccactctttaacttggattggcagcacatgcatggtattatttggtggtagaggatcggaatttgaggttcttaatgatgtctggctgtttgatatcagtgatcaataccccaaatggaaggagctaaagtatggcttgtctagtgctcttggtgagcttccttttccacgggttgggcattcagcgatacttgtgttgggtggcaaggtccttgtgtatggcggggaggactcacaaaggcgacgaaaggatgacttttggatcttggatacaccagctctacttcaatacgagtcaggttccaagaaaatgaccagaaagatgtggaagaaactaagaattgatggtcagtgcccaaactaccgatccttccatggggcatgtgtagatgcttctggttgctgtgtgtatatttttggtggaatggttgatggccttgtacacccttcagaagccttgggcatgaggtttgatgggcatctgtatcaagtggagctcgtgctacatctttaggacgtgtttgttcccttgtatatccgagaaattccataggtttgatgtttagcgtctggtgtagtaccatgtcacccaggttttcaacattgtaaggatactccagatggtgcctaacggtcgtttgcgcatggatgcttgcgcacagctgtcgctgatctgtgaaaggaacagtgacccttgtaattttggcctgatgtgtctgcatatggccatatgggtttgaattgtcattcctttgtcagattcatatgttccaaagaatgtccgtcaataccatctggagcagatggttgttttgctacctgatgagccatcatatagtcatgggaagagagagaaagatattcttttccacaataatccaatgcgcgaggattgctcgggaccatatggagctgctattggatctttgcatcccagtcacaggttagctcaatgcaggagaggaccatgtcccattcaacccttgggttcacatgcacagaacctgttatttgtatttatctaatgatggtgcatgagtcatattggcatcaccaagcatcagaatttcttccaaagatgaatgctggtttgatctttggtccaccagcactcgatagtcatgtcttgcgcgcattaattctgcgataacaggaccgatgattgcttggattatttcagattatggaccatttgcagtatgattgctcgagagaaatctggagctcctgttcagatccactttgtgacagcaaggcatgcttcagcatgaagatccatgtatgatacctctgaaaggtttacttaggcctagactcagtttg

SEQ ID NO: 99932 - DNA, 587 bp, Zea Mays
taaaaagaccaaggtagttgtgggaagatggtggctcagatgatggatatgtacttgttaagcaggaggatgttgttgatgggatgacttcctttatggctgcatgcttggtgtcaattaaaaagaccaaggacctgctccctgatcaacttcaaaaagcttttaggaagacgttttcagctaaaaagaagaaaagtaaaatccggaaggcatgggatgaaactaaagtcatttataatgttgcttcatgggggcaccactgccgtcatgcagggtctacaataatcgagcattacttacggtcgcaactacaacgtttcagacttcctaccgtgtgataaccaagttcctttgaatattgtgtcaactactagggcatgttagaattgcttgcgtgtgtgttttttcattgttcaggcagcataaagcttgagaccatttgtttagtctatgctgatgagttcgacagctaattagtagcgcctcccagacaaaagcaacatgtgtaatgtataactgtaaatattgccttgatttgaacaaacttgttttttgtgctagaactttatttcacgaacttcatatga

SEQ ID NO: 99933 - DNA, 844 bp, Zea Mays
ccaagcaccacccgggcatcaccacgcatcagcaatctacctccccaggcaatctcgcatcggcgcccgcaccagcaccgcagaggtcgcgtacgtccagatccccaccatccccagcgagctcttgtcctcattcgtcgtgtcgtaccaagacggtgtagatatggagcatttcctagcgccggatctcggagaggtgaaggacgagtcggtgttctagatgatctgtagccctcccgatcgcccctcgctctcgccccctcgatcccggagacagctgcacggggttctacgcgggcgcggggccggcgcgcgaggtatgggcgcccgccctcttcttccttaagtacggcgccccggtgccgtggggcacgctgccgaccatcctggcggtcgagttcgtggccatcgccttcgccgagcaccagcgcaccatggagaaggaccccgagaagaagaagtacctcgacggcgccttcgacccgctcgacttctccaagctccaaggacaccctcaagctccaggagtacaaactcaaggagatcaagaacggccgcctcgccatgctggccttcgtcggcttctgcatccagtcggcgtacccgggcaccggcccgctcgagaacctcgccgcccacctcgccgacccctggcacaacaacatcggtgacatcatcatccctagatcgatctccccttgacaattggttcattattacgactaggcagtaggcactgcctgcctgcgtgcaggagctgtacaacgacgacgacgcgtaatgtaaaggaaaaggaaattggtaccatgttgtgcacttctagcatgcatgacagcaatcgcaa

SEQ ID NO: 99934 - DNA, 1255 bp, Zea Mays
tttggagaaagttcatggcgagattaagtttaaatgctctttaattccttttacaggagcaaagctcgatctaccactaatccgaagaacaaatgaaacaagaggtctactactagtatcgattgacttgactaccgctgctacactgactgctacggcgggaagcaaacgatcttcacgccgcgcgggagcgggcagcgccagcgccaacgccgccgtcgccgtcgccgtcgccgtcgtggcggtggtcgccctcgtaggtgacgacgagcacggccgggtcgtcggcggcgcgctccacgtgcttccgcgcggggcaacccttggcgctgctgcaccggtagtagccgcgcgggtaaggggaccccttgatgggcttctgcccgtacttgcgccacgagtactcgtcgtggggtacgtccgacgacgccggcacgtggccgggcggctgcgaccccggcgttgccgcggccgcgggtaggcgcaccgtgcgccgggacaggccctgccggctgcgcttcttcttcgagcagtggcaacctccagcgccggactcggcgtggtgcgcccccggcggagcagcggcggggcacggcgacgtgcgcttcgggagaggcggcttgcccgaggacacggcggcgaggctgcaccccttggacacgctcccttcgccgcccgcggtcacggacgacaggaacgaggtcgaagtcgcggacacggccggcgcccgcggggccttcttgttcgctgccggcgggacagacttggcgaagtccagcgtcagggctttgttctgagcctgatgaggcggctccgccgccgcctgctgtgacgctggcgtctccgtctctatgggctccaccgcggcgacggcgggcgcgcggcggaagcgggcgtgccccgtgcggtccagcaggttgatgacgcgccggaaccgggacaccgcctggtcggcgatctgcccgagcggcggcgactccgcccgccccgcgccgcacggggagagcgaggaagcgagcaactccaggctgcggagccccgccgcggctgcctcctggaacgccagttgctcgtacgccccgccgccgcaggacatgaggtccaccgccatggcttagctgctctgccgggctgctgcctgtctccttccggccttgcgtggggctctggagcctggatcgtcgcttgtagttggaggtcaggtccgtgcggtgctgctgctgctttcttgtggcttcttgggttgtgggattgt

SEQ ID NO: 99935 - DNA, 82 bp, Zea Mays
gtgtggattcccgcgaccctagacagctcgacttatggattcgaggggaactgtggcgtccttaaacaggtgctgaaaaaaa

SEQ ID NO: 99936 - DNA, 1759 bp, Zea Mays
cccacgcatcaacaaaacgtgtggcccgccctctcccgtgggccgcggcccgtgcccaaaagcagggcatccagcagtataaagccggcgccacatcctgtgcttggccgcagcaccagttgcttcacggcttcatcatcactccactagccagtcagctactggcctacagctagccgcctcctctcctctcatcccatcccatctcatctccgacaagcgaagcagagcactggcatgagcatggaccgcatggcgcggcgttccgtgtccttgctcctcgctctggctctcctggccgccgcggcgtcggcggactcgtggctgtacgagaagttcacgacggagggcaacgtgcgcgcggactacaacgcgcaggggcagcaggtgacgtctctgatcctgacgcagcagtccggcggcgccttcagctcgcggcagaagtacctgtacggggagttcagcatccagatgaggctgatcccgggcaactccgcgggcaccgtgacctccttctacctgtcgtcgggcgacgggcccgggcacgacgagatcgacatggagttcatgggcaacgccagcgggcagcccgtggtgctgaacaccaacgtgtgggccaacggcgacggcaagaaggagcaccagttctacctgtggttcgacccggccgccgacttccacacctacaccatcatctggaacgacaagaacgtcatcttcaaggtggacgacctcttcgtgcggtgcttcaagcggtacccggacctggcgtacccgggcgggaagcccatgtcggtgcacgccacgctgtgggacggcagctactgggccacgcagcaggggaaggtgaaggtggactggtccgccgcgcccttcgccgtctcctaccgcggctactccgccgacgcctgcgtgcccgacggcgacggccgcccgctctcctgccccgccggcaccgaccgctggatgagccgccagctcgacgccgccgagtggggcaccgtcgcctgggccaggcagaactacatgcactacaactactgcgacgacggctggcgcttcccgcagggcttccccgccgagtgctcccgcaactgattcattggtttgtttgttatccccgatccgttcgcgcggtcgccgtccgtcccacacagtgccctgccctgcccccccgacgatttcttgcttcctgttcctcatctaattaatcatcaatggtgtttgttcgtcaccgctgttcttgatggatggatgcacaggacagggcaggacagatgttgttgccttccattccatgtacattttgccgcacatttatacactactagtgcccttgaatgttttcttctttctctctgtgtttttctttacggtttgtgagatttgttactgaaagggagttcataaagataataacgtgaattctactgtactacatacaccgtgaaaacaaaagggaaggcaacgttgtagtatccgttacaaagcaacgacacctaacacatggtgtcagtctcgaccaggtacgaacattactatactaccctgtcgattgactccgatttgaattgctttgggattcggtgcatcaccgtccgtcctccaaggttttttttgcctggataaactacgcggtttggttagatcccatcgtgggaacggcgcggcgccagcgcgacgacaggagcagttattgtggtgagtgtgaggcagctgggtgcggacgagtgacaaccgtgtgcttcgctgtttttcg

SEQ ID NO: 99937 - DNA, 931 bp, Zea Mays
catcctcaggaccttggcgtgcaacagcagcggctgtcatttttctcatcacctaattcaatagcctacaacattagcagtaccttgctttttacttcacaagaaaaggttggccaaggtccctcctctagtgcaaggatttctactgcaacgattgcaacacacacacgtttatggtcttttaatatctacaggttgtggaaactgagatcattgtaactcaaatgagagcttggcacttagcatatagacgccactagaaccaatctggaattactgttaggtaattttatatcttgttctgtaagttggagaattaatagctagctagcatatgcttccttaatgatgttttctttttccatgcatcttcatattaccaaacccttttcttgcaggaaaaacgaatatagagtgataaaaggcattaatgtaagtactacataaatgtactacttgtattttttaataatcaatgcttcaaaagtctatatagatgctgaccggtgtcagggttttcccattattcgaattgtgtatgcaacaactgtggcatatcagtgaccttccgagaagatacaatgacgttcttagtagtaatgctgcttgatttatatagttggagtcatcaaacaactaacatttgcacttgaactgtttggtgaaatgcttgggagaaagaggccagcaagaacggagtcatggaacatcggcaggaggggtgcagcagcggcaaccgatgtatcccttgaacaatatggttttgacaagatgcaaatcaatctagtgtacactgtattccacacttgcacatattgtttggctaattacaagattatctcagtgttttggtttggatttagagtacacttatgtatgaaatattgattggtactcatctatattatattaattatattattattaaata

SEQ ID NO: 99938 - DNA, 1348 bp, Zea Mays
ttcgaaccacagaccaagaagttccctccagtttgtaagctcgtttccgaaaagagctctagagccgccacacacacacagacaccatggcaccgcgttctctgctggcagtgctcgccgtcgccgccctcgcgttcttgcacgccgcctcggccaagtcgtcgtggcttgacaggaggttcaccacggacggcaccgtccgcacgggatacgacgattcgggccagcaggtggtgatgctccgcctcgaccagcactccggcgctgccggcttcaactccaaggagcagtacctttacggcgagttcagcgtcgagatgaagctcatccgggggaactccgccggcaccgtctcgtgcttctacgtaagccatcgatcagctagctagctagcgcatgcacgttctcccgatcatcgatccgtgtcgatccaccgtctccacaacgagaacgagataataacatcaaattatatatgcagctctcttccggcgacggcgacgggcgcgacgagatcgacatggagttcatgggcaactcgagcgggcagccggtggtgctgaacaccaacgtgtgggccagcggcgacggcaagaaggagcaccagttcgacctctggttcgacccctccgccgactaccacacctacaccatcatctggaacccgaccaacatcctgttcaaggtcgacgacctcttcatccgctccttcaagcgctacgccgacctgccgtacccgagctccaggcccatgacgctgcacgccacgctgtgggacggcagctactgggccaccgagaagggcagggtcggcatcgactggtccgacgcgcccttcgtcgtctcctaccgcagctactacgccagcgcctgcgtcagcggcggcgcgtgccgggccgccggcagcggcgggtggatgaacaggcagcttgacagcgccgagtggggcaccgtcaggtgggcggagcgcaacttcatgcgctacaactactgccaggatgggtggaggttcccgcaaggactccccgccgagtgcgcccgccactgatatgcgtccgccggttaattctttgttttgttgggtattctttttttttctacgggtatatgattcttgctcttctttgtggatttgtgattaaaaagcagccctgcagctagcaacgtgtgggcggttgttgtacacctagcttttcctaaatcaagcatgtattttttttatcgtgcctttggatacaggcatgcagcatatatagtattgttgtgagtcgtgaaaattattttttttcctagtgatcactgagatgtataaatggtgaactttaaatctttaatgctattccgaact

SEQ ID NO: 99939 - DNA, 1218 bp, Zea Mays
ttcgaaccacagaccaagaagttccctccagtttgtaagctcgtttccgaaaagagctctagagccgccacacacacacagacaccatggcaccgcgttctctgctggcagtgctcgccgtcgccgccctcgcgttcttgcacgccgcctcggccaagtcgtcgtggcttgacaggaggttcaccacggacggcaccgtccgcacgggatacgacgattcgggccagcaggtggtgatgctccgcctcgaccagcactccggcgctgccggcttcaactccaaggagcagtacctttacggcgagttcagcgtcgagatgaagctcatccgggggaactccgccggcaccgtctcgtgcttctacctctcttccggcgacggcgacgggcgcgacgagatcgacatggagttcatgggcaactcgagcgggcagccggtggtgctgaacaccaacgtgtgggccagcggcgacggcaagaaggagcaccagttcgacctctggttcgacccctccgccgactaccacacctacaccatcatctggaacccgaccaacatcctgttcaaggtcgacgacctcttcatccgctccttcaagcgctacgccgacctgccgtacccgagctccaggcccatgacgctgcacgccacgctgtgggacggcagctactgggccaccgagaagggcagggtcggcatcgactggtccgacgcgcccttcgtcgtctcctaccgcagctactacgccagcgcctgcgtcagcggcggcgcgtgccgggccgccggcagcggcgggtggatgaacaggcagcttgacagcgccgagtggggcaccgtcaggtgggcggagcgcaacttcatgcgctacaactactgccaggatgggtggaggttcccgcaaggactccccgccgagtgcgcccgccactgatatgcgtccgccggttaattctttgttttgttgggtattctttttttttctacgggtatatgattcttgctcttctttgtggatttgtgattaaaaagcagccctgcagctagcaacgtgtgggcggttgttgtacacctagcttttcctaaatcaagcatgtattttttttatcgtgcctttggatacaggcatgcagcatatatagtattgttgtgagtcgtgaaaattattttttttcctagtgatcactgagatgtataaatggtgaactttaaatctttaa

SEQ ID NO: 99940 - DNA, 1687 bp, Zea Mays
accatgttcagatgccggtgctcaatgatatatttattattagctaggttttagttaataaaaaactgtggagaacgaaattaaatgaccatatgtaaacgaaaaatacgatgcctgctgatcataggcatcatcatttcctcccacctaaatgtacaggccccacattaatctacgtctttcataggacaccgcaccaaactcccaactcgcaatgcacgtatgaagaaccctagcaagatcattgctgtatgcagcttctgctcatgtgctcggacaacgatcccaaccgccgaagctagccacgcagaggagcacgcacccaccactagtataaagccgcgccacctctccgtgtttcgccgcactgcatcagagcacgaccacactacccacccacctccactactgacgaccgattcccagaaagctcgatctagcgcgcgcggctgcagagtgcagacgacgacgtacaccatggcgcggcggtccctggccctgctgctcgcgtcgtcgctcgccctgatggcggccgccgtcgcgtcggcggactcgtggctctacgacaaattcaacacggacggcaccgtccgcacccagtacgacgcgtcggggcaggaggtggcgatgctcagcctggaccgcagctctggcgccggcttcaactccaaggagcagtacctgtacggcgagttcagcgtccagatgaagctcatccccggcaactccgccggcaccgtctcgtgcttctacctctcgtcgggcgacggcgacgggcacgacgagatcgacatggagttcatgggcaacgcgagcgggcagccggtggtgctgaacacgaacgtgtgggccagcggcgacggcaagaaggagcaccagttcgacctctggttcgacccctccgccgactaccacacctacaccatcatctggaacccggccaacatcctgttcaaggtggacggcgacgtgatccggtgcttcaagcgctacgccgacctgccgtacccgagcgcgaggcccatggcgctgcacgccacgctgtgggacggcagctactgggccaccgagaagggcaaggtgccggtggactggtccgccgcgcccttcgtcgtctcctaccggggctactccgccaacgcctgcgtcagcggcggggcctgcggcggcggcggcgacgacgggtggatgagcaagcagcccgacgacgccgagtggggcaccatccggtgggccgagagcaactacatgcgctacaactactgcgacgacggctggcggttcccccagggcctcccgcccgagtgcagccgcagctaagctagctgattccgccggttttcgtacgctcggcggcgtccgctgacgacacacgccttgttggtttgttcttgctggacatcatacatctctatatgcatgattcttgttctgttattgttaaatcgtgattacaatacttgtaattgtaaagaagtgtgtgggcacgggagtatatcactgtagttttaatttgcttgtaaagaaaagaagggtttttttacttgtgacgcgggagctagcgactgcgtcctgttcgcgtaaaatgtttgcaatggatgatgatgcatgtacgcagcaacagctagcagtgtactacttccacatattattgcgttcaatcaatccagatacacatttaaagttc

SEQ ID NO: 99941 - DNA, 1656 bp, Zea Mays
cacgctctcatcccctccacgccgccgccacccgacccgcgccgccggaccgcgtcgacgctccctcgccgctggggttaaggcgatcatcgatcgatcgagtttctgtgcacaatcgtggcgctgctgtacttcaccttcggcgaggtggacctctgccacatctcgctcccgtccttacccgtctccggctcgtcccccttccgcgcggctgccgtggcggcgcccttcgtggagcggcgcggggcttctttctattatctagcatgccctccgccacatcgagtttcagtgaagatttgttctcaagttgatctgtgcaatccagaccaacgctggaaaggcggtgcagtgtctttacacactcgctcaactcggacggcttgtactgcgtgtagtgagcaagcgtggagttctacttccagatgtaacgagtgtcgtcagccaccaagacagcatcattctcatcaggcaacaactgctacacaaagaagatatgatgccaacctacccaaggatacttcgttggctggagtacaaatctcgccaagaaaatagctgaggcagcgattagtgatggagagtaagacagaagactgtactccagcagggatagctcagcgatgtaattggccaggaactccagatgcagagcaggatcctgtacaaacaaagagtaggggcattatcacagaatccctgcctgccacatatacatgtaattcctggcagcagtacctcatcacacgcctgcatccgtgtccaagactccaactatcatacgcctgcatcctgtacaaaaaaattgttggatacttgaatacttgaatccaagctgccaagttggatacttgaatccaagctgtattcttacacctgcaaaagactccaactatcattcttgtgtcaaaaaaattgttgaaccggacacccatgtccacatccaagcagcactggtttagcatccttgtcctctacaactccatttggacaacattcatttatgggatgatggttcgtttcattatgatcaagatttatttaacagcaaaattacagtatattgaatgaagttgatatcaagcggcgccaagaggatgacataaatagggtttcaactgttctttcaatttccaaaccagaggcatgtgtcttctccgcaactataactggagtgttagtaaggtgcatgacgaatggtttgctgatgaagagcgtgttcggaaggtggttggtttaccagagaagcatattgaaatgccaaatgacagagaaaatatgcaccagggctatcccaaagaaacactggtgcatttccttaaggctagagagtggaatgtagcaaaggctcataaaatgattgtagaatgtttgaattggaggattcaaaatgaaattgatagtgtgctggagaggcctatagccccagtagatttatacagatcaatatgtgattcacaacttattggcctgtcaggatacacaaaggagggtctcccaatttttggcattggtgttgggcatagcacatatgacaaagcttcggtaattactctgatgcttgctatttgtttggtaggctacaactacagccaaaatcataaaagtgtctggtttgaagctatcagcactaagccaaataaaggtacatgctat

SEQ ID NO: 99942 - DNA, 1047 bp, Zea Mays
catgcatcacactcgatctacactcacagagtgccggcccgttcttcactgcccacaaaggctggagccatgtggcagctgtctagggcttaccgcatggcctccttctgtctcatcagcctggccgccgccgccgtctctccggcgaccggcgacatggctgataccgtcgacatgatgtggggcaacacacaggtgctctacgacagctcctccggccgccaaacggtgtcgctgtccctcgaccgctggacgacctctgcgttccgctccaagagcacgtacctcttcgggagattcgacgtcgacatcaagcttgtccccagggactcagctggcactgtcaccacagtatatatggtaacagaggggccatggcagtaccacgacgagatcgaccttgagttcctggggaacaccaccggtgagccatacaccttgcacactaacatctacgcaagagggaaaggtgaccgagaaatgcagtaccgtctttggttcgatcccactgaagacttcaacacctattcaatcatatggaacccgcatatgatcttaatacttgtcaatggcgtaccgttgcggcggatgaagaatcggatgagggacgacactcccttcccgctcttccagcctatgcggctgtacgccagcatctgggacgccgatgagtgggcgacccagggcgggcgcatcaaaaccgactggtcccatgggcccttcacagccttcttccggaactacaccgccaacgcttgtgtcccctacaacagggcctggatttgcggccagggttcaggcgacagcagttggttcaaccaggaactggacgaggagggccagcagaaactgagtgaggtgaatggtaggaacaagatatacgactactgcactgactccaggaggttccctagcggataccctccagaatgtgggtcacagtagcaaggctaagagtactgcaggatgtagatccattcgttatgagtatgatcattattatagcaaatagtatttttcattcgttatgagtatttttatgttcgc

SEQ ID NO: 99943 - DNA, 1566 bp, Zea Mays
aggcacccgactcggaccgttgtcgcggctccggccgtcgccacccgctatataagacagaattccccctgccaccaccaactaggagagtggtggaggaggagacccaccgtcggctcgcccgtgtcccgattcccactcacgacatcaacctgtccccatccatctcgcccgcgacgtttgatggagtctctcctcgcctcgcgatccattaggtcttccttctccgccgtcgccagcaccaggggcgccgcttcccccaggccctcgcgcgtcgccaccctcgccagcgccggcgccggcgcccgctcccgcgcgctccgtgctggccacacggactcaatccttgaggtgctggcacaggacgatatgctgaacgcaaaggagctggtccaatgggagaatggcttgtcattcaatgacatagcggctaggcaggggattcgcatccgcagacactgccgccccactgcctccttgaaggagatagaggaggagctgggagccccccttaacatcctagagaagatcatttgggacaaggagattgaagtagctgaggggcatgctaagaagcctcttgaggaggtgattcaggctgcaacgaaagcccctccttcaagagacttctatggcgctttagaagctgcctacaagcgtaatggggtgcctgcattgattgctgaggtcaagaaagcatccccgagtaggggtgtgctcagggagaactttaatcctgttgaaattgctcaagcttatgaaaagaatggagctgcatgtttgagcattttgacagatgagaagtactttcagggaagctttgataatcttgaaaaggtgcgcagctcaggagtgaagtgccctcttctctgcaaggagtttgtcattgacaagtggcaaatctataatgctcgctctaagggtgctgatgcaattctactaattgctgctgtgctaccagatcttgacataaggaaatttcttcagatttgcgaagagttgggaatgacagctcttattgaggttcatgatgaaagagagatggaacgtgtgctgaagataaatggagttaagcttattggtatcaataaccgaagccttgagacatttgttgttgatacttcgaacaccaagatgttgctcgagaaacatggggatatcatcagggagaagggaattttggttgttggtgaatcaggtctgtttactccggatgatgttgcttatgttcagaatgctggcgtttctgctgttttggttggggaatccctggtgaagcaagagtgccctggacgagccattgttgggttatttggcaaagaactgctgcactgaatgagaggacaaagattgtagtagtacatggtttggtggtgaggtgttagtgctaggctgctagctgttagccatagcatcatttgcagtaatagcattggttttattaataataccaccgaatgtgacatgcagaataaaaataatgttcaataagttccattcagtgattttctttagttcagtgacaaacgaatgcgatctgttcatgacagagggggatctcccaag

SEQ ID NO: 99944 - DNA, 1539 bp, Zea Mays
aggcacccgactcggaccgttgtcgcggctccggccgtcgccacccgctatataagacagaattccccctgccaccaccaactaggagagtggtggaggaggagacccaccgtcggctcgcccgtgtcccgattcccactcacgacatcaacctgtccccatccatctcgcccgcgacgtttgatggagtctctcctcgcctcgcgatccattaggtcttccttctccgccgtcgccagcaccaggggcgccgcttcccccaggccctcgcgcgtcgccaccctcgccagcgccggcgccggcgcccgctcccgcgcgctccgtgctggccacacggacgatatgctgaacgcaaaggagctggtccaatgggagaatggcttgtcattcaatgacatagcggctaggcaggggattcgcatccgcagacactgccgccccactgcctccttgaaggagatagaggaggagctgggagccccccttaacatcctagagaagatcatttgggacaaggagattgaagtagctgaggggcatgctaagaagcctcttgaggaggtgattcaggctgcaacgaaagcccctccttcaagagacttctatggcgctttagaagctgcctacaagcgtaatggggtgcctgcattgattgctgaggtcaagaaagcatccccgagtaggggtgtgctcagggagaactttaatcctgttgaaattgctcaagcttatgaaaagaatggagctgcatgtttgagcattttgacagatgagaagtactttcagggaagctttgataatcttgaaaaggtgcgcagctcaggagtgaagtgccctcttctctgcaaggagtttgtcattgacaagtggcaaatctataatgctcgctctaagggtgctgatgcaattctactaattgctgctgtgctaccagatcttgacataaggaaatttcttcagatttgcgaagagttgggaatgacagctcttattgaggttcatgatgaaagagagatggaacgtgtgctgaagataaatggagttaagcttattggtatcaataaccgaagccttgagacatttgttgttgatacttcgaacaccaagatgttgctcgagaaacatggggatatcatcagggagaagggaattttggttgttggtgaatcaggtctgtttactccggatgatgttgcttatgttcagaatgctggcgtttctgctgttttggttggggaatccctggtgaagcaagagtgccctggacgagccattgttgggttatttggcaaagaactgctgcactgaatgagaggacaaagattgtagtagtacatggtttggtggtgaggtgttagtgctaggctgctagctgttagccatagcatcatttgcagtaatagcattggttttattaataataccaccgaatgtgacatgcagaataaaaataatgttcaataagttccattcagtgattttctttagttcagtgacaaacgaatgcgatctgttcatgacagagggggatctcccaag

SEQ ID NO: 99945 - DNA, 270 bp, Zea Mays
acagtcttaattgaggcccacaattgtacttctagtgcttgaaggaagaccacaacacctactagtgcttgggtagcatcaaaggctatccatcatctcaagaaggagtcaaacatgggcccaaaggagttgcgaaaaaggttggaggagaaatataagtgtgaaattcactatgacacggtttggaaagggaggcaattggctctaagagaattacatggcagctgggaagagagttttcagatgctattcaattggagggcagaggtg

SEQ ID NO: 99946 - DNA, 106 bp, Zea Mays
cgggtccagggctgggaaggcactcgcattctctcacccttctcggattgacgcctggtgtgggtgcctcttggtttggtgttgctcgagctgggcttctttatcc

SEQ ID NO: 99947 - DNA, 171 bp, Zea Mays
cattgcattgatatttgctttaaaagttcttcaaaagtcaacttgaatttgatattctttcttttttacataatatatggcgacatacatgaatacacatttgaaaggcaacaaacacaagaaactaaatatatggccatatattttaaactttccaacgttacattatgc

SEQ ID NO: 99948 - DNA, 1273 bp, Zea Mays
agatttgtggtcatgggactgtgggacgatacaaaatagtggccgaaatatggttttcgtgatgaatttagaatcaacattgatttagggagtcccaataagaattctaaatgcaggaatgaaattggattttgtagggagtttgtaaatttaaggacaaatgttttatatagctgttgggaagagtttttctaaaaactttttaaattcatatctagacagagatgatttaagcagggagagatagtcacttgatagaagactcgtcgattcgtctcaggtagcggccgaaccagagccctgtcccaacccgaccacctctcttctctacggcgcgaggaagggcagcgcccaccgcagcgtcggcgggaaccgggcctcgctctccccatctcttcggctttctggaatcacatttcttaagaactatctgttggagagctaaactaggctcttgttcatattatggatcagcaagctatgattgatgctgattttcttgaaccaactgtactcttagatgagacacattaccaggaggggtacagaaatggctacaatgatggtttggcatctggaaaggaagaggggaggcaggttggtttaaagatgggtttccaggtcggtgaagaactgggtttctttcacggctgtctggatgtgtggacgtctgcaattctcattgatcagaatgccttcacagctcgggtcaggaagaatattgagcaactggctgcactggtgggcagctatccgctgtccgatccggagaatgaacaaattcaagacgtgatggagaagataaggctgaaattcagggtcatcactgcaagcttaggggtgaagttagagtatgaagggcaccccaaatcatctaaacaggatgctgaggatctgtgagcggtgattgaaattacattttagtttctccgcccttgctgtttaaagctcttcaactcattggcatcatggggaactgtcgtgagacatcaatggtcagagtctgaccataaccacatatatagttttaacaatgtctcaagttttgtgttattacctgttgtctgctgtctgccatatgtaatagtttcctttcacaagtcaaaagcacttccttcccattttctttgaagtacttgttggcttgtattctacatgttgggagcatatagatcttcctcgtaaaaacacacgtcccatgtattgcaaatctgcatagatccaattatctcatgggtatgttcatcccaagtgtagaaaatcagtgatggcc

SEQ ID NO: 99949 - DNA, 570 bp, Zea Mays
aatggatgaggaggtgtggggaggacgatccgagaaccaaacaaagtcagaaccgacaatcacaacatctctaggatggacgcaagaggtgaaggtatcagtgcgaattagaaaatgcaatgcagatagagctccaacttcagcaaggcacctagaactcttcgcacacgtgctgaagacatgatggagaagataaggctgaaattcagggtcatcactgcaagcttaggggtgaagttagagtatgaagggcaccccaaatcatctaaacaggatgcagaggatctgtgagcggtgattgaaattacattttagtttctcggcccttgttgtttaaagctcttcaactcattggcatcatgaggaactgccgtgagacatcaatggtcagagtccaaccataaccacatatatagttttaacaatgtctcaagtttggtgttattacctgttgtctgttgtctgccatatgtaatagtttcctttcagaaggcaaaagcacttccttcccattttctttgaagtacttgttgacttgtattctacatgttgggagcatatagatcttcc

SEQ ID NO: 99950 - DNA, 375 bp, Zea Mays
atggcgacattcaacgcaaaggcagcggcggccatggtccacctgtgtgtggcgctagaggtcaatggtagcagggcttatatgtcaaggcagcatcatgcggcgtgtgtatgtgggcctgtggggacaggggagggtacgccccgcgtgcctcgtggtgaggccacgcggcgcggcggccattcaagtcgatatcgtccagatttcgtgctgctgctaagcaacaagatcccggggacagggaggggattgccgtgccgtcctctgttctgttgccctgcaattgagagcgccagtgccctgcaggcccctgttttatggcctcctctgtactctgtagtacccatcaccaataaccccttcggttgtttttaa

SEQ ID NO: 99951 - DNA, 586 bp, Zea Mays
gaacaacacagataagtaccctattctctcacaaattgctcgtgatgtgatgtctatacaagtgtcaactgttgcttcagagtctgcctttagtgctgctggccgggttgttgatccatatcgcaatcgacttgactctgagatggtacaagcacttatatgtactaaagattggattcgtgcatcaagaaaagattctacaattattcattctattttggctgatctaaaaccttcggaagcaattcctatcagtcagccctgcatggatgatgaggaacaagatgctgaaagtgatcctgacgtcatgaatgattatgatgagctttgaatgtgagcctgcgactacgccgactagtcatggtgcttaatgcttggcaacatgtttggaatttagataaatatgttgctgtgtcaatgtgtgctgtgtccatgtttggcaactgtgtgctgtgtgagataaacatgtttggcaacatctatatggagcagcagcagctgtgtgctgtgtactgtgtatttaaatctgaacagaactgtgtgttgtactgttgtgtgcgataaatatgttgttgtgtgctgtgca

SEQ ID NO: 99952 - DNA, 1770 bp, Zea Mays
tgccgaattcaagaaccggaacacagcatcggcaccttccttcttctccgtcgcgtcccttataaatatcctcgaccctttcccatttcctctcccatttatttcctccgcttcagctcccattctccgccaaataaacccccgaaaagcaggagaggcgagacccggaagtggaaggctagggttagggtcccagctccccgttgcctgggcgagccgagtgatggccgcccctgccccctccggcgcagctagtgccgccgcctcaccgtccccgctgatgcagctgccgtcgccgttcgcggagctcgtcaagggcccctccggcctcgagaaggtcgtgcttcgcggcgctcgcaactgctgtgccgagatttatctttatggaggtcaagtaacatcatggaagaatgacaatggggaagacttgcttttcctcagcagcaaggctattttcaaacctccaaaagctattcgtggtggtataccaatctgctttccccaatttggatcacatggaaatcttgaacaacatggattcgctaggaaccggttttggactattgacaacaatccacctcctttaccattaaaccctgctattaaagcttttgttgatctgattctgaagccttctgaagaggatttaaagatctggccccacagttttgaatttcgtttgagagttgctcttggaccttctggagatttgagtctcacatcacgaatcaggaacaacaacccagatggaagacctttctcttatacatttgcatatcacacatacttctctgtttctgacataagtgaggtgcgtgtcgaaggactggaaactatggactaccttgacaacttaaaggcaaaggaacgtttcacagagcaaggcgatgctattgtttttgaatcagaagttgacaaagtttaccttgctgcaccctccaaaattgctatcattgatcatgagaagaaaagaacatttgtcgtgacaaaagaagggcttcctgatgctgttgtttggaacccttgggacaagaaggcaaaagcaatgcaagattttggggatgcagaatacaagagcatgctgtgtgtggagcctgcatctgttgagaggcctattactctgaaacctggtgaagagtggaaaggaaggcttgtgctctcagctgttccctcgagttactgtagtggacagttagatccattgaaggtccttcagggctgaaaatccttactttctgcctcttgtacagaagttcattgcccttactatttgatgctgggctagcgtctacgccgcatcgtccttttgccatttccaccacccgctatatctctggtcctttttgtatctagagtcttgagtgataggttgattccgaataacagtctgggctttgagcttagccttgggtcatctcatcggtgaatgctgaatggtacaaaatactggcatacgtgtcagttttataaatcatttctgggcagcacagattctttaacattgtgctttggtgcttctttaatacgtagttgatcatgtttgagagctgctatcctcgacctttgctcattcagtctaggacactgcaaagctgaagatggatcccctcattttactatcttgtgatgaggtttcgatcgtaagcggttagcccttaacccttaccagtatgtgtgctcctccgccttctcatgtgatccgtcttgttgcaaaatcatttgtctttggatttgaaagaacaaaagattagtactcaacgttggcttttt

SEQ ID NO: 99953 - DNA, 1667 bp, Zea Mays
tgccgaattcaagaaccggaacacagcatcggcaccttccttcttctccgtcgcgtcccttataaatatcctcgaccctttcccatttcctctcccatttatttcctccgcttcagctcccattctccgccaaataaacccccgaaaagcaggagaggcgagacccggaagtggaaggctagggttagggtcccagctccccgttgcctgggcgagccgagtgatggccgcccctgccccctccggcgcagctagtgccgccgcctcaccgtccccgctgatgcagctgccgtcgccgttcgcggagctcgtcaagggcccctccggcctcgagaaggtcgtgcttcgcggcgctcgcaactgctgtgccgagatttatctttatggaggtcaagtaacatcatggaagaatgacaatggggaagacttgcttttcctcagcagcaaggctattttcaaacctccaaaagctattcgtggtggtataccaatctgctttccccaatttggatcacatggaaatcttgaacaacatggattcgctaggaaccggttttggactattgacaacaatccacctcctttaccattaaaccctgctattaaagcttttgttgatctgattctgaagccttctgaagaggatttaaagatctggccccacagttttgaatttcgtttgagagttgctcttggaccttctggagatttgagtctcacatcacgaatcaggaacaacaacccagatggaagacctttctcttatacatttgcatatcacacatacttctctgtttctgacataagtgaggtgcgtgtcgaaggactggaaactatggactaccttgacaacttaaaggcaaaggaacgtttcacagagcaaggcgatgctattgtttttgaatcagaagttgacaaagtttaccttgctgcaccctccaaaattgctatcattgatcatgagaagaaaagaacatttgtcgtgacaaaagaagggcttcctgatgctgttgtttggaacccttgggacaagaaggcaaaagcaatgcaagattttggggatgcagaatacaagagcatgctgtgtgtggagcctgcatctgttgagaggcctattactctgaaacctggtgaagagtggaaaggaaggcttgtgctctcagctgttccctcgagttactgtagtggacagttagatccattgaaggtccttcagggctgaaaatccttactttctgcctcttgtacagttcattgcccttactatttgatgctgggctagcgtctacgccgcatcgtccttttgccatttccaccacccgctatatctctggtcctttttgtatctagagtcttgagtgataggttgattccgaataacagtctgggctttgagcttagccttgggtcatctcatcggtgaatgctgaatggtacaaaatactggcatacgtgtcagttttataaatcatttctgggcagcacagattctttaacattgtgctttggtgcttctttaatacgtagttgatcatgtttgagagctgctatcctcgacctttgctcattcagtctaggacactgcaaagctgaagatggatcccctcattttactatcttgtgatgaggtttcgatcgtaagcggttagcccttaacccttaccagt

SEQ ID NO: 99954 - DNA, 83 bp, Zea Mays
attttcagtttaaatgataagtgctggtgtggaagatcatttcattccatgactgttcctatagttgtggccacagtctagat

SEQ ID NO: 99955 - DNA, 889 bp, Zea Mays
cggacgatccaatctatggccgcctccaccactcgctcgccggcggcgattgaccggcacgcggtacggttgatcacgcgcgtctccatagcgatggccgccgtcgccacactctcactcttgtacctcttgcgccatgcatccatctactgtttccccgcgtcccaccagcctgccctcaccatctcgctcgccccattcccccgcagctcctgcgacgccgcctcacgccgagtggtcccgcccgaccaccgcctcgctaagctccgcgcctccccgcgctggagacgccgtgccgcctccctggccatgtccgccttcccgccgctccgcggcctcggcatcctcgcggccccttcgcgcgtcctctgcctcgccgccggcgccggccacgccgtcgacgcgttccgcgcatcggggaccagagacgccataggggtcgacctcgtagagttcccgccgcttgtccgccgcgcggatccccaccacctcccattttccgatggcgccttcgacctcgtgttctcggatgacccctcggcgacctccggtgcgctcttcccgtcccacctcgcgcgagaggctgagcgcaccgtccgccgcggtggcggcatcgcgctcgcgttcgaccaggagatcgagaccgtcgctgtcgctacgctattcaagagattgtgtgtcctggatgtgaaggatgtcacgttggatggctctcaggttaggctactgatcatgcagaataatggcacagacccatattgatccgtgttcatccgcttcatgtattatcatatctcagtgatgctatccaaagaatctgaggaaggcagttgtgaacatgaattataatcagtatagatgatggttcataaatatacgaaattgttcg

SEQ ID NO: 99956 - DNA, 283 bp, Zea Mays
gtatcaagctgctactaatgttgaaaaaacatgcatgaaacatcttgcccttgctgaagtccttcaggttctgaatatcataatcaacacaaaaaagtggatggtgccccattattcaggttggcattcattgtcctttaacataatagcggttgatgctactactgccgctagtggaaaagcttaccattggtacattatcttcttgtaccaattgaacattgaaaaatgaaggttggttttagtttgatggttgtctaaggtcctgacaatcaaagatctt

SEQ ID NO: 99957 - DNA, 1243 bp, Zea Mays
gctgacgtcatcagtgcctttccccttccttgtttgctgaagtccctggtgtggaccgtggagtctcagggagaagcgcatgcgcacgccaatcggcaatccaccaaagattccgttctcccagtcgcctctcccagtcccagatctcgttcactcgcactcgcgcaaccccgcggccccgcgcctaatggcatcctgtggcgccggcgacgccgcgtcagcgcagccgagggccagtatctcgcacgtcatcttcgatatggacggccttctcctcgacacggagggcttctacacggaggtgcaggagaagatcctagcgaggtacgacaaggtgttcgactggtcgctcaaggccaagatgatgggcaagaaggcggccgagtctgcccgcatcttcgtcgacgagtgcggcctcaacggcctcctcacccccgagcagttcctcgaggagcgcgagagcatgctccaagcgctcttcccatcctgtaccaagctgccaggagtactacgtttggtgcatcatcttcatgccaacggagtaccaatggctgttgcgacaggatcccataaacgccattttgcactgaagacccagaatcaccaggaaatgttttccctgatgcatcacgttgtcatgggtgatgatccagaggtgaaggctggcaaaccatcccctgatatttttcttgctgctatgaggaggtttgagggcggcgtagaacctagcaagtgcttggtttttgaagacgctccttcgggtgtagctgcagcgaaaaatgccggaatgtctgtagtgatggtcccggatccaaggctggatgtttcgtatcacaaaggagctgaccaagttctcagttcattgctggacttcaaacctgccgaatggggcttgccggcatttaaagagtagacattccatacaagataacaagattataagagtctagtgaagaagaatgtgagatactccctaagatgcaaattaaagagtacaattctttaagatgctgctcaaggaaaattccataaaatgttggtcaaacatacaattgaacattcttgtcgcctcctaactatgtgtcaccaaattactctgaataagttcgttccgattccgatataataatatccctgtctttgttttcactagaacaggaggcgcactttcgtgtgcagccctacagtgaccatggctatgatgaatagctatttttgtttctgggaaacatctttgcagacg

SEQ ID NO: 99958 - DNA, 1536 bp, Zea Mays
cgatctgacaatactgtacaatttactctatgttgacaattactttggtccactggatttatggggaaaatataactcaaaaggaacgaacttgagttctcaagttgatatattcagatgtaatgtaattccatagttgctctggccatttggtttcatgttgctaattgctatatgctgtccttaacaagatagtctttggtttctagtttcatgcaccaccataaaatcaaagtggggaagtgaactttggtagacacacattactaagtattatatcaatcaatgagttaacacatactccctccgttcttttttatttgtcgcgttttagttaaaaaataaactagtgggcgacaaatgaaaaagaatggggatagtactatttttgcatagcatttctgtgaacatataaattcaactttcagatacgtgatttgactttataggtgatgtcaaacacaattgactattttgcgctaacttacatttcacggtatcatatggaatatgttgcatatggacttcaggctttttgatgctaatgctgtccaattatccattgaagtggaaccaaagaaaattgctatatttttcaagatttcagattgtggccttttgcagttgacacttattctttgtaatgtcccagacctagttttgactttattgttcctcttaagacaatctcttgtggtaaaattactgtttcattaaggcatgccttgactggtgggatattttgaagaataaaaaccaacattttagcatcactgatcaagttgctttaacataagtgctttgcgattcctttttgtaatttacttaaattgcgataggcggtttgcttatgatgtgttgaatgaatcttgtttcttgcaggagtactacgtttggtgcatcatcttcatgccaacggagtaccaatggctgttgcgacaggatcccataaacgccattttgcactgaagacccagaatcaccaggaaatgttttccctgatgcatcacgttgtcatgggtgatgatccagaggtgaaggctggcaaaccatcccctgatatttttcttgctgctatgaggaggtttgagggcggcgtagaacctagcaagtgcttggtttttgaagacgctccttcgggtgtagctgcagcgaaaaatgccggaatgtctgtagtgatggtcccggatccaaggctggatgtttcgtatcacaaaggagctgaccaagttctcagttcattgctggacttcaaacctgccgaatggggcttgccggcatttaaagagtagacattccatacaagataacaagattataagagtctagtgaagaagaatgtgagatactccctaagatgcaaattaaagagtacaattctttaagatgctgctcaaggaaaattccataaaatgttggtcaaacatacaattgaacattcttgtcgcctcctaactatgtgtcaccaaattactctgaataagttcgttccgattccgatataataatatccctgtctttgttttcactagaaca

SEQ ID NO: 99959 - DNA, 1333 bp, Zea Mays
atggggccttcaacatccactccttcgtatgcagaaattaggggtaaaaatggagttaaagtcgtgaatagaggtaaaaatgcaattgtcccaaatttcaaagtgtccctggtgtggaccgtggagtctcagggagaagcgcatgcgcacgccaatcggcaatccaccaaagattccgttctcccagtcgcctctcccagtcccagatctcgttcactcgcactcgcgcaaccccgcggccccgcgcctaatggcatcctgtggcgccggcgacgccgcgtcagcgcagccgagggccagtatctcgcacgtcatcttcgatatggacggccttctcctcggtatctctatcttctccatgttttgtcgatcggggatgtccatgttcttggccccatcaccattccatgggtggagcgcgctgatgatcctcggtctgcggcccggggcgcagacacggagggcttctacacggaggtgcaggagaagatcctagcgaggtacgacaaggtgttcgactggtcgctcaaggccaagatgatgggcaagaaggcggccgagtctgcccgcatcttcgtcgacgagtgcggcctcaacggcctcctcacccccgagcagttcctcgaggagcgcgagagcatgctccaagcgctcttcccatcctgtaccaagctgccaggagtactacgtttggtgcatcatcttcatgccaacggagtaccaatggctgttgcgacaggatcccataaacgccattttgcactgaagacccagaatcaccaggaaatgttttccctgatgcatcacgttgtcatgggtgatgatccagaggtgaaggctggcaaaccatcccctgatatttttcttgctgctatgaggaggtttgagggcggcgtagaacctagcaagtgcttggtttttgaagacgctccttcgggtgtagctgcagcgaaaaatgccggaatgtctgtagtgatggtcccggatccaaggctggatgtttcgtatcacaaaggagctgaccaagttctcagttcattgctggacttcaaacctgccgaatggggcttgccggcatttaaagagtagacattccatacaagataacaagattataagagtctagtgaagaagaatgtgagatactccctaagatgcaaattaaagagtacaattctttaagatgctgctcaaggaaaattccataaaatgttggtcaaacatacaattgaacattcttgtcgcctcctaactatgtgtcaccaaattactctgaataagttcgttccgattccgatataataatatccctgtctttgttttcactagaaca

SEQ ID NO: 99960 - DNA, 854 bp, Zea Mays
aggcttccggctccagacgtgtgtccacgtccacgaccacgagagactagctagccaagtgcatgcaaccagccatgcaggccgggaagacggcagtggaggcgacgaaggaggccgcggccaacgtcggggcctcggcgaacgccggcatgcagaagacccgtgccgccgtgcaaggccaggtggagaaggccacggcgcgcaacgcgtcggacaaggtcgcggccgaggagcgccagcgggagcgcgtgcgcgccgcggagctggagaagcaggacgccgtgcgcgccaacgcggccgcgaaggagcgcgccattggcggcgcggccacgtaccagcaccagcacccgtcgcagggcgcgcccgggatcggcgcccagcaggagtatggcggcggaagagtcgcccccgcgggcgggcacgtcgaggccggcgtcggcgagacccgtcccgtcgctaggggcaccggcacggcgcggcccagcgccgcgcacaacccgctcgtcggcagcgacttctcgcaggcgcgcggcaccggcggacagtaccagtgagcggctgccgccgggacgtgcccgtacgtgtgacgtatcatgtgtgtgagataggcatgtacacgaatggtcctcgtgtgataatctatgctaaataatatgtctctaatagtgtattagataatgtaattcccattaccttactctgtatctgatgtatactagtttcgacggtcttttgagcatcaaaagtgggagacggtttcgccctagtggcggacggttcgccttaaggtccgtccggtttatggccctacgatcagataactccggatcaatttagttgattatttttatctc

SEQ ID NO: 99961 - DNA, 2210 bp, Zea Mays
atggcgtgcctcgcgatctctctgcagccggtgaacggcccggacatcctactgcaaacgcggtcctggttccccgtctcccgcgccctcgccgccgtctccgcctttcgcctcgcgcgcctccaccttgcacgcggcaagcaacagtcctcctcatcctccgcctcctcggcctcgctcgacgccatcggcgacgacccgctcgccgccgcgtccgggcagctcgttgtcggcgtcgagtcacagtaccgcgtggtgtaccgccttgtcaactccatctacgttctgggtgtcaccaccgcaggctctgaccatgctgcccctgctgtcaacgccttcgccgtcgccgacgctgtcaaccagtccgtctccgtcgtcgttgcagcctgccgtggcgtcgacgtcacccctgagaaggtgcaccgcaagtaccctgaggtctatctcgctctcgacctcgtcctccacggcgttggctccgtccgcctctctcagatcctcgccaccatccatggcgacaacctcgcgcgcatggtcaactcctcgcccgacgccgaagcccgggcccgtggcgcggatccctggcccgtcgtcgaacacctcgcgcaggaccgccacgctgcgagggagggcttctcgggcgcctctttcgagcttccccaggagacgctcgcggctggtgacgaattctcgtctaacatcgcccccgcgaccactgttgctactggggatgaaccaccacctgaggaggcagcacctgtggaaaaggatcctttcgcagccagtgacctgattaacaacaaaccggaggaggcattggtgggtgggttcaaaaagaacaaagagactgcccttgtggttgctgatcctgcagctgcgctagctggattggaggttacgactttgccaccagctgaggcgactaagccgacatttattggagttgaagggtttgagggtgattatggtggcattgagtttggcaacgatgagacttcacttgctgaggcatttgaagggctcaatgcgccatttggtggtggcctggatgcttctgagtttgttacaacaacgaagaaggatcacaaggacaggaccgtcactgggcttgagttgctagtagcaagtgggcagccaccgaatgcagctgctggtactccattggagaatctcttgctgactaagcgcgcagaaatgaccgctcctgagttgtttattgctgaggagatcaatgcagaattcaaggagtctattcttgtgcgtgttggattgaagggtacaatcttcctgcggaccttgccactgaataaggcagcgggtaaggagacagagttctcatttcgtcttgagggcacatcaggaatgaagagggctgcattgcagagtaatgtcttgagtaacctacaaaatggactgttccatgtcaggaccgtgtcgaaagaagaacccattcccctcatgaagtacagcttcctgccgaagcactcacctctccctttgaggatgcgcctagtgaagcgccatagtggaacgttactctcagtgatgatacagtacgcatccaatccaatgctgccccagcctctgagcaatgttacattcgttgttaagcttcctgtggatcctactctgctcaatgtttcacccaaggctgtgctaaaccgggcagagaaagagtttagatggcatatttcagacattcccctgaaaggtccagccggcaggctcagggcgcggatgcctgttgaccaagactccaaagatggtgagctagaggttgttgggatggtgaagtttgcttaccaaggtccattcacattgtctggcattaaactatgcccagccactgatggcattgcccaatttaatgaagttggccataccttctccagtgggagttacctgtgcatttgataggtgctgctgcgcagaagcaggccgcttgctgttgactgtcaggaggatgcaggtgacaattgagctgtggccggtagcatggcctagtaaaaatgtggtctgttggagcatgcaacatggtttatgtaaaacttgttttcttatagaaacgagtaaaagttgttttgtccaacactcggaacttctgggctttccgggtacttgtttttcttgaacacgaatttgttaagaggatatgagcaaagttattattggttaggctaaaatgataatcaagaaatttggttttcctc

SEQ ID NO: 99962 - DNA, 2336 bp, Zea Mays
atcgcccagttctctcttctctttctttcttccccttcctacaccgccgcaccccactcccagatcccactgctccccagatccgcgcccgagccctagtccccagatccgccgcggcgccggagatctactcctcgtcttggcgtccgcggcgccatggcgtgcctcgcgatctctctgcagccggtgaacggcccggacatcctactgcaaacgcggtcctggttccccgtctcccgcgccctcgccgccgtctccgcctttcgcctcgcgcgcctccaccttgcacgcggcaagcaacagtcctcctcatcctccgcctcctcggcctcgctcgacgccatcggcgacgacccgctcgccgccgcgtccgggcagctcgttgtcggcgtcgagtcacagtaccgcgtggtgtaccgccttgtcaactccatctacgttctgggtgtcaccaccgcaggctctgaccatgctgcccctgctgtcaacgccttcgccgtcgccgacgctgtcaaccagtccgtctccgtcgtcgttgcagcctgccgtggcgtcgacgtcacccctgagaaggtgcaccgcaagtaccctgaggtctatctcgctctcgacctcgtcctccacggcgttggctccgtccgcctctctcagatcctcgccaccatccatggcgacaacctcgcgcgcatggtcaactcctcgcccgacgccgaagcccgggcccgtggcgcggatccctggcccgtcgtcgaacacctcgcgcaggaccgccacgctgcgagggagggcttctcgggcgcctctttcgagcttccccaggagacgctcgcggctggtgacgaattctcgtctaacatcgcccccgcgaccactgttgctactggggatgaaccaccacctgaggaggcagcacctgtggaaaaggatcctttcgcagccagtgacctgattaacaacaaaccggaggaggcattggtgggtgggttcaaaaagaacaaagagactgcccttgtggttgctgatcctgcagctgcgctagctggattggaggttacgactttgccaccagctgaggcgactaagccgacatttattggagttgaagggtttgagggtgattatggtggcattgagtttggcaacgatgagacttcacttgctgaggcatttgaagggctcaatgcgccatttggtggtggcctggatgcttctgagtttgttacaacaacgaagaaggatcacaaggacaggaccgtcactgggcttgagttgctagtagcaagtgggcagccaccgaatgcagctgctggtactccattggagaatctcttgctgactaagcgcgcagaaatgaccgctcctgagttgtttattgctgaggagatcaatgcagaattcaaggagtctattcttgtgcgtgttggattgaagggtacaatcttcctgcggaccttgccactgaataaggcagcgggtaaggagacagagttctcatttcgtcttgagggcacatcaggaatgaagagggctgcattgcagagtaatgtcttgagtaacctacaaaatggactgttccatgtcaggaccgtgtcgaaagaagaacccattcccctcatgaagtacagcttcctgccgaagcactcacctctccctttgaggatgcgcctagtgaagcgccatagtggaacgttactctcagtgatgatacagtacgcatccaatccaatgctgccccagcctctgagcaatgttacattcgttgttaagcttcctgtggatcctactctgctcaatgtttcacccaaggctgtgctaaaccgggcagagaaagagtttagatggcatatttcagacattcccctgaaaggtccagccggcaggctcagggcgcggatgcctgttgaccaagactccaaagatggtgagctagaggttgttgggatggtgaagtttgcttaccaaggtccattcacattgtctggcattaaactatgcccagccactgatggcattgcccaatttaatgaagttggccataccttctccagtgggagttacctgtgcatttgataggtacctgcttgtgctgtaggtgcttgttcacctgttttatgtttgtttctacagcagggtgtgaaaatcctattgtatgtagcaaagtgtgtttctttcactgaggctgaaattccatcacgtttttgagttgtctgtttcttggtaagtcatttgtggttactcatgaaggctactttatgcatcaagtttatcattcatacgaagaaacaatgtactgctctatttaattactattttattgcttctcatttttcttagca

SEQ ID NO: 99963 - DNA, 866 bp, Zea Mays
atcatttttgttgcaggaggatttatatatagacaatagtacctgggagtggagcgtggcatgagaagggagttgatggtggcgttggctgacatgtaggatcagactcctataaaccctgaattccaataagatacttcatgagagctggagagcaccaggagcggtgctcgcgatctcaatacatcatgttagtagtgttacaattggtatcagattcatctccgatcctagcggatcctctggcgcataccttgtgtccgcaataccagatgcgtccagaagcagtccgaagcaatggagatatggcagctctccttcagtccattcaagcgcaaaatgatgtgattaaacaggctttggaggagaatacatccgtggtttgagatcttgctacgtggaagccacacatggaggttgaggtgagttctctccgcgccgatgtgggacatttatcacagaaagtggatactccagtagcctttcaggaagctctgcaccctgcactcaaggtgttcgatcgaatgcctcaggactacacaaccccggttggtgctcagaaggattcagttcttcttcatcagcacttgggtcatcgcaatttagactcccacctgagtgatggatatggggtattcactaccttgactccatctatagtcacgggtattcataatgctcctccacctgttacaccaattcattctccattgcatactgctccccatcaatttgaacacttattgtctgtatactctattcaattggctgtctctttaccccaactcagttttcctcggtttgatagtcagaccaccctaaaatgtgaaaaacaaagtgtgaataatattttgaagtgttttcca

SEQ ID NO: 99964 - DNA, 2058 bp, Zea Mays
cagaatgaggaaccaaaaccaaacaacaccaatgggcggcgcggcgatatagctagggtagagtagttcacttccccatcaccctctctcggtctcggtctctcctcccctcctacgccaattgctacccgtcgtcgcgtcgcccccctcctaccgtcctacgtcttccacctctccccgcttcctcttcctccctgctgagcggaagcgcgcaagcaatcgctgccttttcttggcgtgcgcagctcctggtcggcacggcagccccccgcgggatctcgcttgctggcctggccgcgcgacattgaggcggggcgcctggagctcggagccgccgtagctggtgttggtgcctcggagccgatcgggtgtctggttcctgatttgatctgcagctgcagctgcggcggcggcggccgacatggcggcttcgggagggctcgagcagtggcagaaggacgggttcttccaggcggccgaggaggtgcaggagtccgcggacttgatggaatcagtctatagaacttggatgcgtgagcgtagtaatggatctggctcagaggaggtagacgatttgcaaagggagcttcagacagctttaggaactgcaaaatggcagttggagcagtttgagagggctgtaagttcaagcaacgataagtattcattggaagaaggtacagtagcacggcgtcggcagtttgttgtagccattgaggatcagatatctcgtgtagagaaagaaataaatggttctttaatggacaatggcgggcaagggctcaactgggtgaagttagatgacgaagagcgagatgatctagttgctttcctttcagcacctgcagagttctattcagaaatgaagagcacagacatcagtgaccgtgttctatctagacaaaagaatgtgccagttggcaggaacgatcagagtgatccacctttaatcattaaagacatatatgaagtggcacgcacagaaatttctactgttaagagtgatgtttgtggtctagctgaggagttacatggccttagaaggaatttgagttcagggaatgatcattggaagattgacattggtaacaagatggatgatgatagaaaattgtcaactggggttcaggccgcaagtcagacaactccttcatcaagcatccggagaagcgcagaatctataacaagagtgagatggttttggaatagcttgtggaaatccaagagggatgaacaacgcccattaagatatgatatgtcatataatcttgacctcagggttgtatccttattaacacagagatttaatgggctagcggagagaagcagaaattatttgacaagttggaaggaaaattccaggacttctggaaggacgggtgggcttcatatacaaggccaacaacagaacattcagtttggccgttctattcggatcaccctcttactggtgctgagtatctttctgattgtgccatttctcgcctcggcatgacaaggcatgtattgcttcaccggtgaggaacattggggcagcttaccatggtcctgctcgtactacatacagatcatgactggtggtgttctctcgccggcaaatgcagcaaaccaaccatgtctttcctgtgtggtgtggctgctgcatatgtgacaggaaaagaagcacggcggtgaaggtttcaactgtgcaatgcgtgatgctccgataccatgaactcctcaccgggcgcataaccatgctaagatttatcagggttatgataaatttgtgatggctgattgctgccaaaggaggtggctgttctcatctcactactctatatcccacgagtgaaagcaattgtaaaaagttctagagccactctatatcccacgaacgaaagcaactgtaaaaagttctagagctggtaggataagtcctgaatactgttattgataataatacatttaatactgtatttgccaaaccgttcgccgccgctcgtatggttttctgtttagaggtgctcttttgatccaggtttctgcacttgtcctcattttatggtatgcttgcca

SEQ ID NO: 99965 - DNA, 2397 bp, Zea Mays
cagaatgaggaaccaaaaccaaacaacaccaatgggcggcgcggcgatatagctagggtagagtagttcacttccccatcaccctctctcggtctcggtctctcctcccctcctacgccaattgctacccgtcgtcgcgtcgcccccctcctaccgtcctacgtcttccacctctccccgcttcctcttcctccctgctgagcggaagcgcgcaagcaatcgctgccttttcttggcgtgcgcagctcctggtcggcacggcagccccccgcgggatctcgcttgctggcctggccgcgcgacattgaggcggggcgcctggagctcggagccgccgtagctggtgttggtgcctcggagccgatcgggtgtctggttcctgatttgatctgcagctgcagctgcggcggcggcggccgacatggcggcttcgggagggctcgagcagtggcagaaggacgggttcttccaggcggccgaggaggtgcaggagtccgcggacttgatggaatcagtctatagaacttggatgcgtgagcgtagtaatggatctggctcagaggaggtagacgatttgcaaagggagcttcagacagctttaggaactgcaaaatggcagttggagcagtttgagagggctgtaagttcaagcaacgataagtattcattggaagaaggtacagtagcacggcgtcggcagtttgttgtagccattgaggatcagatatctcgtgtagagaaagaaataaatggttctttaatggacaatggcgggcaagggctcaactgggtgaagttagatgacgaagagcgagatgatctagttgctttcctttcagcacctgcagagttctattcagaaatgaagagcacagacatcagtgaccgtgttctatctagacaaaagaatgtgccagttggcaggaacgatcagagtgatccacctttaatcattaaagacatatatgaagtggcacgcacagaaatttctactgttaagagtgatgtttgtggtctagctgaggagttacatggccttagaaggaatttgagttcagggaatgatcattggaagattgacattggtaacaagatggatgatgatagaaaattgtcaactggggttcaggccgcaagtcagacaactccttcatcaagcatccggagaagcgcagaatctataacaagagtgagatggttttggaatagcttgtggaaatccaagagggatgaacaacgcccattaagatatgatatgtcatataatcttgacctcagggttgtatccttattaacacagagatttaatgggctagcggagagaagcagaaattatttgacaagttggaaggaaaattccaggacttctggaaggacgggtgggcttcatatacaaggccaacaacagaacattcagtttggccgttctattcggatcaccctcttactggtgctgagtatctttctgattggtcagtgcccaacttgccttgttttaaactgtgggaaaagtgataaattactcacatagtacactataaggaaaaaaacacagaaacctgtcatgcttttggattatataatctgccctatcctccgtggatatctcaatggcttgcagttcttgcctgcaggggtttgttttttctatcataaatagcttaaagcataacttcttgtatatccacgcttttggtgtggcattgttttgctatttcttcctctgtttgttatcggttaacatagtctaaaaaaaactacgaccgtgttgcatatactgatgtacagtgttatggcgtatgtttgaaaatttacatttggcaaggcaagtgcaacagatataggtcgaaaccgatgttctgttttcgtcaaatactaattgtcacattatgtgctctgcagtgccatttctcgcctcggcatgacaaggcatgtattgcttcaccggtgaggaacattggggcagcttaccatggtcctgctcgtactacatacagatcatgactggtggtgttctctcgccggcaaatgcagcaaaccaaccatgtctttcctgtgtggtgtggctgctgcatatgtgacaggaaaagaagcacggcggtgaaggtttcaactgtgcaatgcgtgatgctccgataccatgaactcctcaccgggcgcataaccatgctaagatttatcagggttatgataaatttgtgatggctgattgctgccaaaggaggtggctgttctcatctcactactctatatcccacgagtgaaagcaattgtaaaaagttctagagccactctatatcccacgaacgaaagcaactgtaaaaagttctagagctggtaggataagtcctgaatactgttattgataataatacatttaatactgtatttgccaaa

SEQ ID NO: 99966 - DNA, 423 bp, Zea Mays
cccgaagaggattcaacggcctccgaaggccacaacgaacatcggttgagtcgacaggaaataagagtgattcggcaccgcggcgactacctcctgcacccggaaatcgccagtggcggcgaggcgcggcggtgcagggagaagggcgacgaggcgcggcggcgaaggaggaagggcggcgacgacgacagccacgggggcgccgagccgtggcgccgcagcagtggcgccggcgtcacctgcgccgccaccatcgaccgtgcggaccgcctcaggttgtacccggctcctctcctccccgcagcgccgccggcggacaaggacaagcagaaaccgaggggcgccgttttctcgcggagcaggcgcgagcacggtcgcgcgggtgtgcaggtgcaggggacgctcgtccgcggcgcggcctag

SEQ ID NO: 99967 - DNA, 2970 bp, Zea Mays
ccccgcacttttagcgttctctcgcgcatttcgtttcttggtggggtgggtgggagtgggactggaagaggaagagcgcgtgcagcttctggttcctgtttcccgtttccgttccctcccgcttaaaatcttcaaaactgccgagattgaaggtttcctctttgtccccaagaagcgagaggggaaaggcgtttcatttgggggaaggacgaaggagggcggccgccggccagcgccaggccccaaccatggggaagcccccgggggccaggaatccggcggaggcggaggccgatggcgacgacgcggtgttcctcgagctgtcgcgggagctcaaggaggagggcacgcggctgttcaacaggcgggacttcgagggcgcggcgttcaagtacgacaaggcggtccagctgctccccgccgggcggcgcgtcgaggcggcgcacctccgggccagcatcgcgcactgctacatgcgcatgagccccgcggagttccaccacgccatccacgagtgcaacctcgcgctggaggcggtgcccaggtacagcagggcgttgctccgccgggccgcctgcttcgaggcgctgggcaggcccgacctggcgtggggggacatccggacggtgctgcgttgggagcccggcaaccgcgccgcgcgccagatctcggacagggtgcgtacggcattggaggataagggtatctcggttgccttggatgtgctgccagaggatgagaatgagattgctagcgccaaaggagaggagaggaagaaatctcgtaataagcgttttgattcggttgcgggggggcgggagggtgaaaatggtattgcgctactagaatctgcttccacggagaagcaggctggcccgagacaaacaaatggaacagggaatcatcaggatcatactgaagatagtgaatccaatggtctcgagaagctagaacaaagtactgagacgggagagaaggacatgggcaaaaagcgaggtgcacacgctgctggaaagaaaccgaggtgtggtgagagcaagcagcaaaagcattctgcagtgaatcattgtcaggacaacattggtgccaaggaggaagtcatgaaggatgtgaagctggtctttggagaggacatcaggtgtgctcagatgccagctaactgctctctgccacaattgagagaaatagttcagaacaaattcccgtcactgaaagcgtttctgatcaagtataaagacaaagaagaagacttggtgacgataaccttgtctgaggagctaagctgggcaagcaatctggcagtttcgcaagtgccaatccgattctatgttgtagaggttaatcatgttcaagagcttggtgtggatggggtcaggagacgtccttcctttgccacgttagagagaaatcgtgatatcatgttggataatgggaccattgggcatgatgttgagcataagcattacgctgatgactggatggtacagtttgcacagatatttaagaatcatgttggttttagttctgatgcatatctggatctccatgaccttggcctgagactgcactatgaggctatggaagacacaatacaaagagaagaggcacaggaaatatttgaggttgcagagtccaaatttaaggagatggcagcactggcattgtttaactgcggcaatgtccacatgtctcgtgcaagaagaaggccatgcttggctgaagatcctttacaggaatttatacttgagaaagtcaatgtttcatatgattgggcatgcacagaatatgccaaagctggtgcaatgtttgaagaagctgtcaaaactaaatctgacttttttgaaggacttattgctcttggccaacagaaattcgagcaggccaaactctcttggtattacgctcttgcatgcaagataaatatggaaactgaagttttggagttgttcaaccacgcagaggataatatggagaagggaatggatatgtgggaaagaatggagacattgcgcttgaagggactgtctaaaccaagtaaagagaaggttgtacttgagaagatggtcttagaaggttttgtgaaggatatatcagcagatgaagcatttgaacaggcttcaagcatacgatcacatataaatatcttgtggggaaccatcctctatgaacgttcagtagttgaattcaatctgggacttcccagctgggaggagtcactgactgttgccatggaaaaatttaagatcggaggtgcctctcaagctgacatcaatgtgattgtaaagaaccattgtgctaatgaaaccacccaagaaggactcagtttcaaggttgaggagatagttcaggcatggagtgaaatgcatgatgctaaaaattggagaagtggacccctgtatttccggcttcaaccagtattccgacgtagagctccaaagttgcatcatatactagagcatatgcactatgcataactcctaactactattgtatcagatttgttcatcttagaagctttgttgcacttactcatggaaaaaaggaataaacggaaaagaaaagcgataatctatgcattatcaagttatagatttgctcaatctaagaagaaaaaaaaaagattcgctgactcttgtggttggctgaccatgtagattgcattttgctgtaaagtttactgggttcctaatcatctatgtagtaggtggcgttatatatcctctctcaagggatattttgcatagtgctacacttccttctgttttacttgtggaagtgctaaaatagggtttgtactcttaggtcgctataggaatggtaggctcatgtattttacttggagggtttattagtaggtctcatctaaagtatgttacactttagcgacacgtggatacttgatgtgttcaaaacagttgttgtaacttgtagcacagatgctagagcatagtgctttttaaaattgttctt

SEQ ID NO: 99968 - DNA, 1026 bp, Zea Mays
atggagccggaggagccgccgcgctgcagtggcgggaccaggagcgtgagcttgccggaggaccaacgcttcgtcacctcctggttgtcccaggtgatcgacccggccagtgccgtcgccgcccagccgcccttggtcggcgacagcgagttcgtcttccgccacgattccgcgtcgtccactgtccgcttgtacggctactaccttgactcggcgaatccagaagacgagggagagcccgacgaggaggacgacgacatctacgcggaagaagtgctcccggaggaggagaggcagcggttcgccactgtcaataacaccgcaggcttcatgcggatcgccgccggtaccgggagccaacaaggaggaggcagtgacaaggagatcctcgtgctgtaccgctacacccggttctcgaggacgtggagcgggcggcgcggcgtggaggcgtgccggaggacgaagctgcactggctccggttcgccgtcccacccgccgggaacatgcggggcgctctggcgtgggccggctcgtctctttgcccactcatctaccccggcctcttccgccaggagctcggggacctgtggtcgatcctggcggcgctagtgatcaacgccatcccgccgcaagctacgcgccttcaggtggtcgtcgacgcgggcatcctccggcgagaggactacacgatggagcgcatggagcacgtgcgcggcgcgctggaggccaccgcgggcgaggcgtggcccgagtactaccacgtcggcatggagctgcagcttccggagacggtgcggcgcgaggagggcggagacgcggacgaggacgacggcgtgcggacggcgaagcggaggatggtcgtcgccgagggggattgctccctgtgcttggatccgctggagagcggactggcggcgtggccggggtgtgggcacgttttccacggccactgcgtggagcagacgctggctggcagggcgacgtgcccgcagtgcaggcacggtctgtgcaggcatgcggcataa

SEQ ID NO: 99969 - DNA, 459 bp, Zea Mays
atgtggaaggcagccattgactccatcgccttcgttgggttcagcttcgctttatccaatggcgtggcgaaggcagcctctagcggcagccgcgaggtgaacaaccgcgctgatttggaagagccgcgtgaggggaagccaaagggtcctgggcttaagatgtaccaggtcaagagatggcgcctgtggagcccttccggaggctccaacgacgacaggcccatcgtgtgccccatgtcagacttttgccctgtcacaatcgatggggtgctgaaggagtcgttcctagagacactacaaaagaagcgaagatggagtggcttgcgagatgcaattataagtgagaatgatgatgcattgctccagcagatgaatgggatggttggctatgcttctatgagattcttgctaatcatttcgttagagtgcctgaaagtggcaggcgtatacttgagttga

SEQ ID NO: 99970 - DNA, 1667 bp, Zea Mays
caatcagtcatcaccgccgcccgacggactgtgtccccactccccagtgagccgccgtgacctcccagccgccccatgctcaccctccccggtaccctccgccgcgcgcgcgctcctcctggcctccctccccgccgccacctctcccgcctcctggaccgttacggcttcgtggccccggactccctcaccccggccccgcgagaacctcacagcgacaccgccgactccgccgccgctgcgaagaagcgccgcgcgaagaagccgccctaccgccctccgtcctcgctggaccgtggcggtcgcccgcccgcgcactccgacctccccttcgacttccgcttcagctacaccgagagcaccccggcctccaagcccatcgggctgcgcgagcccaggtactccccgttcgggcccgggcggctcgaccggccctggacggggctctgcgcgcccgccgtcgacgctaccctgcgggacgtcgaggcagaggacccccttcccgacgccgagagggggcttgaggaggcgcgccggcgagagcgggagcgggtactgggagagcctctcacccccgcggagcgtgcgttcttggtcgacaggtgccagaagaaccgcaccaagcgtcagatcaaccttgggagagatgggtttactcacaacatgctaagcgacgttcacaacaactggaagacctgcgaggccgtcaggataaaatgcctcggcgtgccaacggtcgatatgcaaaacgtgtgccatcagcttgaggataaaactggtggcctgatcatccaccggcatggtagcctgttgatactgtacaggggtaggcactataatccaaagaaaagacctgttgttccgttgatgctgtggaagcctgctgaacctgtttacccgaggctaatcaaaacgacaatagaagggctcacagttgaggagacaaagcaaatgaggaagaagggcctacatgttcctgttttgacaaaacttgccaagaatggatattatgctagtctcgtgccaatggtccgggatgcctttttgacggatgagctggttcgaatagactgcaaaggattgccaaaaagtgactataagaagattggagttaagctcagggaccttgttccttgcattcttgtctcatttgacaaggagcaaatcattgtttggaggggaaatgaagatgggagcctacaagatcgaacacagaagtcattcctttcatttatcgactcagatgttgcatcagtgaaggatgagactggtgatcaggaacaaataccaagtgatttgtcatatgatgggtgttctgagatgaagtgccaaattacaaaagtaatttaggacctagactcttttaggttgatctgacatatccagaatacacagttcacatagttgcaagctctacacatcaacaatggaattgacaagtcctcaatgtaaaagtttgtgtattctctaaccatgatagttgcattgtatcacatgtaagccatggtaatttctagagaaaattccactgcaattttgtccaagaccttacttgccatgccattgtaaatgttctaattccttatattaccactcggatgcaatttcttaccttttcatgccattgctagtggcatagaagggtaaaaaagctgcatgttctaatc

SEQ ID NO: 99971 - DNA, 2611 bp, Zea Mays
gcagagtgggtgaaaggtggggggacgattcggagagatcgagaaagaggagagagagagggacgggggcggggccggcggaagcggagcctgcgcccgccggaccgaatcctcgccggatcgcccggcctgccggggcggcgctgcggactgcctgatccggctggaatggcggcgggccgacgagggatctagcggaggtgggtgtcgcgcggcaatggctgcggcggaggcgcggcgccggtcagcggtctgggccctgctgccgctgctgctgcggctgctccacccggccgcgctcgtgctggccaacaccgaaggtgatgccttgcatagcttgaggactaacttaaatgatcctaataatgttctacaaagttgggatcccactctggtcaacccctgcacttggtttcatgttacctgcaataatgacaacagtgttatcagagttgatcttggaaatgctgcactatcaggaactttggttccgcaacttggccagctcaaaaacttgcagtacctggagctctacagtaataatatcagtggcactatacctagtgaacttgggaatcttacaaacttggtcagtttggatttgtacttgaacaacttcactggtcccataccagattcattggggaagctattgaagctgcggttcttgcgtcttaacaacaacagcctttctggttcaattccaaaatcgttaactgctatcactgcactccaagtcctggatctgtcaaataacaatttgtctggagaagttccatcaactggttccttttcgttattcacccctatcagttttgggaacaaccctaatttatgtggtcctggcaccacaaaaccttgtcctggtgctcctcccttttctccacctcctccatacaaccctacaacccctgtgcaatcaccaggaagtagctcttccagtactggagcaattgctggtggagtggctgctggtgcagccttgctatttgctattcctgcaattagttttgcctattggcggcgcaggaaaccacaagaacatttctttgatgtacctgccgaggaagatccagaggtgcatcttggccagcttaaaagattttcactacgagaattacaagttgcaacagatggcttcagcaataagaacattcttggaagaggtggatttggcaaagtctacaaaggacggctggcagatggatctttagttgctgttaagagactaaaggaggagcgcacgcctggtggagaattacagtttcaaacagaagttgagatgattagtatggctgtacacagaaatctattgcgtcttcgtggattctgtatgacaccaacagaaaggttgcttgtgtatccatacatggctaatggaagtgttgcgtcacgtttaagagaccgaccaccagctgaacctccgctagattggcaaacaagacaaaggattgcattgggttctgctaggggcctgtcttatttacatgatcattgtgatccaaagattattcatcgtgatgtcaaagctgcaaatattttgttagatgaagacttcgaagctgtggtgggggatttcggtttggccaaactaatggattacaaggatacccatgtaactactgctgttcgaggaacaattgggcacattgcacctgaatacctttcaacaggaaaatcctctgagaaaactgatgtatttggctatggaattactcttttagagcttattacaggacaacgtgccttcgatctagctcgtcttgctaatgatgatgatgtcatgcttcttgactgggtcaaggggttgctcaaggagaagaaactggagagtctggtcgacgaagatctagaccacaactacatcgatgtcgaggtggaatctctgatccaggtggcgctcctctgcactcagagcaaccccatggaacgtcctaagatgtcggaggttgtgaggatgcttgaaggcgatggtctcgccgagaggtgggaggagtggcagaaggtagaagtggtacggcaagaggttgagctaggccctcatcgaacctcggaatggattctcgactccaccgacaacctccacgctgaacagctgtcagggccgaggtgaaggcaagcttgagatcagactcccactaattctggtacggaggagtattttgcaagggcacaatagagatgtgtatcaatcatcctagtaaaaaaaaaatccaccaatttgttaatataccagtcagtgggtgaagcgaagattggcagccatggctttggatgtatattgcttgatgtggtcagccatgccttttgagttcttctatgccagggcagcagagctggaggagcttatgtcatgtgcagttgccgcatgcgccaatgctcctgtgtttgtaaaggtcggagctgaggtgctgcggctatcatctgggtccgcgataagttaattgtactgatagttgatatctaactactattttgtgtatcaaatgaaaatgttggaactaaaggatcggatagtataggtgtcttatgaacctgttctggctggcaaaattaaccagaaatatggatttgccacttcaactatgtcagcagatttgcgcatttgcca

SEQ ID NO: 99972 - DNA, 2959 bp, Zea Mays
gcagagtgggtgaaaggtggggggacgattcggagagatcgagaaagaggagagagagagggacgggggcggggccggcggaagcggagcctgcgcccgccggaccgaatcctcgccggatcgcccggcctgccggggcggcgctgcggactgcctgatccggctggaatggcggcgggccgacgagggatctagcggaggtgggtgtcgcgcggcaatggctgcggcggaggcgcggcgccggtcagcggtctgggccctgctgccgctgctgctgcggctgctccacccggccgcgctcgtgctggccaacaccgaaggtgatgccttgcatagcttgaggactaacttaaatgatcctaataatgttctacaaagttgggatcccactctggtcaacccctgcacttggtttcatgttacctgcaataatgacaacagtgttatcagagttgatcttggaaatgctgcactatcaggaactttggttccgcaacttggccagctcaaaaacttgcagtacctggagctctacagtaataatatcagtggcactatacctagtgaacttgggaatcttacaaacttggtcagtttggatttgtacttgaacaacttcactggtcccataccagattcattggggaagctattgaagctgcggttcttgcgtcttaacaacaacagcctttctggttcaattccaaaatcgttaactgctatcactgcactccaagtcctggatctgtcaaataacaatttgtctggagaagttccatcaactggttccttttcgttattcacccctatcagttttgggaacaaccctaatttatgtggtcctggcaccacaaaaccttgtcctggtgctcctcccttttctccacctcctccatacaaccctacaacccctgtgcaatcaccaggaagtagctcttccagtactggagcaattgctggtggagtggctgctggtgcagccttgctatttgctattcctgcaattagttttgcctattggcggcgcaggaaaccacaagaacatttctttgatgtacctgccgaggaagatccagaggtgcatcttggccagcttaaaagattttcactacgagaattacaagttgcaacagatggcttcagcaataagaacattcttggaagaggtggatttggcaaagtctacaaaggacggctggcagatggatctttagttgctgttaagagactaaaggaggagcgcacgcctggtggagaattacagtttcaaacagaagttgagatgattagtatggctgtacacagaaatctattgcgtcttcgtggattctgtatgacaccaacagaaaggttgcttgtgtatccatacatggctaatggaagtgttgcgtcacgtttaagagaccgaccaccagctgaacctccgctagattggcaaacaagacaaaggattgcattgggttctgctaggggcctgtcttatttacatgatcattgtgatccaaagattattcatcgtgatgtcaaagctgcaaatattttgttagatgaagacttcgaagctgtggtgggggatttcggtttggccaaactaatggattacaaggatacccatgtaactactgctgttcgaggaacaattgggcacattgcacctgaatacctttcaacaggaaaatcctctgagaaaactgatgtatttggctatggaattactcttttagagcttattacaggacaacgtgccttcgatctagctcgtcttgctaatgatgatgatgtcatgcttcttgactgggtagttaactgtgccatttcctctgttcaaattgtaccccaagtgttcatgccttttttgtggcttccgtactgtgcaggggctggtgctcaccttttcctatgcaattgttagaaatttgctgatcatttcatccaatgacaaatagagctttgatattaatgtctaaaagataaatattttaactgaattgatattgtgacaggctgataactaaacaagtagagtgacatgctcgtgtctctgaaagtcctcatatatttgttagaatattgctttagcctgttaggatttatttcattgcattcttttgatatgacatgatttggctagcaaattaataccatgttcaattgctttacttaggtcaaggggttgctcaaggagaagaaactggagagtctggtcgacgaagatctagaccacaactacatcgatgtcgaggtggaatctctgatccaggtggcgctcctctgcactcagagcaaccccatggaacgtcctaagatgtcggaggttgtgaggatgcttgaaggcgatggtctcgccgagaggtgggaggagtggcagaaggtagaagtggtacggcaagaggttgagctaggccctcatcgaacctcggaatggattctcgactccaccgacaacctccacgctgaacagctgtcagggccgaggtgaaggcaagcttgagatcagactcccactaattctggtacggaggagtattttgcaagggcacaatagagatgtgtatcaatcatcctagtaaaaaaaaaatccaccaatttgttaatataccagtcagtgggtgaagcgaagattggcagccatggctttggatgtatattgcttgatgtggtcagccatgccttttgagttcttctatgccagggcagcagagctggaggagcttatgtcatgtgcagttgccgcatgcgccaatgctcctgtgtttgtaaaggtcggagctgaggtgctgcggctatcatctgggtccgcgataagttaattgtactgatagttgatatctaactactattttgtgtatcaaatgaaaatgttggaactaaaggatcggatagtataggtgtcttatgaacctgttctggctggcaaaattaaccagaaatatggatttgccacttcaactatgtcagc

SEQ ID NO: 99973 - DNA, 144 bp, Zea Mays
cagatttgcttgctttgcagggagcggggtcatagtctgaagaactgtcctgacaaaagcgagagaaatttgaagaaattttgctataattgtggtgaatctggacactatctttccaagtgccccaagcccattgagaatggt

SEQ ID NO: 99974 - DNA, 857 bp, Zea Mays
ctgccatgcctcgtcactacaagagccgacctcatagagagtgaccaagacctcgagcgaaattctctgagcgagagcacgagcgatggagagcaaggtagaagcagaagcagtgcagctggcggggaagaagaagagcaccttcccgtcgtcggccgccgacgacgggagagtggaagccgccagcatgggcatcatggcgtcgtcgccttctgccgcctctccagcagccatcgtctccgccttccttgcgcccccgctgtcgctgctgcgtcacgtcgcttctctctgcgccggctacctgggcctcgacggcggcctgaaacctcctgctgctgctgctcctcctgcgtcgtcgtcgtcttcagcagctgccgccgccacttctcagcgaggcgaggtcgttgacgttgaggctgctgcatccgtcgaagattactgcgcggcggaggtggtgcttgcaattgaggtgcggtcgcgagggttcacgccaccacagcgtcgcagcgcaccccgggaatccaaaatagccgccgttgggggagtgattcattagcagcttcggctgcagaaacgggagaagaagccttatctggttgcgcagtaattaatagagtattgaacatgcatgcgcgcgcttaattattagttcagttcaagaacagtcttcttgtggttcggttcggaataaaaaaaaacagaaaaaaatgtatagctattcctcccctctgatcagtatcaaaaagagtgtcgatcattatgggtttcatgaatattgtatagtattttcattatagtcattacatgtatttctgtaatatatatatatatatatatatatatataaacttggttaa

SEQ ID NO: 99975 - DNA, 642 bp, Zea Mays
atgaccgcctccgcccgcatcctcctcctgctgccacgccagcttaccacgcctcttcgtctggcacacgcgctcgcgccccagtcccgggcggcggtgcgcggctacttctcgccggtcgtcctgcagcaggcaacccaccgctgttggtccaccagcagctccagctgcgagcagtatccgcaggcacccatcaccgccgccgcacccggtgctccttgtccccgcgacggaaagggagagggatacggggaggcggcgacggcgacggcgtgcggcggcgagaaggccgtctcaggcgcacatcaagacggcagcgacggcgccggcgcgcctgccccgccggctcatccccaggataaggaggcggcggtaccgctacgggcggctccggcgggaaggaaaggccgctccggcgtccagacgccgaggcagcgcggccgcccggcgaagccacaggggaataagaataagaagcctgcgcggccgggagctccgaaacaagggcgcggcggcggcggaggcatcatccacgtcgttgctcctcgtcgttcctcctcctcttcgccggcggcgtcctcgacgccgccgtctactactcgtcttagggcggcgaccaagaaacgagagagcgaggattga

SEQ ID NO: 99976 - DNA, 112 bp, Zea Mays
caaaatgtactcaacaagtcgagtactatttcctggaagggagggttttggatacagcagctaattgagtcacaaaataatacctcgtatatttatttaaatgggttgaatc

SEQ ID NO: 99977 - DNA, 905 bp, Zea Mays
atgagcgatgtcatcatccaagaagaagcgctgctcagccttgatcctgtcgcagctgcctactcaatgatgaatcaaactattaaggatgcaggtatccagaacgacgctctcctgagtgaagtgttgtacgagtgcgagaaggaactcatggaaaagtctgcaatcgaagagacaatttctgaacttatggatgttaagatccctatgctgcaagctgaacaactcccggccatggagaatgagaagcgttccattcctgaatgctcgctccagaaaagtgttagttctggatgcctcaactcggcagattggatgaatggagctgttaggccaaactttctagacttccaagggttggactttgaggcagcgtttgggctgaggagagcttacagtgaaggagacattcagaaccttggagccaacacgcctcgaccagcagcaaatgtttgtgtgaccatcagtgacctcaagaccgaagaaaggaagcaaaagctttccaggtatagaaaaaagatcaagcggaactttggcaagaagattaagtatgcttgtaggaaggctctggcagacagccagccaagggtgagagggagatttgccaagatcaaagaatgcgacctgctgctgctgaattcaagcacttatatggaggttcaatcgatcattcagctgttcaaaatccacctcctctacccagtcgttttggtgcgagccgagggagtgaagagttgaaagtggtggtagtctagttggttagctagcccctgtacaaaggcttgaatgaatatggcaataaaactcagctctcccctctgcttgcttggcactacactccttgttccttactgaaaacaagagcaaaaacagactcatgaagattaacaaatttcactgtgtat

SEQ ID NO: 99978 - DNA, 706 bp, Zea Mays
caagggagcaatcacatcgatcgtcaccgagacagaccctattcttcggacgcatatcaccaacaactctccaagccagcccggccatggcgttgtcgccgtctgcgcaagcgacaagcccgctcgcgcgccagctgctgcgccacgtgtcgtccggcctggtcgccgccgccttccaccgcccagctccagccatcagtctaccaagcgcgccgcggggagcggacgacgtggccctagcggcgtctcaccaccaacggctctggcccactccgtcaccgaaagggcgccccggcgccccgaggtaggggagcggcgggcaagtccaccacgctgctccggcgatggcgacgatagcaagcgtggttatgccgcccacgaacgccctgacggcggcggcggcgaccacgcacgtggtgacgtgaggacccgcccggcctggtctcccggcacaaggcggcggcggcagcggcaaaacgcatggcgcaccggcggcggcgaaagcgcgcgcggctatgcgaggacctgctccgccggcccgccctaaggaaggcagcggcggaaaggtccatgtcgtgtccccggcggtgatgtcgagcgcaagtgtgcttatgcgagggcccgcgtcgcctggtcatccggtagaaggcgctggcggccgtggtggaagcatccacgctatctcttcttgattcttcagattgag

SEQ ID NO: 99979 - DNA, 554 bp, Zea Mays
cacggccatggcgttgtctccgtctgcgcaagcgacaagcccgcttgcgcgccagctgctgcgccacgtgtcgttcggcctagtcgccgccgccttccaccgctcagctccaaccatcagccggccaagcgtgccgcggggagcggacgacgtggccctggcggcgtctcaccaccaggcccgctccgtcaccgaaagggtgccccggcgccccgaggcaggggagcggcgggcaagtccacgaagctccggcgatggcgacgatagcaagcgcggttatgccgcccacgaacaccgtgatggcggcggcggcgaccacgcacgtggtgacgcaaggacccgcccggcctggtctcccggcacaaggcggcggcggcaaaacgcatggcgcaccggcggcggcgaaagcgcgcgcggccatgcgaggacctgctccgccgggccgccctaagaaaggcagcggcagaaaggttcatgtcgtgtccccggcggcgatgtcgagcgcaagtgtgcttatgcgagggcccgcgccgcctagtcacccggcagaaggt

SEQ ID NO: 99980 - DNA, 309 bp, Zea Mays
caaagaattcgactggcgagcagagaggctgggcaactccatgggcgagcagagcgagcagggcgagcagcaacgcgacgacgcggcaagctgagggagcgacgcggcttgtctaaatccgagcagagagacacgcgcaggagctgggagccgagcgcgacgctgggcgggagaacgcggtcgagcagggaaggcgcggctggggagggctcggcgcagtggagcacggaggaaggagaggggtgcgcgccatggatgcgcaggagcgagctctggcagcgcgcgtgggatttttgtgctcagagttga

SEQ ID NO: 99981 - DNA, 601 bp, Zea Mays
cccggccatggcgttgtcgccgtctgcgcaagcgacaagcccgctcgcgcgccagctgctgcgccacgtgtcgtccggcctggtcgccgccgccttccaccgcccagctccagccatcagtctgccaagcgcgccgcggggagcggacgacgtggccctggcggcgtctcaccaccagcggctctggcccgctccgtcaccgaaagggcgccccggagccccgaggcaggggagcggcgggcaagtccaccacgcagctccggcgatggcgacgatagcaagcgtagttacgccgcccacgaacgccctgacggcggcgaccacgcacgtggtgacgcgaggacccgcccggcctggtctcccggcacaaggcggcggtggcaaaacgcatggcgcaccggcggcggcgaaagcgcgcgcggttatgcgaggacctgctccgccggcccgccctaaggaaggcagcggcggaaaggttcatgtcgtgtccccggcggcgatgtcgagcgcaagcgtgcttatgcgagggcccgcaccgcctggtcacccggcagaaggcgccggcggccgtggtggaagcatccacgctatcgcttcttga

SEQ ID NO: 99982 - DNA, 291 bp, Zea Mays
atggtggtggcagctccccgatccggacacacggtggaggcggttcttcgatccggcgaagcggcgacggttcccagatcgatagcgcgatggcggcggctcctctatccaaagggcgagcgacggcgaggccatagtgcgggcaagcggtggcgacccggggctccgaggcgggtgagaagcagcgacactcccaaggagagcgggcaagcggcgacacacccccagacccgagcgacggcggcacaccctaacccacgaacgatggtggcacccccgacgtgcgagtag

SEQ ID NO: 99983 - DNA, 642 bp, Zea Mays
gtactgatatgtgtgatctctaacattggccggatgttacaaatttgcagcagcaccggtgatgaagcgtagaacgagaagccaaacaacacgaagcagggcatggggacacaaagggcggaagaacccagggatgaaaaaacaattccccgtgcgatctcccacccagcacacaaaaccaacatctttattatgatgcctgccatgcgagcgcacccaacatggcaaaggccttcaagatgtcacatctcacaattgttcaaccatgctttagaagcccgtcgacgcctcccatttgtccagtccgtcaagatccagattcccccggaacgtcatagctctgaaggtcggcagatatcaattcgacggatcagaaacctccaggcacaaaaacaaggcagccttgtctcgcttcgagctgatgcgtcaactcatcaatcaaactaaacagatcggaacctgcacatcatcacaaaacaaaaccatgcgtttcgaaaaatcaagtaacagagcaagactcaccgttgttcgatcggaccaagcatctgatcctgaagccacgcggaggctcagatctagacgagaagaggatttcatcaggcaagaggaacgcggcgacttttcttcaccaaggtccaaggc

SEQ ID NO: 99984 - DNA, 492 bp, Zea Mays
atggcgggatggcgtctgcgggcactcggggacggggctgcttcggcgcttggggacggggatggcagctgcggggtcggcggggatcgccggatgctgcgggatcggcggatgttgcggggctgcgggcggatgcgggaatctgcggggtctgcggctgtgggcgctcggggacggggatggcggctgcggggtcggcggggatcagcggattcagcggatgttacagggtcgacggctgttgcggggtcggcagctgcgggaatggcgcgtgggtctgcggggatggagaactttgtggacacaggcatgaggcctcaaaattttattagagaactcgatcttacaagtttagcagaagactatctgaaattgagagaactcatacaaaggaaggatgaagttgttgctaagtcagcttcgcggccaatggattacaagtgtgacctacgaatacatgtttagaattgtatttttgaatcaacatgatat

SEQ ID NO: 99985 - DNA, 471 bp, Zea Mays
gtgcgatctcccacccagcacacaaaaccaacatctttattatgatgcctgccatgcgagcgcacccaacatggcaaaggccttcaagatgtcacatctcacaattgtccagccacgctttagaagcccgtcgacgcctcccaatttgtccagtccgccaagatccagatcccccggaacgtcccaactctgaaggtcggcagatatcaattcgaaggatcgggcacttgtagcaacaaattgtagcacccagtttccttaaccacgcggatcagaaacctccaggcacaaaaaccatgcagcctcgtctcgcttcgagccgatgcgtcgtcaactcatcaatcaaacgaaacagatcggaacctgcacatcatcacaaaacaaaaccatgcgtttcgaacaatcaagtaacagagcaagactcaccatctagacgggaagaggatttcatcaggcaagaggaacgcagcg

SEQ ID NO: 99986 - DNA, 612 bp, Zea Mays
cacggccatggcgttgtcgccgtctgcgcaagcgacaagcccgctcgcgcgccagctgctgcgccacgtgtcgtccggcctggtcgccgccgccttccaccgcccagctccagccatcagtctgccaagcgcgccgcggggagcagacgacgtggccctggcggcgtctcaccaccagcggctccggcccgctccgtcaccgaaagggcgccccggcgccccgaagcaggggagcggcgggcaagtccacgcagctccggcgatggcgacgatagcaagcgccgttatgccgcccacgaacgccgtgacggcggcggcggcgaccacgcacgtggtgacgcgaggacccgcccggcctggtctcccggcacaaggcggcggcggcggcaaaacgcatggcgcaccggcggcggcgaaagcgcgcgcggctatgccaggacctgctccgccggcccgccctaaggaaggcagcggcggaaaggttcatgtcgcgtccccggcggcgatgtcgagcgcaagtgtgcttatgcgagggcccgcgccgcctggtcacccggcagaaggcgccggcggccgtggtggaagcatccactctatctcttcttgattctt

SEQ ID NO: 99987 - DNA, 810 bp, Zea Mays
atatatatgcaaccgttcgtcgacgaacaagaagggcgcaccccgaccaccgaaaggcccggctgtcaaggccatgacgacgtcctcgtcttggctctcccttcctattcagctcctgcgctacgcgccgtcgtcatcgtcgtccaaccgcctcgggctgggctcggtgcaccgaccttcgcctcactgcgcccgcatgcacatgcagccggcgaaaggcctgaaacccgtcacggccacagggcgcggcgacggcggcggcgtcgacgcggcgagtcctttgcgtcttctggcagacgaggttgcgcccgagctgcacgcagcggcgaagcggatggtaggcggcggtgctcttcactcacccaagggacgccccggctcgccaacggaaggcagcggcggtggtaagatccgcactacgcatgctgccgcaccgacgaccacgtttgccagagcgcgaggcccgacaccgcctggtctgcccgcggaaggatccggcggcaatggcgggaccaaacattaggatcgacattaagccaaggaattggttgagtggagattgtcggactacgctattaccggctgcacaactagtttatttctcttacctatctatataggaacagctcagactcaagtcgaatctgaaggcccttttgggaacgcaacattttcttagtctcgaggtataatgttgtggtatttaaacaaactactagtataatgcacgtagttgcgacggcacataaccatatgaatatatgactgatattaacttacattttagtcaaaaaggccaaaaaagtatag

SEQ ID NO: 99988 - DNA, 139 bp, Zea Mays
gatcttgaagagctaatggaaaacatgtatcttgatgcacaagaaggatcgacttgtgttggtggtggagatggacatgatcactaaaagagctaggttgtactcttttttcctttagggttttgtccccatgtagtta

SEQ ID NO: 99989 - DNA, 6810 bp, Zea Mays
atgtcttcaaagtggcggtcactgcagcatcggcaccggtacacctacacctccattgtgttcccgaagcattaccttgaggccctaactctcgtgccagctgagatctcctcatccaatttctttgtccgattgagcaacttgatttccctgacctccacttactcccaagttgttgtggtcaaggatcttgcctcggcatatgtgcagtttctgtccactacagggactcctgatgaagcagtgctcgctgccacaaagctttatttggagatcctctttcttgagaattccctccctctccaccggacactcatatcagtgcttgccaagtgcaagaaattctccacagtgatcagtgggtgttttgccttgctctgtgaggagtatggtggctctggtagtaaggcaaagaagagatttatggtatctcgagcagccttgtcgcttattgggtacccaaagttgggatttttggatgaggcagtagagaggtgtgcagagatcatggcactggatgttgttgatgggcttgatggagtgacaaaagacattggtgaagggtcacggccatctccagtcgtgatggagcagtgccaggaggccatgtcttgcatgtactacttgctgcagaggtacccgtataagtttattggccttgacaaggcgtcaagtgtcttcaagagtgctgtcaggacaatactatctgttcttaagtcatctgccttttcaagggattgcctggtggcctctggagtaagcttctgtgcggcaattcaggttttcatgagcacagaggagatttcctggttcatttctcaaggtctatttggcatctatgcaaatcatgaagatagaaaaaatcagtctgtgcacaatgtattttcggactttgatctgtgtgaacaaatcagagacctttcagtgttgagtagactttgtctactaagagggattttgacatctattccaaggacagtactcaacatgcaccaacttcattccagtggacctttatggactgttttatatgatggaattttacctgagctttgcaagcattgtgagaacccagttgatagccacttcaatttccatgctcttacagtgacacaaatatgtttgcagcagataaagacatcggtttcatctgatatcaccgacttctctggggactataagcctttttcaagagatgttgtcaaccgtatattgggaatcatatggcgcaacctggaagatcctttgagtcagacagtaaaacaggtgcatttgatctttgatctcctattagatattgaactatgtattgcatcagaagaccgtgaacataacaacaacttgttcctttgcaatgttgcaaatgatttacttcgcttaggtccacgatgcaaagggagatatgtccctttagcttctttgacaaagcgattgggtgccaaatctcttctaacattgaaatcaaatctgctttcagaaacagcttatgcgtacatagatgatgatgtttgttgtgctgtcaccacatttttaaaatccttcctggagactttaagaggtgaatgttggaatgacgatggtgttgagctaggatatgatgccttcagagctttgtgcttgcctcctttcatgcggggacttgtatctggaaattcaaaactacgttctaacttaaatacttatgctttacctgctctaattgaagttgatgcagagagcatattcacaatgcttggattcatctccattggccctagcacaaatgaaactaaactagatgttgttttgaaaaatgaccagtgtatagctgcactggtttctctgcttaaggtctcacggaatctggctcttgttgaaggggacattgatttagatcctgatgaattgtcacagattcagcagatggatagtaagggtgctgcagttatatctgttaaagggattaaagttacagttccttttaattggtttgctttggcactgacacacagtgatgaaagtctccgtatagatgcagctgaatccctctttctaaatccaaagacatcaagtcttccatcctccttggaactgagcttgctcaaagaagctgttccgttgaatatgcgttgtagctcaacggcatttcaaatgaaatggacaagtttatttcggaagttttttgctagggtgcgaactgcacttgacagacaggtaaaacaggggtcttggattccatcattaacgtctagtgttaaaggggctggctctattgatacttctaaggccactgttgtcaagagggctgaagatctcttccaattcatgaagtggctgagttcctttctgtttaattcttgttacccctctggcccttatgaaaggaaaacaattgcaatggagctcattcttacactactagatgtatggcctatttgccgctctgaagggaaaattgatctttatccttacaatgatagcataatattgccagactcaacaatttcatttgttgggtctataattgatagttgggacagattaagggaaaactcttttcgcattctactgcagttcccaacaccgcttcctgggatttccttgagtacatccataaatgatgttatcagatgggcaaaaaaacttgttctaagcccacgtgtccgggaaagtgatgctggtgctttaaccttccgccttatatttaggaagtatgttttgcagcttggatgtattcttgtattttctaaagaaagtgattgccttgaatgttatacacaatctatgaatggagatacagaagttactagtcaaaacccagttgcacagtatatatcttcactcattcaatggctctgtattgttgtcgaagagggtgagagggatctctctgaagcatgtaagaagagctttgttcatggagttcttcttactctgcgctacacatttgatgagatggattggaactctgaggtagtacaatcatgtatttctgaaatgaggtacctggtagaaaaactgcttcaactcataatgcgtgtaacttcggtggccctatgggtggtttcttcagacgcattgtctctgccatatgacatggatgacatgattgatgatggttccttcctctcagatatatatgatgatcaacctactaccacttcagaaagagaggagaagaatgcaaaaccagggagtaatggcaaaccagccgaacaagttgttatggttggttgctggcttgctatgaaggagtttcacgctattgtggcattgcaggtcagtttactttttggaaccatcatcaggaagataccattgcctggctgttctcattcagcttcatctcagaatggcttgcctgacagtattgaagagacaagtatatctgaagaaattcttgatgtggggcagttaaagatgatgggtgaccattttttacaggttcttcttaaaatgaagcataacggtgcaatagataaaacaagggctgggtttactgccctttgcaaccggcttctttgctcaaatgattcaaggctgtgcaaaatgacagagtcatggatggtgctactaatggataggacaattgctaaagggcaaactgtggatgatttgataaggaggagtgcaggaattcctgctgcatttatcgccctgttcctggcagagccagaaggaacaccaaagaaactacttccaagggcattagaatggctgatagagtttgctaagaactctttagctaatttccagaaagactccaaccagaggtctggagtaatgaaagagctgttggaatcacagtcagaaactacaagtgtatattctaatggtaacctatctaaaggtcgagatgagggtgttgttcccactgtgcatgtgttcaatgtgcttaaagctgctttcaatgatgcaaatctggcaaccgacacttcgggtttcagtgctgaagcaacaatagttgctatacgagcattttcatctccctactgggaagtgcgcaatgcagcttgccttgcgtatactgcactagttcgtcgcatggttgggtttctgaatgtgcagaagcgtgaatcagcacgacgatctttaactggccttgaattcttccacaggcaacaattgagtatcttttacatgatacatggacaaattgaccagaatttttttagcatcgttgctgctttgaggtatccagcccttcatcctttcctttctagtgaactgcaaaccacaactgaacaactagctgatggagtgtccagcaatttggagtcacacattacaaaagcaatacaccctagcctgtgtccgattcttattcttttatcaagacttaagccttcacctataagctgtggaactgatgattctttggacccttttttgcttttgcctttcatccaaagatgtgctacccagagtaactaccgggtccgtatccttgcatcaagggcattaacttgtttggtatctaacgagagattgcagtacgttattagtgatatactggataatttacctcgtggaagtcacaaagcaatggctcacagtgttcagcatactgatcctgccatatcagctaatatgggaaaagcaaatgtacttctgctgtctaagtcattcaattcaatacatggccttttgctgcagctggcttctcttctggataacaactttagaggtttgacagacggtagcatgaaggatcagattattggcctattactggaggttctttcaagatgctcttggcttggctgcacgaaattatgctcatgccctatcgtaattacatcttacttgcgggtattggatctcatgcttgatgttgcaaggacagggaaaagcagacatactgaagtcattcaggcattgctgctagagttaacttcccagtgcttgagcaacacagcatcaacccagtacgcattccatgatccaacccgtattgaactaaaacaacaagcaactgaatcatttttgagctgtgttggtctttctaagaaaaccgatgaaactaacgatgatgatgtgcagttgcaaatactcggtgaaccaactttagagatgcctagagtggattactcccttcatgaagtacacaaggagatcctgtcatgtctcactgatccttcatatgatgttagaattacggtgctgaagaggattctttggctcacaaaatcaatcagacatggttatgcagataacattttgcaccagtgggcaggagttaatctgcagcctgctttaatggaacggttgtttgtggaagaacaccctaagtgcctttattataatctgaagatcatcttttcatggaacatggaattcccattcaacaatggagaagattctagcacacttttgtccttgtgggataggttagttcatttaaacagcaccatgtcacatgcaaaaacgagagaaatagttctatgttgcatgggtatgtgcatgaaattgttcactaaacaatctaggggtggtatttcaatggattgtcttaagaccagtgagatctctgcatcctttgtcagaatcaatgaaggggatggattatctgatgccatgcttagattaaacttgtttgtcacacttgtcaagaaccaaagtgaaccatcagaaagcatgaatgctcgacgggctgctgctgaggcaattgttgcttctggtcttcttgaagaagcaagctacgttgcttcatctgtgtccaacatgtactctccttcagaatttgatgaagaccataccaaagagaaatgcatggaagatagcgtttttgaatttgttagtctttatacatgcaagatacttgacttgtggtttgtatgtattcagttgctggaggatgaggatgcatatctgaggcaaaaacttgcgaaggatattcagaaaataatcgctaagggttcagctaataccttctgtgatgattccacaccactacaagttgatagagtcattgaattaagcttggactatttaacttctttgtttggcctctggctgaaatacgttgaattcttgttaaggatagtcttgggcactggaaacgctctgaactcccgtggcgatttggtccgtcagatatttgataaagaaattgataaccaccatgaggagaagctattgatatgtcaaatctgctgttcaaacattcagaaacttctgaattcaaaatgccagatggaagcaggagcagagactaaactgttcctgcagaattggagggagatatttctaaagcagctcacatcgctgactggtggctatattgagaaagaggggaagaacgattggattggcggcataggtaaccacaaggacgtgttcatatcagtgtatgcagtcctactcggtttatacgcgctcacgcagtctggctctctggatcaattggaggaccactgtgcagtttatttgcaggaatttgcaaaccttgaaaggtctatcacaccattcctcaagaacccgttgatttctaatctttacgctctggtaaaattgtcacacgagaggttcatatcatcagataagcctgaggaccaagtgggtgattcaggatcaagttttgacccatattttcttatcagatgattttcgctaatgtactagtaattcttcattgttattcctccgttgtaagactcaatactaattgcttttttatacaaattaccatactatagattctttacttgatgccccttctctgtgtatcagtgcattttaagtgccttgggttttctagcactcaaaaaatgtatgacaaggttgtgactaacgtccgaacaactgataatgatataaatatttttccga

SEQ ID NO: 99990 - DNA, 801 bp, Zea Mays
atggcggggcaggggcagcgcctgaacgtggtgccgacggtgacgacgctgggcacggtgaaggcgcggctggcgggcgccgcccgcggccacgcgctgctcaagaagaagtcggacgcgctgacggtgcagttccgcgccatcctcaggcgcatcgtgtccgccaaggacgccgtgggcgacgccatgcgcaccgcctcgctctcgctcgccgaggcgctgtacgcggccggcgcgccgctccgccacgccgcgcagcagtccgtgtccggcccggccaggctccgcgtgcgcgcgcaccaggataacatcgccggcgtccgcctcccgcgcttcgagagctgcctgggcgccgccgacggaagctcgtcgcccgcgtcgctcgccgggctcgccggcggcgggcagcaggtgtcggcctgccgcgcggcgcacgcgcgcgcgctccaggtgctggtggagctggcgccgctgcagacgtcgttcctcgcgctggacgcggccatcaagaccaccaaccggcgggtcaacgcgctggagagcgtggtgaagccgcgcctggagaacaccatcgcctacatcagaggcgagctggacgagcacgagcgggaggagttcttccgcctcaagaagatccaggggtacaagcagcgcgagctcgagcgccagaaggaggccgccagccgctacgccgaggagaaggccgccggcgaggtcgcgctcaagcgcggcgtttccgtcgccactgcggagagcatgctggagaacggcgacagggacgaggaggatatcatcttttga

SEQ ID NO: 99991 - DNA, 2913 bp, Zea Mays
actcatcaggcatgggacccgagccctgtgccagatcgcggaccgtccgcgcctgggcaaagaacaccgtcaccaccacctcgccggaaccccggcgcctcgcccggagcacgtggttatcgccccccgtcggccgcggctgcggtgtagcggagaaagatgatgaacggcggcggcggccagaagaggcggaactcgaaaatcattccctacgagtaccgcgttgagtccgaccccaagttcttcgacaagtcgtggcggaagctccatgatgccatccgtgagatctacaaccacaactccatgagcctctccttcgaggagctctacaggactgcttataacttggtattgaacaagtttgctcctgagctctatgagaaattcacagaaaacatgaaagcgcatcttgaagagatgcggacatgtatagaggctgctcaaggtggtttgttcctggaagagatgcaacgaaaatggaatgactataacaaggcattgaaaatgattagagacatcctgatgtatatggacaggacatatattcccactaataaaaaggcacctgtctttgatcatgggatagagctttggagggataccatagttcggtctcctacgattcaggggaggttgtctgacatgctcgtcgaactcatacatatagaaaggaccggtgatgtgataaacagaggcttgatgaggactacaactaaaatgttgatggatctagggctgtctgtttaccaggacgattttgaaaggccatttcttgaggtctctgctagtttctatagtggtgagtcacagcaactcattgagtgctgtgcttgtggtgagtatctgaagcaggctgagaggcgcctctctgaagaatcagagcgtgtgtcacagtacttggatgttaaaaccaatgagaaaattactgctgtcgtggtaaaagagatgctagcaaatcacatgcagaggttgattcttatggagaactcagggcttgtgaatatgcttgttgaagacaggtatgaagacctgacaaggatgtacgctttgtttaatcatgttcctgatgggctcacagcaattagatctgtgatgacgtctcatattaaggatactggcaaaagtttggtaacagatccagagagactaaaggacccggttgattttgttcagcggcttcttaacatgaaggataagtatgacaatatcatcaatgtgtcattcagcaacgacaagagtttcctgaatgctctcaatttctcatttgagcacgttataaacttaaacaacagatcccctgagttcatatcactgtttgttgatgacaaactgcggaaggtggtgaaagaggccaatgaggaggatcttgaaactgtccttgacaaggtgatgacgttgtttaggtatttgcaagaaaaagatctatttgagaaatattacaagcaacacttggcaaagcgtcttctttgtgggaaggctgctcctgaggattctgagcgaagcatgcttgtgaagctgaagacggaatgtggctaccagttcacttcaaagttggagggcatgatcactgatttgaatacctctcaggatactacacaagggttttatgcatctacttcttcgcggctgctggcagatgcccccacaatatctgtccagatactcaccactgggtcatggccaacacaaacctgcaatacctgtaaccttccccctgaaattgtctctgtctcagagaagtttcgggcttattaccttggcacacataatggcaggaggctaacatggcaaacaaacatggggaatgctgacatcaaagcaacatttggaaatggcaacaagcatgaactgaacgtctcaacataccagatgtgtgttctcatgctgtttaattcatcaaatgtcttgacttaccgtgaaattgagcagtctacagcaataccaactgctgacttgaagcgatgcctcctgtcgctagctcttgtgaagggtagacaagtcctgcgaaaagagcccatgagcaaggatattgccgatgatgacagcttctgcgtgaacgacaagttcaccagcaagcttttcaaggtgaagattaaccctgtggtgacgcagaaggagaccgaccctgagaagctagagacacggcagcgggtcgaggaggataggaagccacagatcgaggcggccatcgtgcggatcatgaagtcaaggagggttctagaccacaacagcataatgacggaggtgacaaagcagttgcagccccgtttcatgccaaaccccgtggtgatcaagaagcggatcgagtcgctcatcgagcgcgagttcctggagcgggacaaggtggacaggaagatgtaccgctatcttgcctaaaacaacctcccttgccttaggaattagatcattatacgttacccatgtcatataaacagaccttgatccatgtacttacgcatagaaggaaatgagtctgcatgccgtgatacttttaggtgaaactgtttttttgttgggtttgtccagttagttgataatttagcttctataacatcctgcgctgggttgcatgctaatgctgtagatagatcttgctggctgcgacgcagtgctctcttttggttgctgcttcagaaaggcgatctgattgcagccaaggttgactttttgtggcttgaatgatgattgatgtcactgaaatgatgcttggatcggatggtaatctactgaattgctctatccagtttgcaatgctatgatgtgcgtggcttcaagcatgtcacatgtggtagcatgtttgtcctgtattgcgatttgtgagcaaagttgatgacgctttagcgtaaaatctccttagttttgttgattgtatatctgatccatgttttatcaaaatttgagaagagactattc

SEQ ID NO: 99992 - DNA, 627 bp, Zea Mays
agacaacggaaccctagcctgctccccactcccccaccagaccaccacctcgccggaaccccggcgcctcgcccggagcacgtggttatcgccccccgtcggccgcggctgcggtgtagcggagaaagatgatgaacggcggcggcggccagaagaggcggaactcgaaaatcattccctacgagtaccgcgttgagtccgaccccaagttcttcgacaagtcgtggcggaagctccatgatgccatccgtgagatctacaaccacaactccatgagcctctccttcgaggagctctacaggttaacattgcgcgcccgcctccggttccccgacttttcggttgccgccctgttccatgcgcttaggtcgcgctgtatgatcgcggatgattcggatagatagcggccatgaatggactgattgctgtgctgattgctgatatgtaattttccattttttaatttatagtcgatcctcctgtgggcttgtatgcatcttagatgatgacatgcgaatgtttgtgaatagattgatcttgattcatatgtcttattattagtgtagtagggcttatcctgtaaccataatttgtcaacatgatattatgatcttttattgttggtgc

SEQ ID NO: 99993 - DNA, 1436 bp, Zea Mays
accaaaccacatttgatggccacatcacccctgagctgcttctccgcgcgtcccagacccagatctccgggcaccgccgtctggttgcttccggccgccgttctcctcctcctcctcaaccggtggtcgcacatggcctcttacccttctgtctcccctcgtggctccggctcggtgcaggtcgggcgcgccgagctttactcgaagatggcgcgtgacctcgacgagcgcggcgcggcgttcctgaagggcggcgagacgtcgcagtcgctcacgctctcggacctcttcgacaccgcagatgacggcgccgtcgtacccaggctcaaggccgccgacccgccagtgcgcgcgaatgtgctctatatggaccccaagttcgccgctgtgatctcggagaagaactaagttagcccgtgattggtcagatggctgtataagttcctttgggaggtcaggtcagggcagtgctcattcagtatgttttgggcttgcaggaaagctgtaaaggacgtgtttcttccttattttgaccaagctatctggttccaaaatacgagcatgtatcacttcagcatgtttcatgcctcccatcacttggagcccattgtagcaactgaggatgagccgaagtggaggcagtaaaaggtgtcaccaagaatttgtgtccgcttaaaattgtattggacagagtggttttgacctcaaccggtgtgcttcttggcctgtggcaggttgaatctggtactgatcctgcagaaatccgctcaagattgagagaagctcttcctcgtgcacctcaaaagcaactgtatgaccctgttctgcttcacacctcgtttgcacgaattctgggacatcccaggctccctaaagagcaaagtgcatcatcgtttgataatgtcaagttcttccatgagctagttgctcaaattaatgagaagatctgtggctttcaggcgacgatatcagagctatggtatgtcgaagagtacgatgttcttgcattggcactgaatggaaagatgaaggtgcggaggctccaccttggctgcaatcgtcagggcatctgaagctagagaggtcatggaaacgggaaaggattaggagatgcacagccaccaaacagacttttttcgcttgcatgtctcgccgaaagggccaccttggtactgcccagctgagcgagatgtgctacaatctgcctttacataccgagaactgacaagttatattgacctagactatcttcagcagattatctatcatcatttctatattcaaatttcactttacgaacattagtctatagtacagaataaactgttggacacagactaatgtttatgtaggaacagtatgcatgttttaacaatatataatacaattatttgagcacaacaactattaaagtgatgtttggttcagacattgtt

SEQ ID NO: 99994 - DNA, 1359 bp, Zea Mays
acggatcaagcagcactcaccaaaccacatttgatggccacatcacccctgagctgcttctccgcgcgtcccagacccagatctccgggcaccgccgtctggttgcttccggccgccgttctcctcctcctcctcaaccggtggtcgcacatggcctcttacccttctgtctcccctcgtggctccggctcggtgcaggtcgggcgcgccgagctttactcgaagatggcgcgtgacctcgacgagcgcggcgcggcgttcctgaagggcggcgagacgtcgcagtcgctcacgctctcggacctcttcgacaccgcagatgacggcgccgtcgtacccaggctcaaggccgccgacccgccagtgcgcgcgaatgtgctctatatggaccccaagttcgccgctgtgatctcgaaagctgtaaaggacgtgtttcttccttattttgaccaagctatctggttccaaaatacgagcatgtatcacttcagcatgtttcatgcctcccatcacttggagcccattgtagcaactgaggatgagattgaagccgaagtggaggcagtaaaaggtgtcaccaagaatttgtgtccgcttaaaattgtattggacagagtggttttgacctcaaccggtgtgcttcttggcctgtggcaggttgaatctggtactgatcctgcagaaatccgctcaagattgagagaagctcttcctcgtgcacctcaaaagcaactgtatgaccctgttctgcttcacacctcgtttgcacgaattctgggacatcccaggctccctaaagagcaaagtgcatcatcgtttgataatgtcaagttcttccatgagctagttgctcaaattaatgagaagatctgtggctttcaggcgacgatatcagagctatggtatgtcgaagagtacgatgttcttgcattggcactgaatggaaagatgaaggtgcggaggctccaccttggctgcaatcgtcagggcatctgaagctagagaggtcatggaaacgggaaaggattaggagatgcacagccaccaaacagacttttttcgcttgcatgtctcgccgaaagggccaccttggtactgcccagctgagcgagatgtgctacaatctgcctttacataccgagaactgacaagttatattgacctagactatcttcagcagattatctatcatcatttctatattcaaatttcactttacgaacattagtctatagtacagaataaactgttggacacagactaatgtttatgtaggaacagtatgcatgttttaacaatatataatacaattatttgagcacaacaactattaaagtgatgtttggttcagacattgtt

SEQ ID NO: 99995 - DNA, 1491 bp, Zea Mays
accaaaccacatttgatggccacatcacccctgagctgcttctccgcgcgtcccagacccagatctccgggcaccgccgtctggttgcttccggccgccgttctcctcctcctcctcaaccggtggtcgcacatggcctcttacccttctgtctcccctcgtggctccggctcggtgcaggtcgggcgcgccgagctttactcgaagatggcgcgtgacctcgacgagcgcggcgcggcgttcctgaagggcggcgagacgtcgcagtcgctcacgctctcggacctcttcgacaccgcagatgacggcgccgtcgtacccaggctcaaggccgccgacccgccagtgcgcgcgaatgtgctctatatggaccccaagttcgccgctgtgatctcgtgagtggtgacctttgccaaaatccgcaggcaacttgctgttaattgttcctgaagcgatgctctctccttacaagggagaagaactaagttagcccgtgattggtcagatggctgtataagttcctttgggaggtcaggtcagggcagtgctcattcagtatgttttgggcttgcaggaaagctgtaaaggacgtgtttcttccttattttgaccaagctatctggttccaaaatacgagcatgtatcacttcagcatgtttcatgcctcccatcacttggagcccattgtagcaactgaggatgagattgaagccgaagtggaggcagtaaaaggtgtcaccaagaatttgtgtccgcttaaaattgtattggacagagtggttttgacctcaaccggtgtgcttcttggcctgtggcaggttgaatctggtactgatcctgcagaaatccgctcaagattgagagaagctcttcctcgtgcacctcaaaagcaactgtatgaccctgttctgcttcacacctcgtttgcacgaattctgggacatcccaggctccctaaagagcaaagtgcatcatcgtttgataatgtcaagttcttccatgagctagttgctcaaattaatgagaagatctgtggctttcaggcgacgatatcagagctatggtatgtcgaagagtacgatgttcttgcattggcactgaatggaaagatgaaggtgcggaggctccaccttggctgcaatcgtcagggcatctgaagctagagaggtcatggaaacgggaaaggattaggagatgcacagccaccaaacagacttttttcgcttgcatgtctcgccgaaagggccaccttggtactgcccagctgagcgagatgtgctacaatctgcctttacataccgagaactgacaagttatattgacctagactatcttcagcagattatctatcatcatttctatattcaaatttcactttacgaacattagtctatagtacagaataaactgttggacacagactaatgtttatgtaggaacagtatgcatgttttaacaatatataatacaattatttgagcacaacaacta

SEQ ID NO: 99996 - DNA, 411 bp, Zea Mays
cgacccctcttaaaccatccattcctttgcagtttcttgatttccaccaataatttgttccagtcgtgaaatctcgcccccctttcctggtttttgtgtcaggtggctccggctcggtgcaggtcgggcgcgccgagctttactcgaagatggcgcgtgacctcgacgagcgcggcgcggcgttcctgaagggcggcgagacgtcgcagtcgctcacgctctcggacctcttcgacaccgcagatgacggcgccgtcgtacccaggctcaaggccgccgacccgccagtgcgcgcgaatgtgctctatatggaccccaagttcgccgctgtgatctcgtgagtggtgacctttgccaaaatccgcaggcaacttgctgttaattgttcctgaagcgatgctctctccttac

SEQ ID NO: 99997 - DNA, 3951 bp, Zea Mays
atggggaaaccacaaaccgatggtgaccagtcacctgtaaactcagatactgatgtgatggattgcctgaacttcgatggccatggagatgttgaagacccccacaaggaggttgcaaaaggggagcagcagccttctggcgaagttgatgaacagcagtctgttatggatgttgatttgacatgtataacatctgtgggagatgaagggaatgaaaagcagaatgctatggatgtggatttgaaagaaatactatctgaggaagatggaggggaaggaaaggcttcttcagatctaccctcacaagtaccagtggatttcaacgttgcaagcctcgagaagttctgtaaagaagcagcaagatcgtttttcagtgaaactggactggttagccatcagataaactcgtacgatcattttgtctcccatggactccaagagctctttgattctcttggggaaatcactgtggaacctgattatgacccttcaaataaacatggtgcttggaaacatgcaactgtcaaatttggtagggttaagcttgatgagccagtgtttatgcttgaaaattctgaccttgaagagcaagatctcaaatttaagcctagacatgctcgcctccagaagatgacatatgcgtctaggatgaatgtggaaatgactgttcaggtttatatattcgacacaagtgacaaagccaaaactggcaaggatacacatgttcataaaagagagataatgacagaaactaaacaaatcaacattggattgttacctgtaatggtgaagtcgaatttgtgctggctgcataaatctcaaaaaggtgactgcccgtttgattttggtggctactttttgatcaaaggaacagaaaaggtattcattgctgaagagcaaaggtttttatcaaggatttgggtcacagaccaccccagctgggatgcaagttacctatctcagatcagacgagaaaagatcaatataaaacttgttccgtccaaaagcaatgaaagctgcaaagtcataaacatttgcttcatgggtacgattatgccaatttgggtagcattttttgcacttggtgtatcgtcagacaaggaagcttttgatatgattgatatcctagactgtgatgctgacatagttaacataatatcattaactattaaagaatctcatgaagaatttgaaggcttccgcactccaggtagagcccgtcaatatgttgatgagctgatcagaaaatcaaagtttccgcccaaagaatcctttgatgagtatgtttgtaggtatatgtttcctggtgtcaatgggtttaggagcaaggcacttttcttgggttacatggtcaaatgtctgctaatggcatactctggcaatcgaaaatgtgataataaggatgatctccgtaacaaaaggctagatctttcctgccaattgcttcggagagaactctggactcatattaaaagagcagaaaggcgcatggttaagctcatgcagagagatttgagcaatgatggcaacttgcaagaccttaggcgttatgtggatgcatcaattattaccaatggattgaaccgggccttctccactggttcttggcggcatccttataaaaaagaaaggtgttcaggggttgtagcaacccttcggagaacaaatccacttcaaatgatgtctgatgttaggaagacgcgacagtggtttgcatatgctggaacggctggagatgcaagatacccgaatccatcctactggggaaaattgtgttttttgtccaccccggatgctgaaaaatgtggatttgtgaaaaaccttgctgttactgctgtggttagttctgtagtgaggaaaccgttgattgatacatttgtttcttgtggaatgaagaaactggatgatatttctctacaagatatttctgggaaggacaggattttcttgaatggaagcttgctaggagtatgtgcagacccacacgaattgactttgcgtttaagaagcttgaggcgtagcaagctaattgatcctcaggttgaaatcaaaagggacaagcaccataaagaagttcgtgtattttctgatccaggcagaattatgagaccacttcttgtagttgaaaatctaagaagaatcacaagaccaaaagatggactatactcttttcaggaacttatagatcaaaacatagttgagctgattggtgttgaagaagaggaggatatccaatgtgcgtacggaattagacatctattctccagcagggagaaagaagactggtcttcttctggctatactcattgtgaacttgatccttctttcttgctagggctgagctgcagtctcattccctttggcaaccatgataacgctaggagggttcagatgcaagctgaaaaaatatcacagcaggctatcggctactcccctacaaattctcagtacagactggacaccctttcacatcaaatgttctatccacaaagacccttgtttagaactgtggtgtcctacggtcttggagaggcgaagacagactgcagctccggacgaaaagacgacttcaacacaccagaatatttcaacggacaaaacgcgatagtctcagtgaacgttcatcagggattcaaccaagaagactctctggtgatgaatagggcctccttagagcgtggcatgtttcgcacgctacatttcaagagctacaaagcacaggtcgagaacaaagagatcacaaggcgtctcaagcacagggaaaacatcaatttcggtaaagtgcagagcaagagggggaaggtcgacagtctggacagtgatggcttaccatacgtcggagcaagtcttcagagtggtgacattgtcattggtaaggtcacggagtctggtgaagatcatagcgccaaactgatgcatactgagaaagggatggtggacaaggttgttctttcggcgaacgatgatggggttaactttgcaactgttactctaagacagtctcgctcgccatgcgtcggagacaagtttgccagcatgcatggacagaaaggagttgttggcctgttggattctcaggagaatttcccattcacttcccaagggattgttccagacatggtcataaacccacatggttttccaactcgtcaaactcctggacagctgcttgaggctgctctggggaagggcatcgcccttggtgggaaggtcaggtacgcaacgccgttcaccactccgaccgtggaggtgatcgccgaacagctgcacaaggccgggttttgcaggtggggtgaggagagcgtgctgaacgggcagaccggcgagcggatgaagtcgctggtgttcatggggccgaccttctaccagcggctggtccacatggcggaggacaaggtgaagttccggaacacgggtccggtgcacccgctcacgcggcagccggtggaggacaagaagcggttcggcggcgtcaagttcggggagatggagcgcgactgcatgctggcgcacggcgccgccgccaacctccacgagcggctcttcaccctcagcgacttctcgcggatgcacatctgccaggcctgcgagcgggtggccaacgtcatcgtgcgggccgccgagggcggcggcggcaagaaggtgcgcgggccctactgcttgttctgccgctccgcggagcgcgtcgtccgggtcgacgtgccgtacggctccaagctgctgtaccaggagctcttcagcatgggcatctgcctcaagtttgaaaccgaggtccgctagaacgaacgccatggcagttcaccagtgagactccctcgatgcatatgcaagtatgcaactgcactgcctaggatcttggtgctttatgggctggtgttgaaacctgcagttttggcggcacgattttctgggcatgcattcagtagcaggcactggttgatactgtgattc

SEQ ID NO: 99998 - DNA, 216 bp, Zea Mays
atggcgaagcttgccgcgcagctcaagagcaagttctttggcctcgtcggccgcatcaccagctgtggccgcgccggcgccacccacaaggatgccgctggtgcgacagaggccaagtcatcagtgggatcccagcctgttgagatcaggtcaaggggaggtgctcctcccgttgatggaggggccaagggtcacatcaacagtgacaccatctag

SEQ ID NO: 99999 - DNA, 180 bp, Zea Mays
gcctatgcattcaccaatattctattttcatcagggaccacaggggagcccaaagcaattccatggacacatataacacccataaaggcagctgccgatggatggtgtcacatggatattcgtaaaggagattttgttgcttggccaacgaatcttggttggacgatgggcccttggctt

SEQ ID NO: 100000 - DNA, 438 bp, Zea Mays
atgattaattttgctaatgaggatgcacttatttggcatgaggcaaacataccatatgcagtctggggacctaccagtactagaacacggtcattaacatactatccgtcagaggctctcaagcataatggctctttgtatgctcatgtttacttcgcccgttcgggttatcctgtggaccctacagatccaaaatatgagcagaaatcttcgtttgggaggacccatcctgttgtggcattcttgccaaaatcaaaagctggtaaaaagaagagcttgcttggagattcagaagagcctgaagagaaagcaccgcataataaggagaataaagaatatgaggataaagatgagggtctgactgaatatatatcttattttggaatggtggtatctatagtagagttgtggaggctaaggcccctatggcaattgtga

SEQ ID NO: 100001 - DNA, 339 bp, Zea Mays
aaccaaaaaggggacttctcccagacattggtatcctgactcatgtcgttagaatggatagataaggaacttacccttaatgaacgaaaaagggggacttatatgcgaaacttcaggatctggagcaggtataggtttatcatttgcagtcgatcccacatttatcttcaaattgaacacatgtattgttcctttatcactggacacagccaaatactgcaaattattcgagaaagccaagctatatatttctgctctatcagcacctctccttacctacaacagaagaaagcagacacaattagtaatcatatcctcagtaaaaagtaaggtactgta

SEQ ID NO: 100002 - DNA, 1051 bp, Zea Mays
cagaaacatcagaaagaaaatatcaactagactagatcgaattttaaacatggcgcctcctcctccagcgctggcagaggagactgctgccttccacccaagcctgtggggcgatttcttcctgacttaccagccgccaactgcgcctcagcaagcatgcatgaaagaacgagctgaggttttaagagaagatgtcaggaagattttgatggggccatgtgagttaccagagacactgggtcttatattgacgttgcaacgtcttgcactggattactactacgaaaacgagatcgacaagttactccactgtatttacgacgacgacgactctgattacgatgataaagatctaaacctagtttccctgcgcttttatcttcttcgaaagaatggttacgatgtgtcatcagatgtatttctagtcttcaaaacagaagaagggagcttcgcttatgctgatgacacggcaagcttgttaagcttgtacaatgcagcgtacttgaggaagcatggagaggaggtactggacgaggcaatttccttcgctagacgacgttgccttgaagcaggtatccttcgcacccctcttttcagaagggttgggatactagaggcgagaaattacatacccatctacgagaaggaggcggcaagaaatgacgccgtgttggagcttgccaaactgaactttaaccttcagcaaattgccttctgtgaagagctaaagcattgcacattgtggtggaaggatttccttgccaaatcaaagatggcttttgttagggatagaatagtggaggtgtatttctggatgaacggggcatgctatgatcccccgtactctcgttcccgaatcatactaacgaagatcacatctctcgtaacaataatcgatgacatgttcgacacatatggtaccactgaagactgcaccaagttccatgaagcaattggcaggtatatatgtataacaatcttccaaaacacacctacacatgaacgtatgccagatgaatttatttgtttcaaaaaatattacggttattaa

SEQ ID NO: 100003 - DNA, 1242 bp, Zea Mays
gatgacggacttgataacttcatgcttcttatgatgggtgaatatcggaagagggagtgtggcaagcgtaaaaggcatcgaggttcagttttaggacataaggtttatgaccggaggagggaggaaggcgctaaaaaactatatcaggattactttgatgaaaatccgacatatcctgagaaaatttttcgacgccgctttcggatgagttcccgtcttttaaacaagatcgctaaagctgttgaggagcatgaccattattttgttcagaaagaaaatgctgcaggtgtatgtgggttttcctgtctgcagaaggtaacagcagcattaagacaactggcttatggtgtaccagcagattatgttgatgagtatgtgcggataggtgaaagcactgctattgagagtttgaggaaatttgttagatctattgttgatgtgtttagcaaggaatatctgagagccccaaatgcagatgatacagccagactacttaatattgcagaaaagcgaggatttcctggtatgcttggaagcattgattgtatgcattggaagtggaaaaattgtcctacagctcatcagggtatgtattgcggtcatgtgaaagatccaactattattctagaggcagttgcatctaccgatttatggatatggcatgctttctttggtctgccaggatcgaacaatgatattaatgttttgcacagatctcctcttttcgataggcttgctaatggtgaagccccagaagttaagtacacaattaatggtcataactatgacatgggctactatctcgcagatgggatttatcctacttggtcgacatttgtcaaaactaagaaggcaccagcaaatgtgaaggacaagaattttgctaaagctcaggaggcacagaggaaagatgttgagcgtgcttttggtgtaatgcaagctcgatttgccattgttcgaggtccggcgcgattttgggatgaagctacacttcgagacataatgatagcatgtgtaatcatgcataacatgattattgaagatgaacgtaatgacgacagcttatatgactcatatgacaagaatgatgctgatgtcaaggatgtagtttcacgagcagggacttcaaagtttacgtcctttggtcatatgcgtgaagaaatcgaaaattctcacgtacaccgtcaacttcaggaagaccttgttgaacatctatggttgcgtcgaggacaaatggagaat

SEQ ID NO: 100004 - DNA, 1671 bp, Zea Mays
gagaacatggcgtctcatccagcacatcgttccagcaaggcagctgatgaggagctgccaaaggcttcttcgacctttcacccaagtctgtggggcagtttcttcctgacctaccagccgccaactgcacctcagcgagcaaacatgaaagaacgagctgaggttttaagagaacgtgttaggaaggttttgaagggctcgacgactgatcaactaccagaaacagtgaatcttatattaacattgcaaagacttggactgggttactactacgagaacgagatagacaagttgctgcaccaaatttacagcaactccgattacaatgtgaaagatcttaacttggtttcgcagcggttctaccttcttcgaaagaacggctacgatgtgccatcagatgtatttctgagcttcaaaacagaagaaggcggcttcgcctgtgctgctgctgacacgagaagcttgttaagcttatataacgcagcatatctgaggaagcatggagaggaggtactagacgaagcgatttcatcgactagactccgcctccaagatctccttggacgacttcttccagaatcgccatttgcaaaggaggtgtcttcttcccttcgtacccctctcttcagaagggttgggatactagaagcgagaaactacatacccatttacgaaacggaggcgacgcgaaacgaagccgtattggagcttgcgaaactgaattttaaccttcagcaacttgatttctgtgaagagctaaagcattgctcagcgtggtggaacgagatgatagccaaatcaaagctgacctttgttagagatagaattgtagaggagtatttctggatgaatggagcatgctatgatccgccgtactccctttcccgaattatactgacaaagatcacgggacttattacaataatcgatgatatgtttgatacacatggtaccactgaagattgcatgaaattcgctgaagcgtttggcagatgggacgaaagtgcaatacatctccttccagagtacatgaaggatttctacatattgatgttggagacatttcagtcatttgaggatgctttagggccagagaagagctaccgtgtgctttacctaaaacaggcgatggagcgtttagttgagctatactccaaggaaataaaatggcgtgatgatgattatgtgccgacaatgagtgaacacctccaggtttcagcagagaccatcgcaaccattgctctaacatgttctgcatatgctgggatgggtgatatgtcgataagaaaggagaccttcgagtgggctttgagctttcctcaatttataagaacttttggttcatttgtacggctctccaacgatgtcgtatcgaccaagcgtgagcaaacaaaagaccatagtccctccactgtccattgttacatgaaggagcatggaacgaccatggacgatgcatgtgaaaagataaaggagcttatcgaagattcatggaaggatatgctagagcaatcccttgcgctgaaagggctcccaaaggttgtgccacagctagtgtttgacttctcaagaaccacggataatatgtacagggatcgtgacgcattgacctcttcggaagcactcaaggaaatgatacagctactgtttgtggagccaatacccgaatga

SEQ ID NO: 100005 - DNA, 112 bp, Zea Mays
ttgtatatgttgtgctacacgcataaacattttaggttggacagacggttatatatgttgtgctacacccataaacattttaagttggacagtttcagaaaaaaaaaacacg

SEQ ID NO: 100006 - DNA, 630 bp, Zea Mays
gtagggtttgtggcggcgggccatagcgaaagggcagacatcgactaagcttgtggcggcggacgacggctgcagctagagccgggcagcggacgacgccgcgacgcatcctgccatcctcgtctggccagctgcacactgtgatctaatacaatggctagcgatggtgatgcttcacctccacggaagcatatgttgttggagttgccttgtgatgaagaaggtgttaatgtgagtcaaaatgttggtgtgtctgcatcatcagccacacctgccgctaccagagcttctcatgaacaaggtcaaaatccagaaggtggaagtaatgttgatggggatgattcttcaaaggaaaagcagtcaaagaagtccacttcagatgtttggcagtattttgagaagtatgaagttgtggtagaggagaatggcaaatcagtgaagcaaatttgggccaaatgcaagtatcctggctgcaaaaacaagactagcaaagctagggcggaaagcaatagaggaacaactgcattttggtctcatttaaagaattatcataagattgtgaaggggcaacaggaactcaaggcagaaaaggatcatggcacaggtatatgtgttgtccaaccatataaa

SEQ ID NO: 100007 - DNA, 1591 bp, Zea Mays
cacagtcgatcactcgttctcatcccttctctgatcgtttacgtggcatgctcatctcctcacgccgacgtccaggttcacaactgtcccattcgttatctcctctgcctagatattctctgattccagccatcgtacgcgccaccaggttcttccatcgccacagcacctctacgttgtctctgtgtctcggtcgagtccgtgctcctctgctcggcgtcttccctactcgccggtggagcttctttggcgcgtgcctcccctgcgcatccatctccttcctcagcccgtctctctccctgtccccagtcagcgcgctcgaattcctccatgcgcacgtgccggatcccagctcgcgaagctctctgctcggtcgtctcccttctcccgaagcttttccccatggtggctagcccctgctcctccgtgccgcggctcccagtttctccctggagctcgcccaagtcgccgtcgtcttcgagctccacctccatggcgccgattgcccccatcctgctcccctgcgcgctggtcggcgtcctcctctgccgcagagctcccatcgccgcgcgcgctaattttctctgctcgacagcgctcctctctgcgtcctgccgagctcgccctcggcttcttgtaccaagcaagcccggtagccagttccctctcccagccgaggtcctttcctttcagtagataagcacgccgttcctccctgcagctcctctgggcagccacgttcttctaccggccatcagttgccgctgaaccactgtcggatcagttgccgctgaaccactgtcggattaattttcagtttcactcgcgtggctctctagagataagctcttcatcggctgtcactcccaatcttcggttcaccgattggctgtcgactttgttgatcctttccgtgtcaaaccagcaagcttcgccaccatcactcaactgctcgctcacgtgtgctcgtaaattttcttggtcgtgtctgctgagctgaccaatggtccagctcgccgttatcgccaagtcccacgcaactgtgctgtctctcgtcgtcattcattcctatttttttcaccgccatatgtcgcctcgccttgatgcgtgtcgtcatctttaatcccagtaactcttccgatacgcgtctcgtcgtgtttcgcctcctcttggtcagccccatctaggtcatgggggcggaagatctcaacactacttcatatggctactttagatgctgtttgcggggtagagagagttgttgtgatagatggttttcgccctctcgtcatgttcgcaatcctcgtcgatcgtcgctggtttgagagaaatcaccggaaggtatggagaagaaagtgaagccgcaccacaacgtcagatgttcaacgacaagctcgagccaggatttatcagcatactcgcaagtattgagtcacgtttgatgctggtaagatagatttatttgtttagtaattttagtgttttgtcggtaggcgctatcggcattttatgcgaggaattttagttgtggaatgaagtcagtgctatgcattcatgtgcattatgcaaatcatttaggtacgcttattaa

SEQ ID NO: 100008 - DNA, 1709 bp, Zea Mays
accatcaagaaaatactagctagactggaaccgatcgagaacatggcgtctcctccagcacatcgttccagcaaggcagctgatgaggagctgccaaaggcttcttcgaccttccacccaagcctgtggggcagtttcttcctgacctaccagccgccaactgcaccccagcgagcaaacatgaaagaacgagctgaggttttaagagaacgtgttaggaaggttttgaagggctcgacgactgatcaactaccagaaacagtgaatcttatattaacattgcaaagacttggactgggttactactacgagaacgagatagacaagttgctgcaccaaatttacagcaactccgattacaatgtgaaagatcttaacttggtttcgcagcggttctaccttcttcgaaagaacggctacgatgtgccatcagatgtatttctgagcttcaaaacagaagaaggcggcttcgcctgtgctgctgctgacacgagaagcttgttaagcttatataacgcagcatatctgtggaagcatggagaggaggtactagacgaagcgatttcatcgactagactccgcctccaagatctccttggacgacttcttccagaatcgccatttgcaaaggaggtgtcttcttcccttcgtacccctctcttcagaagggttgggatactagaagcgagaaactacatacccatttacgaaacggaggcgacgcgaaacgaagccgtattggagcttgcgaaactgaattttaaccttcagcaacttgatttctgtgaagagctaaagcattgctcagcgtggtggaacgagatgatagccaaatcaaagctgacctttgttagagatagaattgtagaggagtatatttctggatgaatggagcatgctatgatccgccatactccctttcccgaattatactgacaaagatcacgggacttattacaataatcgatgatatgtttgatacacatggtaccactgaagattgcatgaaattcgctgaagcgtttggcagatgggacgaaagtgcaatacatctccttccagagtacatgaaggatttctacatattgatgttggagacatttcagtcatttgaggatgctttagggccagagaagagctaccgtgtgctctacctaaaacaggcgatggagcgtttagttgagctatacaccaaggaaataaaatggcgtgatgaggattatgtggcgacaatgagtgaacacctcaaggtttcagcagagtccatcggagccaatgctctaacatgttctgcatatgctgggatgggtgatatgtcgataacaaaggagaccttcgagtgggctttgagctttccacaatttataagaacttttggttcatttgtacggctctccaacgatgtcgaatcgaccaagcgtgagcaaacaaaagaccatagtccgtccactgtccattgttacatgaaggagcatggaataacaatggatgatgcatgtgaaaagataaaagagcttatcgaagattcatggaaggatatgctggagcaatcccttgcgctgaaagggctcccaaaggttgtgccacagctagtgtttgacttctcaagaaccacggataatatgtacagggatcgtgacgcattgacttcttcagaagcactcaaggaaatgatacagctactgttcgtggagccaattccggaatga

SEQ ID NO: 100009 - DNA, 596 bp, Zea Mays
atatgttctagcttttcatggtggttgagctgtttttggggtgggctgagttacctatccttttatttggtcatgaatgtgtttcaccacttttgcatttagattctactacgtgaattatctgtcttttatatcatgtatgaactccatgtttccctccctgttatgcttctttcaagggaggtgctgccggattttgcaatactttctctctctctattccatttcttgtgttgcataagtttagtgggaagggtatttggtaacatccaatgtgtgggaccagtgggggtgttacaagtgcatccctcgaaagcctgcaagtatactataatactttacatgaagaagtacatgtattgtatgctcgactgcacctggacgtgcctttcgacgttgctgcaatgggagcccgaccatcaggaatagcaaatgagggacctgatggggagctggacctttttaggccccctccttccatgaactttggtgacgaacggtctcctgccgtagcaaatggagtaacaaaggatgaaaaagactagaatagtatagtttagatattatacttatgtaaaataagtaattaagtcgag

SEQ ID NO: 100010 - DNA, 99 bp, Zea Mays
atgctggggcaatctctccttgggacccatcaatgcagatccatgcttaggctgtctccagtaatattctctaaattccattctctaaaggaatattct

SEQ ID NO: 100011 - DNA, 120 bp, Zea Mays
atgtttcttttgccaattttctttatccatgatatatttagttgttacgaaatattggtatatgtttctcttgccaatttgtgtgccttgtgtgttttatgttactttttttacaggtga

SEQ ID NO: 100012 - DNA, 1632 bp, Zea Mays
cagctagaagatgtgcaggggctgctgcaaatggatgccaccgccttccacccaagtctgtggggcgatttcttcgtgaagtacaagcctccaaccgcgcccaagcgtggacacatgacggaaagagccgagctgttaaaagaagaggttcgcaaaacgctcaaggcggctgcaaaccagataacaaatgctttagatcttataatcacactgcagaggcttgggctggaccaccactacgagaatgagatcagcgagctgctgcgctttgtctacagcagttcggattacgacgataaagacctgtatgtagtctcgctgaggttttatcttctgcggaaacatggccattgtgtttcatcagatgtctttacgagttttaaagacgaggaagggaacttcgtggtggatgatacgaaatgtctcttgagcttatacaatgcagcgtacgttaggactcacggggagaaagtactcgacgaagccattaccttcaccagacgccagcttgaagcttcattattagatccactggaaccagcattagcagatgaagtacatctcacccttcaaaccccactcttccgaaggcttaggatactggaagcaataaactatatcccaatatatgggaaagaagctggacgaaacgaggccatattagagcttgcaaagctgaatttcaaccttgctcagcttatttactgtgaggagttgaaagaggttacactatggtggaagcagcttaatgttgagacaaacttgagtttcattcgagacagaatcgtagaatgtcatttctggatgacaggcgcgtgctgtgaaccacagtattctctttcacgggtcatagctacgaagatgacagccttgatcaccgtattagatgacatgatggacacctacagcacaactgaggaggccatgctccttgctgaagcaatatacagatgggaagagaatgccgcagaactacttccaagatacatgaaagatttctatctctacttactgaagacaattgattcgtgtggggatgaactaggaccaaacagaagcttccggacattttatctcaaagagatgctaaaggtgttagtccgaggaagctctcaagagataaaatggcgtaatgaaaattacgtcccaaaaacaatcagtgaacacttagaacattcaggaccaacggtgggagcctttcaagtagcatgttcttcatttgttgggatgggtgacagcataacaaaggaaagttttgagtggcttttgacatatccagaacttgccaagtctttgatgaatatttcacgactcttgaatgatactgcatcaacaaagcgtgagcaaaatgcggggcagcatgtgtccacggtccaatgttatatgttgaagcatgggacaacaatggatgaagcatgtgagaagataaaagagttaactgaagactcatggaaggatatgatggaactctatcttacaccaacagaacatccaaaactcatcgcacaaacaatcgttgattttgcaaggacagcggactacatgtacaaggaaacagacggatttactttttcacacacaatcaaagatatgatagcaaaactctttgtggatccaatatcattattctag

SEQ ID NO: 100013 - DNA, 1607 bp, Zea Mays
atcctttcctcatcatggtccactttccccaatcccaccgaccttaaaattttgcctctagactccattctcttgcttttagccttggatcttgtgctgatcatggaatccgatgagtctgccttcctcaacaacatgcttgcaccacccatggcacccgacaagcgaacaaagaggtactttgcaagctctagccatggccatatattgtttgagcaagatctactggctactagttctatgcaagccagtgatgctcaactcatgggagaccccctcgaggcgaggtcccttgtggcaagcataggtatgactccagcaggttttgaaatgccagagggggaaattttatcccgtggctaccacgctcttggtggtactccagtcgacattgctccagctcctcagccacaaatcgaaagtagcaacaagccaacggctttcaaaggaccatggaccatggaagaggatagcattttgagggatatggtaatgcatcatggtgaagggaggtggtccctggtagcacaatctttgcctggccggattggcaagcagtgccgtgaaagatggatcaatcatgtggatcccaacatcaagaaaaatgacatatggacggaggaggaggacatagtgcttatccaagcccacaaatcctttggaagccactggtcaacaatagcgaagttcctcccaggctggccagagaacgccatcaagaaccactggaactcaaccaagcgcagcctaggctcaaagcgccgactgaagaagaagaagagccaacaagcgccacccgggcagctctccgtcctggaggagtacatccggagcctggaatcggactccagttcggcagcaccaccggcggcaacgtccagaccagccatcggtcgtccgaggagggccgtccacacatcggcggtgcctgagatggaactgcacctcagtgcccccaataaccaagatgcaccggtgcgccaccagccccgggccatcagtcaaggcaatccgatgcttccagacctgaacgtcagctatgatccagaggagacgcactatatggggtaccctatgtatgatcccgcggcggcgccgcagctacagctggttagccaagagccccggcaagccaccttcacttggctcccgtttggtggacctcgcatggcgctgaacggagagcacgcatctggtccgtcgtcgtacgacgtcggtggatcctccggcaacgccggctactacagtgaagcagggccaagcaacgtcggtggcagcggtggtgacggccaagctgatgacgacaccaccaacaatgacgaccttgacctagcgtcgagggagttcttcatgccctcctgtgacgaggtgcgtcttggcttggccaggttcaagtgagctaggcagacgaccgggggctccggccggttgttgcttcgctacctattttgcaaaatggtaagagtatcttggtgtgcatgagtggcagaacactcgtactttaatgatttagaactccttttgtgagccgtggattttgtttaaatgaaccctgtcgttgttgtacaagactctttcagcatctgcatgaatttcatgttcccttt

SEQ ID NO: 100014 - DNA, 675 bp, Zea Mays
atcctttcctcatcatggtccactttccccaatcccaccgaccttaaaattttgcctctagactccattctcttgcttttagccttggatcttgtgctgatcatggaatccgatgagtctgccttcctcaacaacatgcttgcaccacccatggcacccgacaagcgaacaaagaggtactttgcaagctctagccatggccatatattgtttgagcaagatctactggctactagttctatgcaagccagtgatgctcaactcatgggagaccccctcgaggcgaggtcccttgtggcaagcataggtatgactccagcaggttttgaaatgccagagggggaaattttatcccgtggctaccacgctcttggtggtactccagtcgacattgctccagctcctcagccacaaatcgaaagtagcaacaagccaacggctttcaaaggaccatggaccatggaagaggatagcattttgagggatatggtaatgcatcatggtgaagggaggtggtccctggtagcacaatctttgcctggccggattggcaagcagtgccgtgaaagatggatcaatcatgtggatcccaacatcaaggtcaagtcccttcatctcttgtttcttagtttgcttatatgtatggcgtgttcgattcaatttctcgctgcggtt

SEQ ID NO: 100015 - DNA, 196 bp, Zea Mays
cgtgccatctttgaagctgctatagcgctgaccaaccagggcgttcaagtctttccagagataatggttcctcttgttggaacaccgcaggaattgggacatcaggtggcccttatccgtcaagtcgctaacaaagttttcaccagtatgggtaaaactattgggtacaagatcggaatgatgattgagattccca

SEQ ID NO: 100016 - DNA, 2428 bp, Zea Mays
cggagctagagagtgtagctagcacgcacagaagcaaaccaaaactgccatgctctcatacctacaccaggtgttgtagtaagcctgtgaagtgaggtgacacaggccgggagaagagcgagcgagagagaggagaaaagatacacagatagctagatcgacatgccgcctgagctggagcaccatgagcagcagacagccggaggtggtggccaccgagcgcctcctcctcccccgaacagcatgcccacctttagtagcagcactccctcttctacttgtgtttctgccaccaccaacccctctggcggcgcgctgctgtccggcaagatcacgtacaacgggcagcccttctcgggcggggtgcggcggcgcacggggttcgtgacgcagcacgacgttctgtacccgcacctgacggtggcggagacgctgtggtacgcggcggcgctgcggctgccgcgggcgctgggcgcgggcgagaagcgcgcgcgggcggaggcggtggcgcgggacctgggcctgggcaaggtggccggcagcatggtgggcggggtgcgcggcgtgcgggggctgtcgggcggcgagcgcaagcgcgtcagcatcgggctggaggtgctggtggacccgagcctgctgctgctggacgagcccacgtcggggctggactccaccacggccgcccgcatcgtggccacgctccgccggatggcggccgagggcgggcgcaccgtcgtggtcaccatccaccagccgtcgtcgcggctctaccacatgttcgacaaggtgctgctgctgtccgccgacggccgccccatctactacggccgcgccgccgacgcgctctcctacttcgcctctgtcggcttcgcgtcgccgctctccctcaaccccgccgacctcatgctcgacctcgccaacggtatcgcgccgcagacgacgagcggcgacgggatggcggcgctgctggccggcggcggcgagggcgagcacaaggaggtgcgcggcaggctgtccgcggcgtacgagcggcacattgcgccggcggtgaagctggacgtctgcgcccgggaggcgacgcccggcgggcagcaggcggcgtcgcggcgcgcgtcgaaggcggcgtcggagtggacgacggggtggtggacgcagttcgcggtgctggtgcagcgcgggctcaaggagcggcgtcacgagtcgttcaacaagctgcgcgtgttccaggtgctgagcgtggcggcgctggcggggctgctgtggtggcgcacgccggcgtcgcacctgcaggaccggacggcgctcgtcttcttcttctccgtcttctggggcttcttcccgctctacaacgccgtgttcacgttcccgctggagcggcccatgctgctcaaggagcgggcctcggggatgtaccgcctgtcctcctacgtggcgtcgcgcgccgccaccgacctgcccatggagctgggcctgcccacggcgttcgtgctcatcctctactggatgggcgggctggacccgcgcccggggcccttcctgctctcgctcgccgtcgtgctctacagcgtgctggtggcgcagagcctcgggctcgccatcggcgccgtgctcatggacgtcaagcagggaaccacgctggcctccgtcatcaccatggtcttcctcatcgccggcgggtactacgtgcagcacatcccgcccttcgtcgcctggctcaggtggctcaactacagcttctactgctaccgcctcctgctcggcatccagttccccgacggcggagggtactacgactgcggccacggcgcgctctgccccgtcgccgagttcccggccatcaaggccgtcgggctcaacaaccactgggtcgacgcctgcgtcatggcgctcatgctcgtcggctaccgcgtcgtcgcgtacattgcgcttgaccgcctcaagcccaggtgaaacaagataagagaagagaagagaagggatcaattagtttagtgctctatgcataatacaaccagaggggatgaaatgaatacgatacaaacctgcagcagctgagctctctgttttactccattcacaagggtttccagaactcgtaagctttccttcggctcctacccagcttcccacagccatcgccgaatctcattctccggaacaaaagctccgcgtcgaatagaaccgaatccggtcgagctccgcgtgaccgagactctagactctggtctctggtgccctacccaccatggccatgccttgcagctctcaaacagtgttacgacagggcacgaagagacaatgtaacagaaatagattttctttccgtacaggagaatgtctatatgctattcttctgtaaccgaaacatatgctgctagctgctctgctcttctcaactcccagtgataccacggcatctccttgacat

SEQ ID NO: 100017 - DNA, 1463 bp, Zea Mays
gtggtgaagagagcagcagacacgggcaacggcaatgatgggttggggtagagggagacacggagagggacacactgctacgcccactggccactgccaatcatggatccatccgccgctcccatcactcgctctcgcgcgcgttccaatctcgatttcttcttttttttttcgcgcgcgcacggcgatggccccagcaatcccggtgaacaacggcggacacttgtcgccctcgtggagctagcactgtgctgacgcgctgtgcgtgcaggtatcgcgccgcagacgacgagcggcgacgggatggcggcgctgctggccggcggcggcgagggcgagcacaaggaggtgcgcggcaggctgtccgcggcgtacgagcggcacattgcgccggcggtgaagctggacgtctgcgcccgggaggcgacgcccggcgggcagcaggcggcgtcgcggcgcgcgtcgaaggcggcgtcggagtggacgacggggtggtggacgcagttcgcggtgctggtgcagcgcgggctcaaggagcggcgtcacgagtcgttcaacaagctgcgcgtgttccaggtgctgagcgtggcggcgctggcggggctgctgtggtggcgcacgccggcgtcgcacctgcaggaccggacggcgctcgtcttcttcttctccgtcttctggggcttcttcccgctctacaacgccgtgttcacgttcccgctggagcggcccatgctgctcaaggagcgggcctcggggatgtaccgcctgtcctcctacgtggcgtcgcgcgccgccaccgacctgcccatggagctgggcctgcccacggcgttcgtgctcatcctctactggatgggcgggctggacccgcgcccggggcccttcctgctctcgctcgccgtcgtgctctacagcgtgctggtggcgcagagcctcgggctcgccatcggcgccgtgctcatggacgtcaagcagggaaccacgctggcctccgtcatcaccatggtcttcctcatcgccggcgggtactacgtgcagcacatcccgcccttcgtcgcctggctcaggtggctcaactacagcttctactgctaccgcctcctgctcggcatccagttccccgacggcggagggtactacgactgcggccacggcgcgctctgccccgtcgccgagttcccggccatcaaggccgtcgggctcaacaaccactgggtcgacgcctgcgtcatggcgctcatgctcgtcggctaccgcgtcgtcgcgtacattgcgcttgaccgcctcaagcccaggtgaaacaagataagagaagagaagagaagggatcaattagtttagtgctctatgcataatacaaccagaggggatgaaatgaatacgatacaaacctgcagcagctgagctctctgttttactccattcacaagggtttccagaactcgtaagctttccttcggctc

SEQ ID NO: 100018 - DNA, 750 bp, Zea Mays
agggtcccgaaatcgatcggccttcaggcacctccactcatgggaacatcatacatgaagaacgtagaccgacctccatctaatccaaagcggattataattcagtctactcaagagtgctttagtgtcgacatacctcgtgttccggcgaaaactgttagacacaaaccaatgcaggctggtgatgaggacgatgactttatgccattatcgaagaagcgtaactttgatgacagtcctccaaaagtcttgaagaagatagttacaaagcggaggaaaaggcttaatgtgagatgcaatccccaagacgttatagtaagcatccagattttaaatgacagacagcgccaagctattgcacagagggggttctccagtattcttgatatgagagttgacgcacttggcagtagatctcatttagcttggctgatggaaaagcttgaccataatgacatgacaattcgagccggcctagggaaggacatcaaaattacaaaggagacgatgcatcttattttggggttaccaaatgctggtggaggaacgacattaggcattgatgaagctgttgctacaaacaatttaacggctgaacttggtttatcaaaagaagaatttggtgttgcagctcttcaagatcgtctgaggaaagggtttgacgatgatctaagcatcagatccttcttcctgatactattcaataggttgttgttccctactgccagctggggaataactaaccatgag

SEQ ID NO: 100019 - DNA, 504 bp, Zea Mays
atggacggaaggtggaggctacggcatgctgtgcgtgggcacggacgacaacatggactgcggaggctcgagaacccaaaagaaattcagagacctgctgatgtggtttctctagggagcgattcattccctgcatttccaggcatatatggcaaagctctgacgcctttgcttcccgaagatattggtgctaccatagctcagcagccgcctacagaagagacccagtccactgatgtggagacttctggtacaaagtatagaaagtgggcatatatcatcacgattccagctgaagtattgctcattagtctgatagttctgatagttttggttctgcggaagcaagggcctgcaccagtagcccctttgagaacagggctaagtgccctattcagaaggccctcgtatcaggactacgattttagttcgattacttcgattctaggactgccaaatacagataggggttacactgttaactttgatttacttcgattctag

SEQ ID NO: 100020 - DNA, 1722 bp, Zea Mays
ggaacagagaaatctcttttatttaaaattgaataacaaagtgacctccccatagatccccttcatatctctgttcaccggatcagtcgtgattgctcagccctctctcctttcccgcgatttgttcattgatatataaaatctgacggcatggacattccaaaatttcaccagcagcaacggcaatggagggagctggtctgcagtgacagtgacacgagccatggatcccgagccattcgtgcggctctcagttgggcagctcggtctgaagctccccggcgggaacgctagcaaggcggccggccggctctgcgactgcgagatccggctgggcgggttcccggtgcagaccgctccggtgccgctggtccactccccggcgttcaacctcgacccattcaccaacgcggcggttttctccctcgaggaatccgacctcaaggcgctggcggcgccggggtgcttccgggccccgcggtcgtcgtgccttgaggtcgcggtgtactacctggcccgcttcggcgcttcacgctgtggtgtcctcgcctgcgggaggaagcggctggttggcgtgttcagggtggagctcgcttcgtcggaatggcgggacggcaagcccgtgctgctgcaccatgggtgggcgggcatcggcaagggggcggccaggccggagctccacctcagggtgaagctggaggctgacccccgctacatcttccagtttgacgacgagatcgcgctcaacccgcaggttgtccagctccatggcagcatccggcagcccgtgttcagctgcaagttcatccgcgacaggcggccatctcagagtgaccctttgggcggcgggcagtactggtcgagctccagcagcgaggagcaggacatggagatggtgaggcgggagaggaaggcctggaaggtggtgatccacgacctgtccggctcggccgtagccgcggcgtttatggccaccccgtttgtgccggcgccgggcggggacacggtggcacggtccaacccgggcgcctggctcatcgtgcgcgccgacaccacggggtcctcggacagttggcagccgtggggccggctggaggcgtggcgcgaggcggcggcggcggcggcgagcagcggcaaggacacggtgcgcctgcggctgcacctgctcccggaccgccacgacgactgcgtgctcgtgtcggaggcgcccctgagcagcgacaagggcggggagttcttcatcgacatggacaggcaggcgccctccgccacggcggcggagcactgcgcggcgagcctgggcgccgcgtgcgccggcggcggcttcgtcatgagctgcagggtggagggggaggcgaggagcagcaggccgttcgtgcagcttgccatgcggcatgtcacgtgcatggaggacgccgccatgttcgtcgcgctcgccgcggccgtcgacctcagcgtcaaggcgtgccgcccgttccgcaggaaaccgaacaagaaggccgcctcgccgtcgcccgaccacctcgagctcgacacctaggaacgcagaacaggaaggccccgccgactagcacccatggccgcccatggatccatctaactcgacctgtaaattcacttaatttcaagagctggactgaatcgtttgccacaatcaaaactctgttgtttgactggcctcagcagttagtacatgtttggaagtaaattaattttacagtc

SEQ ID NO: 100021 - DNA, 2303 bp, Zea Mays
cctctcctctcagctcccttcccggctgcgagcaatgctcctacctggctacctccatgccgcgcgcggtaacacctccgtcagtccccgcctgctcgtagtaaaacactagcggaccagcaagcgcctctctctctctctctctctctctctctctctctctctctctctctctctctctctctctctctctctctctctcctcgcctcgtcagcccctctctctcccggcgtggggtggccatatatagcttcgccgcctccacttgtcttctttgtttcaccaccagttcagttcagtttctcgccgccggcttgctagttgctactgcgcgcacttcagctgcttgctgtgtaccgcggactctacctcatcattcgccttgctgcctccgccgcctaggtcgcgcaggttcggtgaacgggacgccatgaccgcaacgccggcggtgatcgggctgagcgccggcaaccgcctcctggccacctcattcggttccgccgagctcgcttccccggacgcgtacccgtcgcggcagttcgccgctgcggcgcccaagctcaccgtcgtggcgcaccgcgcctccgcctccgcctcctccccggccaacatcgggggcgccggccacgcgcgcgcgcacgccatccgggcgctcaggaaccactccgcgccggcgctggccccgcctcctccggctgacccggctccggagctggactccaagttcgagttcgagtcctcgctggaggccatcgtgctgctgcagcgctccatgctcgagaagcagtgggagctgcccttcgaggacgacatctcctccacggaggacgaggacgaggacgagaggtccacggtggtggtggcgcggtcgggcgtctcggcgcggcagcggcggatgagcgggcggcggcggggcgctgtcgttggccggaagagcgtcaccgtcagcccggagctgatgcagagccggaaccgcatctacctccggggcaccgtcagcaaggacctcctcacgcacaagcaggtcgtccagctctccaggaagatcaaggacggcatctggcttcagcaccaaagatccaagctgaaggagaaactgggcaacgagccgtcatacaagcagctggcgcaatcgctgcggataccagctcctgagctgcgagcgaggatgcgcgagtcgtttcttgcgagggagatgctggcgatgagcaacacccgtctggtgatatccattgcccagaagtacgacaacctcggcgtcgagctgccagaccttattcagggtggtctgatagggctgctccgtgggatcgagaagtttgatgcctcaagggggtttaggatctccacctacgtgtattggtggatccgtcagggggtttcaagagcattggccgacaactcgagatcgttcaggctccctacttatttgcacgagaggttggtagccattcgcggcgcaaagtacgcgttagaagaccaaggaattgctccgacagtagagaacatagcggagtcgctcaacatatccgagaagaaagtgcacaacgctacagaggctgtgcacaaggttatttcactggatcaacaggcgttcccctccttaaacggcctacctggggatacactccatagttacatagaggatcaaaacgttgcaaatgatccgtggcacggatttgaggaaaggtacctcaaggaggaagttaacagtcttataaattcaactctcaacgagcgcgagagggacattattcgattatatcatggcataggaaagcagtgccatacatgggaggatatcagcagacaattcgggttgtcgagggagcgcgtgaggcaggtagggctcgttgcgatggagaagctgaagcatgctgcaaggagggaacatttggatgcgttgcttgaggaatactgagtgagatgttcttcgcttgagtcggttaattccaccgttgcagtggttgtatatactcggaaacataggggggcaggcacatcatccttgaaaggcttcactgccactcactcactctgcagataactatacatgtacatctgtgacgatcagtaggcatgcatagttaaagcatctgtggctgcaaaatcgtcaaggcgatccaacaaaaggagaaccttttttttggtcttggaagctttacaaagtgtgatgtggtatgtatatgcaaatgtaatgtatcagtaattcagtagagcaataacgtttatgtcctggatttgtattcttgtccagttacatagaaggaaaaaatgcttacaactgcagacaatttgcctt

SEQ ID NO: 100022 - DNA, 1633 bp, Zea Mays
caccaatgggcaatggcctcgcgccttctcgctccccgcaccctatcctctcctctcagctcccttcccggctgcgagcaatgctcctacctggctacctccatgccgcgcgcggtcgcgcaggttcggtgaacgggacgccatgaccgcaacgccggcggtgatcgggctgagcgccggcaaccgcctcctggccacctcattcggttccgccgagctcgcttccccggacgcgtacccgtcgcggcagttcgccgctgcggcgcccaagctcaccgtcgtggcgcaccgcgcctccgcctccgcctcctccccggccaacatcgggggcgccggccacgcgcgcgcgcacgccatccgggcgctcaggaaccactccgcgccggcgctggccccgcctcctccggctgacccggctccggagctggactccaagttcgagttcgagtcctcgctggaggccatcgtgctgctgcagcgctccatgctcgagaagcagtgggagctgcccttcgaggacgacatctcctccacggaggacgaggacgaggacgagaggtccacggtggtggtggcgcggtcgggcgtctcggcgcggcagcggcggatgagcgggcggcggcggggcgctgtcgttggccggaagagcgtcaccgtcagcccggagctgatgcagagccggaaccgcatctacctccggggcaccgtcagcaaggacctcctcacgcacaagcaggtcgtccagctctccaggaagatcaaggacggcatctggcttcagcaccaaagatccaagctgaaggagaaactgggcaacgagccgtcatacaagcagctggcgcaatcgctgcggataccagctcctgagctgcgagcgaggatgcgcgagtcgtttcttgcgagggagatgctggcgatgagcaacacccgtctggtgatatccattgcccagaagtacgacaacctcggcgtcgagctgccagaccttattcagggtggtctgatagggctgctccgtgggatcgagaagtttgatgcctcaagggggtttaggatctccacctacgtgtattggtggatccgtcagggggtttcaagagcattggccgacaactcgagatcgttcaggctccctacttatttgcacgagaggttggtagccattcgcggcgcaaagtacgcgttagaagaccaaggaattgctccgacagtagagaacatagcggagtcgctcaacatatccgagaagaaagtgcacaacgctacagaggctgtgcacaaggttatttcactggatcaacaggcgttcccctccttaaacggcctacctggggatacactccatagttacatagaggatcaaaacgttgcaaatgatccgtggcacggatttgaggaaaggtacctcaaggaggaagttaacagtcttataaattcaactctcaacgagcgcgagagggacattattcgattatatcatggcataggaaagcagtgccatacatgggaggatatcagcagacaattcgggttgtcgagggagcgcgtgaggcaggtagggctcgttgcgatggagaagctgaagcatgctgcaaggagggaacatttggatgcgttgcttgaggaatactga

SEQ ID NO: 100023 - DNA, 474 bp, Zea Mays
tgaccgtcgattcctcgaagctcggaaatggatcgcagtcttaggcggcgcaggatgtcacggccatggatctcgacgcagctcaacgacgtcggcagggttgctcgccggtaggggaggcggtgccggccgagcatggggaaggggtggctcgccaggtgctgcgaccaggggcgatgcgtgcaagggcgagccgaccaggggcacgcccgcgcggactgcctggaagccgggcggttgacatctacggcaagggaagggaactgcttgttgttggagtagggggcgtcgaccaccaggaacaggagaggagaggggtggcggctaccaggaaaggtacgacgtcctcgcctccttgctgctggcgtggggagatgagggagaggcagtgagcagcgtcggcatggggaaggagcagggccagtggtggttttgggtcttaggtgcgagcgtcgcgggggcagttaccgatct

SEQ ID NO: 100024 - DNA, 990 bp, Zea Mays
ggtcaaacttagtacaaacttaattcgtcgtataatgtagaacaaactatgctgggcagtattcagcagtactagaacaatccaatgaaactgcaacagaagaacacacgaaagaaatgccatgttgctggaagacatgccatttctgctctgatcacaaacaacacaccagacatgaagggttcatcatcatgtggatactagaggcaacacaacacgtgacaggcacagatggtactactactggtgccactgctaccacgagatgcggtagacgggagcagaacggatggacgcgacaccgcatctccaacacagagctagtactgaacactgatggagcatgtcggcgaaacgcggggaatgtgcaccccgccgccgccagtagcctagacgcggccctcccagaggcagggctgttcgtcggcgcagagggcgaggagcgccggcggcggtgcgaggccgagcgcggcggcgcggcgccaccgctgggcgcgggtgacgccgaggcatggcccgtagcgcgtgtccatgtcgaactcgcggcccgccctctcccgctgctccgcctccgcctcctcctgctggcggctgccggcgccgtgatctgcggtgacgagagacgaatcaaaatcgaatcaatcggtcgatccgccggtactgccgcggaagcgaacagcgatcgggggattcggaccgggatcggtacatggggccgggtggacgttggtggcgagtgcggccttcttgtggtgatgcgccgccgccttcttggagacgccgccagtgggcttggtagtggcggcggcggcgtgcgtcttctgctgacggaagaaggacttcatgtcgcctccgccgcccctcgtcatggctccggcgatctctctcctgctgatggcgctgctggtggcgctgggttgaccgttgaagaggatgggaatgggttggaaacttggaatgcggcagcagaggagtgggcttggtggattt

SEQ ID NO: 100025 - DNA, 1516 bp, Zea Mays
ctagcaactcattttcagccttcactggggtgatggtgtgtcgtatgtgtctgtgttgtgtgtgttttgtgggtgagagtgtgtgttttgtgttttgtgttgtgtgtgttctgtttgtcccaggcctcgggcctttttccctctactttaatttaatgatacgcaaccctcctgcgtattcgagaattttttttcagccttcacagtgacatgatatcaacaatcttcaagaaacaattaatctgtttctctagaagctatgcatgcctataattgtgaggatgtcaaagcagaggaatatgtgtatacctaaaaaatgtatgcctcatggttaccatttcttgatttggtcagatgggctacagtaccgctgtgtatgggtggggcagaggtcagaggttttctcgacctgcatgagaaggtctttttaatataatgccaagggttgtcttacacctcgcaagtcgagtttttttaactgcatttgcactttcttacaaggccatgctcattttcacatgctgctctattgtattttgaatcttgataatggatagtcaacgctatgcctctttttgagagaagaaaatttccaaaaaggacttgtggccatgccttttgtggtggcaagcatttaacaagttagtattttgtcatataactccagctgttataaatcggtgcccataatcctgtgatgcatactcttgggaatccagtttatatttagatcacatcatgacagaacaaacatgaggtttatgcaggtacgagtacagatgggctgatggtgtgcagataaagaaacccatagaggtatcagcaccaaaatatgtggagtatctgatggattggattgaaggccagcttgacgatgaatccatatttcctcaaaaacttggcacgccatttccaccgaacttcaaggaagtagtaaagacaatattcaagcgcttgtttcgggtctatgcccatacttaccactcccatttccagaagattgttagccttaaagaggaggcccatctcaatacctgttttaagcacttcattctgtttacaaatgagtttggcctgattgacaagaaggagctggctccacttcaggagctcatcgaatccatcatcgttccttactgagaacacggtttgctaaacatggatacagagctcttaatgctgatgctgtgaaattcagtctgtttatgacagcactttactgcatagagcttattgttcccgttattagacacaaggacatgtcacatatgcgtgtatctgtgttgtttcttcctgatcatgctgaccatgtaagtactgtcatatcagctatagaacggcgatgataatgtactgcagaaagaaaaaaaacacgagaaagctgagttggggctataaattgcatattggcacttatcgagtatagaatagatctccttctctttcttcttacaaacagaattgacttgttatttttaatggaatgaaataaatattcacgctttttgacatagaa

SEQ ID NO: 100026 - DNA, 1199 bp, Zea Mays
aaaaaaattcggtcccttcgtcctctactcctctagtcctctcggctcctcgcagtcgctcactgcgtgcgccaaaagcagcagcagctccagccgtcgccgtctccactctccagtctccaccactgctccgcccgcgccggatcgagggagggcaggcggacgaggaggagggatgagtctcttcgggcttggacgaaaccagaagacattccgccccaagaagagcgctccatcaggtagcaagggagcacagctccgaaagcacatagatgccactctcggcagtggaaaccttagggaagctgtgaggttgcctcctggagaggatatcaatgaatggcttgcggtgaatactgtggatttctttaaccaagttaatatgctgtatggcacactcacagaattttgcacacctgagagctgtccgacaatgacagctggcccaaagtacgagtacagatgggctgatggtgtgcagataaagaaacccatagaggtatcagcaccaaaatatgtggagtatctgatggattggattgaaggccagcttgacgatgaatccatatttcctcaaaaacttggcacgccatttccaccgaacttcaaggaagtagtaaagacaatattcaagcgcttgtttcgggtctatgcccatacttaccactcccatttccagaagattgttagccttaaagaggaggcccatctcaatacctgttttaagcacttcattctgtttacaaatgagtttggcctgattgacaagaaggagctggctccacttcaggagctcatcgaatccatcatcgttccttactgagaacacggtttgctaaacatggatacagagctcttaatgctgatgctgtgaaattcagtctgtttatgacagcactttactgcatagagcttattgttcccgttattagacacaaggacatgtcacatatgcgtgtatctgtgttgtttcttcctgatcatgctgaccatgtaagtactgtcatatcagctatagaacggcgatgataatgtactgcagaaagaaaaaaaacacgagaaagctgagttggggctataaattgcatattggcacttatcgagtatagaatagatctccttctctttcttcttacaaacagaattgacttgttatttttaatggaatgaaataaatattcacgctttttgacatagaa

SEQ ID NO: 100027 - DNA, 252 bp, Zea Mays
atggtgaaccccttctgcctcccctcctctggcaccgacggctggggtggaggtgaggcgaggacgaggatgcctcaccacagggatgcaggagggtaccgaatccctcgcaggcggtctgccgggatcgaacgacacaaccgaagccgcggagggcaagcttgtgccgacaacggagtcaaagaagtggagggtttcccatctcctgatctcatcccatgccatgattcaggccatccacaacctcattga

SEQ ID NO: 100028 - DNA, 2157 bp, Zea Mays
gctggtgccgttcgcttggtgcttcctccctcagcgccgttgtcctttgacccggcgcggcggtgcccaacctcgctgctcgtccgacgcccgtacgtcgcccttcgcgtcctccctccttactccctcgccaagtcgcccgacgatggatctgccgcgaccccaggctccctgttgtcggcgccctgcagacctacgtcctgccccctgctgcatcgatgcgcccaggcccagcgacctgcgcggctgcgccccggcagccggcgccctatggaaaccctccgcttcgtatccccgtgctgccgtgccgccagcctccgtgaggctccacgacatcagtgtccgcggagaggaggatgagcagaaagagatgctgcagcaaatgactgacggagtcagagcaatgctgggctcaataggtgacggtgcgatcaacatttctgcctacgacaccgcatgggttgcccttgttaagagcctggaaggtggcaatggccctcagtttccctccagccttagatggatcgttgagaaccaactaccagatggctcgtggggcgacgaggagttcttcctggtctatgaccgcatgatcaacactctggcctgtgtgattgcacttgagtcgtgggaaatccatgctgacatgtgcgagaaaggtttgtcattcattcgagagaatttgtgaaggcttgcccgccacgagggacggtccggtctcagatgtcgatgacacggccatggggttccgtcttctccgactgcatggctacgatgtctctccttctgtgtttaagcacttcgagcaggacggggcgttctactgctacccagggcagtcgaacaaatccgtgactgctatgtacaacctctaccgcgcttctcaggtggcctttccaggcgaggatgagctccgacgcgctgaggcatacagccgtgagttcctctgccgcagacgagcctccggggagctcaaagacaagtgggtcatccccaaggacttgcctggcgaggtcgcttacgcactggacgtgccgtggaaagctagcctgccgcgcatcgagacgaggatgtatctggagcagtacggtggtgccgatgacgtgtggattgggaaggtcctgtacaggatgtctctcgtcaacaacgagctcctcctccggacagctcaagccgacttcagaagtttccagagacaatgcaagctcgagtggcatggcctcagaaaatgggccagcaggagaaacctccaagcatacggcgtgacgtcgaacagcacgctgcgatcctacttcttagccgcagccagcatctttgagccagacagagcgacagagcgtctgggatgggctcgcacggcggtgctcgccgaggccgtctcctcctgcctccgagacggtcgttgtagccgtgccgacggcatgctgagggaactgaccagcggcatccacctacgcaacgacgataatccggcagccagcttggtgcatgctctccatgagctcattggcctccttgcattcgacaatgcttcctacaacagccttcttgatgcctggaagcaatggctcgccatgtggaccgcccagggacacgaagggagcgtagcgctgctgctggttcgcacagtggagatatgctccggccggaggcgtagcgcctctgccaccgacgatggccaagcacacagcctctccgagtactcccagctcgagcagctcacgtcctcggtatgcagcaagcttgctgcagcaggcaccggagatggagacgacctttccccggcaagtgtggaggacgcagcagatcgccaccgtgtggatctggagatgcagacgttggctcggtgcgttctccggagccgcagcagtatcgacgcagtgaccaggcagacgtttctccatgtcgcgaggagcttctattacgtcgctcattgctcagctcgaacggttgatgcccacatctccaaggtcttgttcgaggatgtcgtgtagccaccgtttgggcctcgttttgtatctttaaagcagtgtttggttccagccagatttagtctcggccaaatcaaatgtttgaatggtaattacatgtattaaatatagtctaattataaaactaattacatatataaagactaaaagacgagataaatctact

SEQ ID NO: 100029 - DNA, 2518 bp, Zea Mays
gctggtgccgttcgcttggtgcttcctccctcagcgccgttgtcctttgacccggcgcggcggtgcccaacctcgctgctcgtccgacgcccgtacgtcgcccttcgcgtcctccctccttactccctcgccaagtcgcccgacgatggatctgccgcgaccccaggctccctgttgtcggcgccctgcagacctacgtcctgccccctgctgcatcgatgcgcccaggcccagcgacctgcgcggctgcgccccggcagccggcgccctatggaaaccctccgcttcgtatccccgtgctgccgtgccgccagcctccgtgaggctccacgacatcagtgtccgcggagaggaggatgagcagaaagagatgctgcagcaaatgactgacggagtcagagcaatgctgggctcaataggtgacggtgcgatcaacatttctgcctacgacaccgcatgggttgcccttgttaagagcctggaaggtggcaatggccctcagtttccctccagccttagatggatcgttgagaaccaactaccagatggctcgtggggcgacgaggagttcttcctggtctatgaccgcatgatcaacactctggcctgtgtgattgcacttgagtcgtgggaaatccatgctgacatgtgcgagaaaggtttgtcattcattcgagagaatttgtggaggctagagcacagtggttcagatgactggatggtcgttagtttcgagataaccttcccccagctgctggagatggcaagagacttgggtctcgacgtgccctgcgacgagccatccctgcgagctatctatgcaaggagagacgcaaagctcgcaagaatccctaaagaattactgcacgcttcaccgacaactctgcttctgagcatagagggaatgccgggcttagactgggagagactactgaaactccagtgctccgatggttcgttcatgtcatcgcctgcacccacagcctacgctctcatgcagaccggcgacacgaaatgcctcgagttcctcaatggaatcgtcagcaagtttagcgggggagtgccctttacctaccctgtggatctgttcgagcacttatgggtagtggacaggatagagcggctgggcatagggaggcacttcacaggtgaaatcaaggagtgcctagaatacgtacacaggtactggggcgacgaaggcttgcccgccacgagggacggtccggtctcagatgtcgatgacacggccatggggttccgtcttctccgactgcatggctacgatgtctctccttctgtgtttaagcacttcgagcaggacggggcgttctactgctacccagggcagtcgaacaaatccgtgactgctatgtacaacctctaccgcgcttctcaggtggcctttccaggcgaggatgagctccgacgcgctgaggcatacagccgtgagttcctctgccgcagacgagcctccggggagctcaaagacaagtgggtcatccccaaggacttgcctggcgaggtcgcttacgcactggacgtgccgtggaaagctagcctgccgcgcatcgagacgaggatgtatctggagcagtacggtggtgccgatgacgtgtggattgggaaggtcctgtacaggatgtctctcgtcaacaacgagctcctcctccggacagctcaagccgacttcagaagtttccagagacaatgcaagctcgagtggcatggcctcagaaaatgggccagcaggagaaacctccaagcatacggcgtgacgtcgaacagcacgctgcgatcctacttcttagccgcagccagcatctttgagccagacagagcgacagagcgtctgggatgggctcgcacggcggtgctcgccgaggccgtctcctcctgcctccgagacggtcgttgtagccgtgccgacggcatgctgagggaactgaccagcggcatccacctacgcaacgacgataatccggcagccagcttggtgcatgctctccatgagctcattggcctccttgcattcgacaatgcttcctacaacagccttcttgatgcctggaagcaatggctcgccatgtggaccgcccagggacacgaagggagcgtagcgctgctgctggttcgcacagtggagatatgctccggccggaggcgtagcgcctctgccaccgacgatggccaagcacacagcctctccgagtactcccagctcgagcagctcacgtcctcggtatgcagcaagcttgctgcagcaggcaccggagatggagacgacctttccccggcaagtgtggaggacgcagcagatcgccaccgtgtggatctggagatgcagacgttggctcggtgcgttctccggagccgcagcagtatcgacgcagtgaccaggcagacgtttctccatgtcgcgaggagcttctattacgtcgctcattgctcagctcgaacggttgatgcccacatctccaaggtcttgttcgaggatgtcgtgtagccaccgtttgggcct

SEQ ID NO: 100030 - DNA, 1838 bp, Zea Mays
tataagacactgctgccgcgcgagtgcttttagttgaggcaaatgtcattcgccgccggcaggcacaggtggtgatcaattccctcccctactcttcgttgtgctacgctactacttcactacgtaccgttgccgcgaggagcaaccgagcagacgatgatgccgatgcctccttcccctccggctgttccgctgatcgggcacctccacctcgtcgccggcgggctcccgcatgtccgcctgcgggacctcgctgcgaggcagcaggacggcgaggggctcatgctcctgcgcctcggaacggtcccgacgctggtagtctcgtcgccgcacgctgcgcagcaggtcctgcgcgcccacgacaagtcgttcgcgtcccggccacggaccgtcgtcggtgacatactctcgtacgggccgtcggacgtcgggctcgcgccgtacggcgattggtggcggcaggctaagaagctggtgaccacgcaccttctcagcgccagaaaggtgcagtgctaccgcgccgcccgcgaggaggaggtgggcgcagtgatcgccaagatccacggtgctgccggggcacatgcggctgtggacatgagcgagctcctgagctccttcaccaacgacatcctgtgccgtgcagtggctgggcggtcgttccgggcggacgacggccggaacaaggtgttccggtatgccggcacggccgttgtagggggcttcaacccggagaacttgtaccctcggctggcaaaagtagccggcggcgtgctcacgtggccggcacgccggagggcggagaggctgaggtcccagtgggacaaggtcttcgacgccctgatcgacgagcacgcgagagagatggccggcggcgctggtggtggagatctagaggagactgacttcatacatgtgctcctgtccgtacaggaagagtatgggctcaccagaaacagcatcaagggtatcctggctgacatgtttacagcgggcactgatacttcatatgcggccctagagttcgccatggccgagctcatgcggcatccacatgctttggccaaactacaggctgaggtgaggaaaacaacggcggcggcggcggcgtcgggcgaaaaacaagtgaaggagacaaacctcgacggaatgacgtatctaaaggcggtcatcaaagagacgctccgtctccacccgccagcgccgctccttctcccgcatctctcgctagaggactgcgacttggacagctacaccgttccagccggcacgaccgtgctcatcaacgcctgggccattgggcgtgacccgagggtgtggaacgccccagatgagttcatgcctgagaggttcatcgtagacgacgacgacgacatgggaggcatagataataatggttctgtagacttgagaggaaacgacttccagtttctgccgttcgggtcgggacggaggatttgccctgggttaaactttgcattggtttccattgagctcatgttggcaaacctagtctaccacttcgactgggagctagcggaaggggaggatagcaatagcaatattgatatgactgaggtgttcggattgacagcgcgtcgaaagcacaagctccttctcgtcccaagatcagcatcaagtgcacctgtcgctgtagaccagagcacagggagaggagctcatatgtaaacctagctagctagccccttcgctgcaaacttgtatgacaactgtgtcagtagccgccagaattaagcttattttcggcggctaaactctggccgccgaaaacggtgtacaatgttgttgtgcgtgtctccaatctccaggagtttcctctc

SEQ ID NO: 100031 - DNA, 2359 bp, Zea Mays
gggctactcttgctccatcacctacggatgtaggaataccaaccatgccactgccagatctcctctcctctccactgaggactctgaccagtgggactaggatattccttcttcttcacccacgactccgccttcctagttcttgggcggccggtgaggacgaacacggactcgcgctctcgctcgcgccatcggaggaaaggagatccactcggagcatgcgggccgccgcgcggtagatgaaactgaggaacacggcaataacacgagcaaattcagcttgtcttccaatgggggatcgtgttggtgtcaagtacaacagcatcaatgaggctgaagagcataagggagggcatggcatccccaaggtttccatgatacccctcatattcctcatattttatgaagtttcagggggtccctttgggattgaggatagtgtcaaggctgctgggccactactggcaattttgggctttcttctgtttgcactcatatggagcgttccagaagctctaatcactgctgagatgggcactatgttccccgagaatggtggttatgttgtctgggtttcttcagctcttggtccgttctggggttttcagcaaggttgggcaaagtggctcagcggtgtcatagataatgccctctatccagtcctatttctggactatgtcaagtccagtgttccagctcttggaggtgggctcccaaggaccttagcggtgcttatcctcacagttgcgcttacatacatgaactacagagggctgactatagttggctgggtggcagtctttcttggggtgttctctcttctcccgttctttgtgatgggattgatagctattccacagattgaaccttctaggtggcttgaaatggacttggggagtgtggattggggattgtatctgaatacactattttggaacctcaactattgggattcaatcagcacattggctggtgaagtcgagaatccaaagagaaccctaccaagagcgctttcttatgctctagttctagtggtgggaggatacctctacccattaatcacttgcacagcagcagttccaatcgttagggagcactggtcagatgggtatttttcagacatcgcaagaattctcggtggcatttggttgcactcatggattcaagcagcagctgctttatccaacatgggcaattttctcactgaaatgagcagcgattcttaccagcttcttgggatggctgagcgaggcatgctccctgacttttttgccaagagatctcactatggaaccccgcttattggcatcctgttctctgccttcggtgtgatcctactgtcctggatgagcttccaggagatcatcgctgccgagaactacctctactgcttcggcatgatcctggagttcattgccttcatcaagctgcgggtgtaccatccgaacgcctctcggccctacaagatccctttgggcaccattggtgctatccttatgatcatcccacctggtctcttgatcattgtggtgatggcactcgcgtcctacaaggtgatggtggtgagcatcctagcgatggtcttcggattcgtgctgcagccgtgtttggtgtacgtggagaagaagcggtggttaaggttctccatcagtgcagacctgcccgatttgcctgatgtgcaggaaattgctgaagatgatgctgtcccactcgtggtctaatattcggccattgtgctctggaggtgttgttcccaatcgagacatcctaggatggaatgtgacacactgggattcacgaccttgtatctcctgaatgagttccaaagccagaggtcttagacatcttgtataaggacacattatgttttcaccgtgctattgaacatcatgatggcatcatgcatcaaacagaaatgtaagccccagacagtgttcatcaaaggagatcctccagattatcaaatacatgttgcatctgctgtcagctgtcgcttaacttgtctatatactagggtcgatccatgacatgacatgaggttactcatctgggatcgccttaaaatgggtgaacgttaactcttgataagaggcagtagaggttctcgacctgcagattgtaacctggtttccattgcataaactgttatcagtaattccatcttttgcgtacagttttgtgttataaatggagcatcggcgtaattgtccttggaagttagttgccattattctgcatgtttcgactcatttttgcaaacaatataaaatgtttttcgcaaacaatataaaatgttgagttttatttcggaagggtactatttttttcgatttttgaatcccaaagtttcatcattaga

SEQ ID NO: 100032 - DNA, 1731 bp, Zea Mays
gggctactcttgctccatcacctacggatgtaggaataccaaccatgccactgccagatctcctctcctctccactgaggactctgaccagtgggactaggatattccttcttcttcacccacgactccgccttcctagttcttgggcggccggtgaggacgaacacggactcgcgctctcgctcgcgccatcggaggaaaggagatccactcggagcatgcgggccgccgcgcggtagatgaaactgaggaacacggcaataacacgagcaaattcagcttgtcttccaatgggggatcgtgttggtgtcaagtacaacagcatcaatgaggctgaagagcataagggagggcatggcatccccaaggtttccatgatacccctcatattcctcatattttatgaagtttcagggggtccctttgggattgaggatagtgtcaaggctgctgggccactactggcaattttgggctttcttctgtttgcactcatatggagcgttccagaagctctaatcactgctgagatgggcactatgttccccgagaatggtggttatgttgtctgggtttcttcagctcttggtccgttctggggttttcagcaaggttgggcaaagtggctcagcggtgtcatagataatgccctctatccagtcctatttctggactatgtcaagtccagtgttccagctcttggaggtgggctcccaaggaccttagcggtgcttatcctcacagttgcgcttacatacatgaactacagagggctgactttttttgccaagagatctcactatggaaccccgcttattggcatcctgttctctgccttcggtgtgatcctactgtcctggatgagcttccaggagatcatcgctgccgagaactacctctactgcttcggcatgatcctggagttcattgccttcatcaagctgcgggtgtaccatccgaacgcctctcggccctacaagatccctttgggcaccattggtgctatccttatgatcatcccacctggtctcttgatcattgtggtgatggcactcgcgtcctacaaggtgatggtggtgagcatcctagcgatggtcttcggattcgtgctgcagccgtgtttggtgtacgtggagaagaagcggtggttaaggttctccatcagtgcagacctgcccgatttgcctgatgtgcaggaaattgctgaagatgatgctgtcccactcgtggtctaatattcggccattgtgctctggaggtgttgttcccaatcgagacatcctaggatggaatgtgacacactgggattcacgaccttgtatctcctgaatgagttccaaagccagaggtcttagacatcttgtataaggacacattatgttttcaccgtgctattgaacatcatgatggcatcatgcatcaaacagaaatgtaagccccagacagtgttcatcaaaggagatcctccagattatcaaatacatgttgcatctgctgtcagctgtcgcttaacttgtctatatactagggtcgatccatgacatgacatgaggttactcatctgggatcgccttaaaatgggtgaacgttaactcttgataagaggcagtagaggttctcgacctgcagattgtaacctggtttccattgcataaactgttatcagtaattccatcttttgcgtacagttttgtgttataaatggagcatcggcgtaattgtccttggaag

SEQ ID NO: 100033 - DNA, 324 bp, Zea Mays
aactagcctgtaaaacgaaacacagcctcagatatcacacagacagatatcataatttagaagactcaagtcttcacagatagatagatagatggataacactggtaaccagttacataaacaggtacatggttcacagatccccaatggatcgaatgatatacttctaatgaggaaatggcacaaagctcatctgacaaatagctgtttggcaacactattaagagacttttaagaggcggcagcctcctcctggagctgcttcaccttggtgatgtagtcattcatcgcctcatccttcgatttgcctgccaagatctcaag

SEQ ID NO: 100034 - DNA, 1644 bp, Zea Mays
aggttgaagaaagtaacaatgccaagaaagctcgaattgaactcctgaagaaagaggaggatttaactgctgcaagagatgtcctcaataagatgacgcagtggaactctgcactcgtggagaacattaacccttgaatctgtgtgatgacgattcattggcgtcaaaggacatctttgtataggggtgtgttagattggatgacatgtgaatgtgattcatggatcagcctggatgttctgttatgattaagaactgctatgtatcgtgcaatagacacatcgtctgtactttggatgttattatcaggtcccaaacttcattatatccaatatgttacaatatcattttggtgacttaactacaatgtcagctcgtgccaacagaaaaagaagaaaagaaatgggcggtggttgcccgacaagtccttgtcagccgcacagtcttcacacgaccaggggccatgagcaccactcttgccttagccacggcccacgggcagcacagcatctccatctatccaaatggcagccagcagccgtccccttcctccaccctctgccatcctcgcagtcacagcccctcaccatggctgccacactctcctccgtggctgccccttccctccccaagcacatccccgttaccagagctcagcagcaggcgcctccttccatcatctcggcatcaactcagaagactgccttccatggggtgtcgctggtggtggacaggaggtgggcggccggccaccggagaggcggcggccggcggaggctgctgcaggtgaacgcgaggaccgccgccaagaacatcgaggtggaggtcgagaagccgcttggcttagccttgggccagaagcccggtggtggcgtcgtcatcacttctgtggagtctggagggaatgcagccagagccggtctgaaaaccggggaccaggtcctgtacacaagcagcttcttcggagacgagctgtggcctgcggataagcttgggttcaccaagacagccatccaagcgaagtcagactccgtctacttcgtcgtgagcaggggtgccgaagttgacgtgaagcgcctacctaagaggccggcgccaccccggtttggacggaagctgactgattcacaaaaggagagagcaacgcacgtctgccttgattgtgggtacatatacttcctacccaagccttttgacgaacagcccgacgactacggttgcccacagtgcaacgcgccgaagaagcggtttgcgaggtacgacgctgccaccgggaaggccatcggcggcgctctgccgcctatcgccgtgatcgtaagtttggtgatcggcatcgctggggtaggagctctgctcgtgtacggcctgcagtagcctgctcgttcttgttcagaacctttttttttttttgctgtgctcaagaagctcagctgactgctgctgtactctgtctcacaagacattccgagtgatatacatacataaaagggaagaaggaaatacacagtatttgaggctaatggcttgtctaattttcatgcactgctggtggttatacagtcgctcaatatgagtaccgagaggtcgcatgcttttcggaaatgcttccgttgtcgatgctgctctcgtcagcatagagatttt

SEQ ID NO: 100035 - DNA, 1641 bp, Zea Mays
aggttgaagaaagtaacaatgccaagaaagctcgaattgaactcctgaagaaagaggaggatttaactgctgcaagagatgtcctcaataagatgacgcagtggaactctgcactcgtggagaacattaacccttgaatctgtgtgatgacgattcattggcgtcaaaggacatctttgtataggggtgtgttagattggatgacatgtgaatgtgattcatggatcagcctggatgttctgttatgattaagaactgctatgtatcgtgcaatagacacatcgtctgtactttggatgttattatcaggtcccaaacttcattatatccaatatgttacaatatcattttggtgacttaactacaatgtcagctcgtgccaacagaaaaagaagaaaagaaatgggcggtggttgcccgacaagtccttgtcagccgcacagtcttcacacgaccaggggccatgagcaccactcttgccttagccacggcccacgggcagcacagcatctccatctatccaaatggcagccagcagccgtccccttcctccaccctctgccatcctcgcagtcacagcccctcaccatggctgccacactctcctccgtggctgccccttccctccccaagcacatccccgttaccagagctcagcagcaggcgcctccttccatcatctcggcatcaactaagactgccttccatggggtgtcgctggtggtggacaggaggtgggcggccggccaccggagaggcggcggccggcggaggctgctgcaggtgaacgcgaggaccgccgccaagaacatcgaggtggaggtcgagaagccgcttggcttagccttgggccagaagcccggtggtggcgtcgtcatcacttctgtggagtctggagggaatgcagccagagccggtctgaaaaccggggaccaggtcctgtacacaagcagcttcttcggagacgagctgtggcctgcggataagcttgggttcaccaagacagccatccaagcgaagtcagactccgtctacttcgtcgtgagcaggggtgccgaagttgacgtgaagcgcctacctaagaggccggcgccaccccggtttggacggaagctgactgattcacaaaaggagagagcaacgcacgtctgccttgattgtgggtacatatacttcctacccaagccttttgacgaacagcccgacgactacggttgcccacagtgcaacgcgccgaagaagcggtttgcgaggtacgacgctgccaccgggaaggccatcggcggcgctctgccgcctatcgccgtgatcgtaagtttggtgatcggcatcgctggggtaggagctctgctcgtgtacggcctgcagtagcctgctcgttcttgttcagaacctttttttttttttgctgtgctcaagaagctcagctgactgctgctgtactctgtctcacaagacattccgagtgatatacatacataaaagggaagaaggaaatacacagtatttgaggctaatggcttgtctaattttcatgcactgctggtggttatacagtcgctcaatatgagtaccgagaggtcgcatgcttttcggaaatgcttccgttgtcgatgctgctctcgtcagcatagagatttt

SEQ ID NO: 100036 - DNA, 147 bp, Zea Mays
atgctcaaatcatccacgcggaagggtagtgaatggaatcggaaccaacacaaagcaaatttcaccgatgatgtgaacttgccaaccataccaaataatttgccgttgagcttgacaattccctttgctgttgagcttgtttcttga

SEQ ID NO: 100037 - DNA, 1545 bp, Zea Mays
atgctgttgtggcgagtgctgctccggcaccggcggccgccgttccccgtccacgccgccggattcttcaccagctccggaagcaacaccactgcgcctcctcctgctggagcggaggggctccgcgacgagccgggggaggagggctccctggcgcggcgggtggagcgggcggcgtcggtcggcgcggccatgcggggctggatggcagacggccgcgccgtgcaccgtggccacgtattccacgccatcaaccgcctccgacgacaccgcctacaccgcaccgccctgcaggtcatggaatggatcgtgagagagaggccctacaagctgagtgagcttgattactcgtatctgctggagttcacagctaaagtccatggcatttctgaagccgaaagcctcttccttcgcgtgcctcaggaatgccggaaagagctcctctacaacaaccttgtcatggctgctttagatctgaatcacattaagcattcatacgcttacatgaggaagatgagagaattgtccctgccgatctcgccgtatgtttacaaccgcctgatcatccttcactcatcacccggtcgcaggaaaactatatccaagatcctttcccagatgaaagctgatcgtgtggtccctcacacgtcaacctacaacatcctattgaaaatacaagccaatgagcacaacattgatgggctagccagggtgttcaatggtatgaaaagagcaaagattgagcccaatgagatcacttatggcattctagccattgcacatgctgttgcaaggctatatactgtttgccatacatatgtagaagccattgagaattccatgacaggtactaattggtccacgctggaaattcttcttatcctgtatggataccttgggaaggaaaaggagctaaagaggacatgggagatcatgcaagacctccctcatattcgatccaaaagcttcacactagcaatcgaagcatttggaaaggttggctccattgaccaggcagaaaagatatggatccatataaaatcaacaaagaagttaagccttacagaacagtttaattctatgttatcagtttactgcaggcacggtgttgtcgataaagcatcatctgtattcaaggaaatgagagcaaatggatgccagcctaatgctattacttatcgccacttagcattgggttgcttgaaatcaggtcttgttaaagaagctttgaacacaatagatatgggaaagaaggaagtcgtcactaaaaaggtgaggagttcaacaccatggttggagaccacacatctgttgcttgagaactttgcagaaattggagacttggaaaatgcaaagagactgtacagtgaactgaatgaatccaaatattctctgaattcctttgtgtataacaccctcctgaaagcttatgtgaaggcaaaagtttatgagccggatttgtcgaggacaatgattttgagaggggcaatgcctgacgctgagacatatagccttctcagactgattgaacaattcaagatctaa

SEQ ID NO: 100038 - DNA, 4464 bp, Zea Mays
agcgagagaagttctcggagagagaaactaagcgagcgagataaaagaagcgaaacgcgggcagctgttgctgaggcgtggagacggaggcggcggcgcggccgaaccctagccgacggcggcgcgtttgaggcgggaccctctgcaggcgacgcctggcggccggattcgagctgccggcgtcggcagcttcagatcggcggtcgcgccgacggaatcggcggggatcccggcgggatgggcgcggcgaggcccgtgctctggtcgtgagtttgcttggttcgtgggttctggctctgggctcccgagcaaggttttgagctcggtgtagccgcttgcttgctgagttgctgctgtcgctttttgggcggtttgaagcgggtttttgcggggggtttgggagggatctgccgggaaggcccgaggtttaggccggtttttgagagctggaggctccggccgggatcgggggagccatgtcgtctcttagcagggagctggttttcctcatcctgcagttcctcgacgaggagaagttcaaagagacggtccacaagttggagcaggagtcgggcttctacttcaacatgaagcacttcgaggacctcgtgcagggcggcgagtgggacgaggtggagaagtacctcagcggcttcaccaaggtggaggacaaccgctactccatgaagatcttctttgagatccgcaagcaaaagtacctcgaggcccttgataggcatgacagagccaaggctgtggagattctcgtgaaggatcttaaggtattcgcctccttcaatgaggagctgttcaaggagataacgcagctgctgaccttggagaatttcaggcaaaatgagcagctgtccaagtatggggacacaaagtcagcccggaatatcatgcttttggagctcaaaaagctcattgaagcaaaccctctgttccgggacaagctgaatttcccaccattcaaagcttccagacttcgcacattgatcaatcaaagtctgaactggcaacatcagctttgcaagaaccccagaccaaaccctgacatcaagacactcttcactgatcactcttgtgctgctcctaccaatggagcaagagcacctccacctgccaatggtccacttggatccatccctaagtcagctggatttccaccaatgggtgctcatgctccatttcaacctgtggtgtcgccatctccaaacgcaattgcaggttggatgacaaatgccaacccctctttgcctcatgctgctgttgcacaagggccacctggtctcgttcaggctccaaacacagcggcatttctaaagcatcctagaacccctacaagtgcacctggtattgattaccaatctgcagattcagaacatctcatgaaaagaatgcgggttggacaaccagatgaggtatctttctctggtgcaagccatcctgccaatatgtacacacaagaagaccttcccaaacaagtttctcgtacccttaatcagggttctaatgttatgagcctggatttccaccccgttcaacaaaccattcttttagttggaacaaatgttggtgacattgcggtgtgggaagttggttcacgggaaaggatagctcacaagactttcaaagtttgggatattggttcctgtaccttgcctttgcaggcttcgctgatgaaagatgctgcagtatctgtcaatagatgtctgtggagccctgatggaactattctaggtgttgctttctcgaagcatattgttcagacatatacttttgtacctaatggagatttacggcagcaagcagagattgacgcacacatcggtggggttaatgatatagccttctctcaccctaataaaactctatctatcatcacatgtggtgatgataaactcatcaaggtgtgggatgctcaaacaggacagaagcagtacacatttgaaggacatgaagctcctgtgtattctgtatgccctcactacaaggagtccattcagtttatcttctctactgccattgatggaaaaatcaaggcatggttgtatgattgcttgggctcaagagttgactatgatgctcctggacattggtgtactaccatggcttacagtgctgatgggacaagattattctcttgtggtactagtaaagaaggtgattcacacttggttgagtggaatgaaactgaaggggcaattaagaggacatacaatggcttcaggaaacgttcactcggtgttgttcagtttgacacaactaggaatcgcttcttggctgctggagatgaatttcttgttaaattctgggatatggataacaataacatactaacaacaacagactgtgacggtggactgccagcaagccctcgtttgagattcaatagagaaggttcattacttgcagttaccacaagtgataatggaataaaaatacttgccaacactgatggacaacgcttgcttaggatgcttgagagtagagcatttgagggctctagaggacctcctcaacaaataaacaccaagcctccaattgtcgcccttggtcctgtttcaaatgtcagcagtcctatagcagtaaatgccgagcgacctgatcggatcttgcctgcagtgtcgacaagtggcttggcacctatggatgctagcagaactccagatgttaagccaagaataacagatgaatccgaaaaggtcaaaacctggaagttggctgacattgttgataatggacatcttcgagctctgcatttgacagacacagacactaatccaagcaaaattgtccgtttgttatatacaaataatggggttgcactcttggctcttggctccaatgctgttcataagttgtggaaatggcaacggagcgacagaaatcctagcggcaagtctactgcatctgttgcacctcacctgtggcaacctgcaaatgggattctgatgacaaatgacacgaatgatggcaacccagaagaagcaaccgcctgcattgcattgtccaaaaatgactcctatgttatgtctgcatctggtggcaaagtctcgttgttcaatatgatgacatttaaggtcatgactactttcatggcacctccacctgctgcaactttccttgcattccacccacaagataataatatcatcgccattggaatggaggactctaccatccaaatctacaatgtccgcattgatgatgtcaaaagtaagctcaagggacatcagaagaagattacggggctggccttttctcaatcaatgaatgtgctagtatcatcaggtgctgatgctcagctatgtgtgtggagtattgatggctgggaaaaaaagaaatcaagatatatccaacccccagcaaaccgacctggcactttggttggtgacacaagggtgcagtttcacaatgaccaaacacatcttttggtcgtccatgagagccagttgggaatctatgatgggaatcttgactgtttgcgcttgtggtctccaagagatgcactcccagctccgatatcgagtgcgatatactcgtgcgacggtctcttggtttacgctgggttctgcgatggtgctatcggagtcttcgaagcagaatctcttaggctgcgctgccggattgctccttccgcttacattccaccttcaatactagcctgtgctggacgggtctacccgttggtagtcgctgcgcaccccatggagcctaaccagatcgcgatcggcatgagcgacggcaaggtccatgtggtggagccattagacggggacccgaagtggggatcggcacctccacaggacaatggagcgcacccgcacccgcatccagcgatatcagcggcaccgtcgaccgccaccaaccaggcatctgatcagccaacaaggtgactctggcctgcagcactggaggagattcgttagcgcagagactggtaggacctgtaggagatagggagaaagggtaaacgattagatgacgagaggatgatgctatatttatcaagtccgcagcgcctctcttgtggtggcccgcgacacaggtggggtgattgacagtgacatcgctcgctctaagttaggttttggttcttccctggcccccggaaatcatcacctggcgccgccacattcgaatggagatggatctgctggcatcatcttgcttcctcttttgtaaagcttttcctgctgagtttagtggtaccttagattgtcgtccatttctgccctgttctccgggcagctatttgtagtgtaaaaatatggtggcgtgctggatggtgttatttatgcgtgcgtggcctgtcatgacgaattccaccatgtttggggctatttgatggatgtttactgatcatggctcgaattttttttttcttcgtgccatttgcaattgtagaccgtggacgcggtgtgagttgatgagatttgctggtgagctgtttctgga

SEQ ID NO: 100039 - DNA, 2481 bp, Zea Mays
tcgcgcctcccccaccgcgcatgaccgactgaccctccgcgacgcccttccatggcagccggcgcgcccgcgccagaaatttcttaccatttgtgcagccgcgatccctccgcgcacgggcgactccttcccatctatgccgacgcatccatggcagccgtcgcgcccgcgccagatatttcttcccatttgtgcagccgcgcccgcaaatctcgcctccccacgacgcccttccatccatggcgtctcgacatcctccgctccgctcctagcccacaacatctttcttcccatcctctccctcaaagatctcgtccacttggtctcgcggctgccttccccaacagcgtctgctcaagggctccgggcgctgtcctcgggagagtaccgcgtctgcggggtgctcagcagcagggagctccactgctggcgttggcgcggcctcaacatctccagggacctccggttcgccgtcgccgccgtgggggacagcttcgtgtgcgggatcctcaaagggacgccggcgtccatccgttgctccgggaacgacacggcggcagccgctgtcgccggattccaccatccgctgcttcggcgacggcgtggccgtgccgccagcctgactcgtgcgcgcccagttcctcgacgtgcgcgcgtacgacaaggccttttgtggcgtgttcatggccaactactccctggtctgctgggccctggtctgctggggcgaacctgagttcaacgccaccaaccgcctcgtcttcggtcgcgtcttaccgggcccctgcctgcccatgtccttgtgccaatgcggcgtcttgccgggctccgccaacctctgcgacgatggccgctgcgtctgcgtcgactgcgcgttcgagctcaacgtcgccaggcccaacgcatcgctcgtccccgtgaagggcgacaggattcacgctggtcctgtggtgtcaccggcgccgcgccgctgcaggaacgaacaggatacctccggtggtgcgcagcagttgctgatgccgccgagggtcgggtccagcaggagtagggggcctggcagcgtggtggtggagaacttcacgctggacatgctccacgcctcgacggacgggttctccgacgacagccagatcgggaccggcagcttcgggtccgtgtaccgtggcaccctgcccgacgggcgcgaggtcgcgatcaagcacatcgaggactcggcaaaggcatcaagctcagtggcgtggcactgagaccgagagacggcgttcgactcggagctgaccgcgctggcgcgtgccaaccacaagaacatcgtgtgtctgctgggctgctgcgctgactccggcgagcgtgtgctggtgtacgagttcatggcgaatagcacgttgcacgaccagctccacagtcgcagccccttggcggcggctgtgtcgtcgtggcgcggccacctgaccatcgcgcttggtgcagcgcggggcatcgagtacatcctgctcgatgacgcgtggacggccaagatcgccgacttcgggctgtcctcccagtgccagcgccggcacgccgcaggagccgccctacacggggggcatggtggggtacatggacccggagtactaccggctgtagcacctgacggacaatagcgacgtgtacaactttagcgtggtgctcctggagctcgtgtacggctgtcgcgtcgtgcagcgctacgccgagagcgtgacgtccaagaacgtggttgagttcgcggtgccgcacatcctggccgacgacatcgcgcgcgtgctcgacccgcgcccacgcccggcgaggccgaggcgctggcctatgtgggctacctcatcgccgactgcgtgggacccgtgggctgcgaacgtccgtccatgaccgaggttgtggtcgccctgaagcgcgccctcgtagcctgcggggcggcgccgctgtcccgtgcaggcaccggtcgcctctccgtgctctcccactctggcaccgacgagttcgacctcaccgacaccgactagccgccatggaccatggtggctgccaactgcgagccgccgcacgcgccgaatcgcctgtccctaggccatggttctcccgttgaaaaaggtgatgaagcaagagagagcaggatcagaaggcggttgacgccgacatctcggatgccgctgctgccgcatgatcaacggctagattaccttcgattaactagcgaacaacccacacagggacagggcaccagatcaatagatggcccagtgaaacggttgacgagagacaagtagcacgatggaaaagatcattctttctttctttctttctctctttgctcccccactttctccttccttgttgtgttccttgtatacttatctctttcctcgttgggcggtttctccatattctttgaccaatgtgcatagataggtgagtgacaaaatttgaaaagaaaagaatcacgatttacatttgcttccaattttc

SEQ ID NO: 100040 - DNA, 2524 bp, Zea Mays
cgcgagttgcctgaagtcaaaaggagaaacacggccggctccttccatagatccaagagatttctccattcccaagctgcttgaccagacaaaccataaaaactattgaactttcaatacatctcctcccgtgtccggttcttcctcccaaaatctgcccgagcttctttgcccagcagatccccggcagttgcatccccaagcgcccctccccagtcgacggttctcacccaattccgccgccccatcgacgggttcgcaccaaatcagccgcccccgcagcggtgcgggagcggcgccgtttggacgctttcccgctgaaatctcccgacagtgtctcgtcattttgacgcctgagctttatccgggtggaaagtttggatcttggtgcttgcggagatggcgagtacgggggcgggtgctgttcttgctgtggtagttttggcttgtgcactgggagccagagctgatggctctgatcataagtacaaggaaggggatcatgttcctctctacgccaacaaggtcgggcctttccacaatccaagtgagacgtatcggtactatgatctacccttttgtgcaccagaacatccaaaggacaaaaaggaagctcttggcgaggttctaaatggcgaccggttggttgatgccccatacgagttgaacttcaaggaagacaggaactccaaggttctctgcaagaaagtgttgtcgaaggagcaagttgccaagctccgggatgcagtcgccaaggattactacttccagatgtactacgatgatttgccactatggggattcctcggtaaactggacaaggacaaggagcaaggagacgtgaaatacctactgttcaagcacatccacttcgacatcatgtacaacgacaaccgcgtcatagaaatcaatgtacagaccgatccaaatgtggccgtggatatcacggaggacaaggaagtgccgatagagttctcttattcggcgacatggaaaaagacagacattcctttcgagaaaagaatggataagtactccaagtcttcctctatgccacaacacctagagatccactggttttctataatcaactcgtgcgtcacagtgctcctcctgaccggtttcctggccaccatcttgatgcgtgttctcaagaacgacttcatcaagtattctcatgaagacgagtcccttgaagaccaagaggagactgggtggaagtacattcacggtgatgtattccgtttccccaaacagaagtccgtttttgcagcaattattggttctggaactcagcttctcgcccttgcgattttcatcttcctcctcgctcttgtcggcgtcttctacccatacaaccggggagctctcttcactgccctcgttgtcatctacgctctcacgtccggtatcgctggatacacagccacttctttctatctgcaactggagggcacaaactgggtcaggaatctggtattgactggctgcctattctgcggacctctcttcctgacgttctgcttcctgaacacagtcgcaatagcgtacagcgccacggcagccctgcctttcggcaccatcatcgtcatcatcctcatctgggcgctcgtgacctctcctctcctcgtgctgggcggcatagccgggaagaacagcgacactgagttccaagccccctgccgcacgaccaagtacccgagggagatcccccagctcccgtggtaccgcagcaccgtccctcagatggccatggcggggttcctcccgttcagcgcgatctacatcgagctgtactacatcttcgcgagcatctgggggcacaagatttacaccatctacagcatcctcttcatcgtgttcatcatcctcatcatcgtcacggccttcgtcacggtggcgctcacctacttccagctcgccgtcgaagaccaccagtggtggtggagatctgtcctgtgcggaggctcgacaggcatattcatattcttctactgcatctactactaccacgcgcggtcggacatgtcggggttcatgcagacgtccttcttcttcggctacatgacctgcgtgtgctacggcttcttcctcatgctgggaacggtcggcttccgcgcgtcgctcttcttcgtgcgccacatctaccgctccatcaagtgcgagtaagcgccggacgtgcgcacgcggtctggcatgctcatggctgttgttccgggtggcttgggatccaattgcagaaaccgtcaccagttgggttgtgcatgaatttatatgctgaagcgccagcagttgccctcagtatggacctcttcgcctttagcctttatatatatacgttggagctcccggagaggaggatctatgtagtgtaggactgtcgccagaggcagtgtctgtattattatctagtacacttgtagtggagccagtgtcaaccttcaattatgttgctgaaacctgtgtgttgctcagtagtgcataccatgcacagtttcttttgtttattaggttggcgtccatg

SEQ ID NO: 100041 - DNA, 132 bp, Zea Mays
gtaaatatccgcccgcgacaatacccgcgggtattactcatacccgcccgcgactatacccgcgggtaggattttgtacccgtgcccgtacccatcgggtatcgggcgggtatcggatacccgcgggtataa

SEQ ID NO: 100042 - DNA, 792 bp, Zea Mays
tcggtatttgcccacgtaactcttcgttaggtttctcaacagtcgcacccttccccagctagccatggcgaccgcgccgcggaggctgctccccgcgctcctcaaggccctagctccagccggcgcgcgcggcctctccaccgagaaggctgtcggcgccgccgccgtcgccgtcgtcggcagccataccgctaagtggatgcaggacacgagcaagaagtcaccaatggaactgatcaacgaggtacctccgatcaaggttgatggccgcattgccgtttgtgaagggggtagggccggccctgggcttggccacccaatcgagtatatctgccttgatctggaggcacccaacgtgtgcaaatactgtggcctccgttatgttcaaattcaccatcactaaatagggaagatactggcgtttaccgctgcagaagtttggagctgaggagcttatgcatgcacacttgtttcacttagttctggtactggacttcgcactatgcttggcgtcaaaacattaactttgatgatcatcctcttttcggatgactatttaataatcatgggttaactgtgtgttgattttttttactatagatgaattgtgctcccctatcagaatctatccaagctgtatgtattgaaatcctactctgaaagtctgaatatgaaaagtatggaatttctgagggcaatttaatctcagaagttctaattttctggagatccatgatccaggcctttcccttgctgagcctgtttaattttctgggatccatgtgcttcagt

SEQ ID NO: 100043 - DNA, 1369 bp, Zea Mays
atattcggtatttgcccacgtaactcttcgttaggtttctcaacagtcgcacccttccccagctagccatggcgaccgcgccgcggaggctgctccccgcgctcctcaaggccctagctccagccggcgcgcgcggcctctccaccgagaaggctgtcggcgccgccgccgtcgccgtcgtcggcagccataccgctaagtggatgcaggtattatgacgacttcacatcaagcactatcttgaatcctgaatgttcctgaaatgctttgttgaggggagtacagaccaatgtttcttgttagtagaaacaaaatgactaccggagatgatctattatttctgtagtttccaataaatatccttgaaatctggaatcacttcaggatttgtatctatatctgctggatatcatcagttggtccttttgtattggaaagtaaaaccaggttttgaaccctgggataggccataggcacacataagacaagagcattgccaccttgaccacctgagtcctcattcagtttatcattgtgagaccatgataaagttttacgctctgtttggatgttgtagttttaaggaactgtagcattagcaaactttagttttagaacaatgatgtgcaaaaaccatggtttagaaaaaaaaggaggtctacagtggagtttctaaaacttcaaaaagactagagttttagcaataccatggttttcaaaattacaaagacctttccatccaaacaccattatagttttcaaacccaaagtattccataacacaaaggcatttttctaaaacaacaaaaaatgctttgcatccaaacaggaccttagctttttggttgctatgatattttgctgaaattgcagaccttttttcgctcttctcatatggatcacttttcttctgaattaattttgtttcattaattttatttgttttaggacacgagcaagaagtcaccaatggaactgatcaacgaggtacctccgatcaaggttgatggccgcattgccgtttgtgaaggggctgctgaaggtgttgggcttggccagggccggtcctgacattttgggggccctaagcgaaagtctatatagaggccctatacgaaagtttgattctgctattttttcaactttaaatgatatctggaaaataaaataagttgatgatttacattgtttccaaaatgatactccctccgtttctttttagttgtcgctggatagttcaattttgcactatccagcgacaactaaaacgaaacggaggaagtatgactgaagactgttacaatatttcatattttgtaatataactctgcatttgctttgagagcaaatattttatttttaatttgtc

SEQ ID NO: 100044 - DNA, 581 bp, Zea Mays
atattcggtatttgcccacgtaactcttcgttaggtttctcaacagtcgcacccttccccagctagccatggcgaccgcgccgcggaggctgctccccgcgctcctcaaggccctagctccagccggcgcgcgcggcctctccaccgagaaggctgtcggcgccgccgccgtcgccgtcgtcggcagccataccgctaagtggatgcaggacacgagcaagaagtcaccaatggaactgatcaacgaggtacctccgatcaaggttgatggccgcattgccgtttgtgaaggggctgctgaaggtgttgggcttggccagggccggtcctgacattttgggggccctaagcgaaagtctatatagaggccctatacgaaagtttgattctgctattttttcaactttaaatgatatctggaaaataaaataagttgatgatttacattgtttccaaaatgatactccctccgtttctttttagttgtcgctggatagttcaattttgcactatccagcgacaactaaaacgaaacggaggaagtatgactgaagactgttacaatatttcatattttgtaa

SEQ ID NO: 100045 - DNA, 1307 bp, Zea Mays
atattcggtatttgcccacgtaactcttcgttaggtttctcaacagtcgcacccttccccagctagccatggcgaccgcgccgcggaggctgctccccgcgctcctcaaggccctagctccagccggcgcgcgcggcctctccaccgagaaggctgtcggcgccgccgccgtcgccgtcgtcggcagccataccgctaagtggatgcaggtattatgacgacttcacatcaagcactatcttgaatcctgaatgttcctgaaatgctttgttgaggggagtacagaccaatgtttcttgttagtagaaacaaaatgactaccggagatgatctattatttctgtagtttccaataaatatccttgaaatctggaatcacttcaggatttgtatctatatctgctggatatcatcagttggtccttttgtattggaaagtaaaaccaggttttgaaccctgggataggccataggcacacataagacaagagcattgccaccttgaccacctgagtcctcattcagtttatcattgtgagaccatgataaagttttacgctctgtttggatgttgtagttttaaggaactgtagcattagcaaactttagttttagaacaatgatgtgcaaaaaccatggtttagaaaaaaaaggaggtctacagtggagtttctaaaacttcaaaaagactagagttttagcaataccatggttttcaaaattacaaagacctttccatccaaacaccattatagttttcaaacccaaagtattccataacacaaaggcatttttctaaaacaacaaaaaatgctttgcatccaaacaggaccttagctttttggttgctatgatattttgctgaaattgcagaccttttttcgctcttctcatatggatcacttttcttctgaattaattttgtttcattaattttatttgttttaggacacgagcaagaagtcaccaatggaactgatcaacgaggtacctccgatcaaggttgatggccgcattgccgtttgtgaagggggtaggcaccaaagctgaatcacgcaaactctatcttgcatattctcaaaccgatgatcatataatacattttatgtaaaactgactggcccctgcgcttgctgcactgtttcagctgctgaaggtgttgggcttggccagggccggtcctgacattttgggggccctaagcgaaagtctatatagaggccctatacgaaagtttgattctgctattttttcaactttaaatgatatctggaaaataaaataagttgatgatttacattgtttcc

SEQ ID NO: 100046 - DNA, 554 bp, Zea Mays
atattcggtatttgcccacgtaactcttcgttaggtttctcaacagtcgcacccttccccagctagccatggcgaccgcgccgcggaggctgctccccgcgctcctcaaggccctagctccagccggcgcgcgcggcctctccaccgagaaggctgtcggcgccgccgccgtcgccgtcgtcggcagccataccgctaagtggatgcaggacacgagcaagaagtcaccaatggaactgatcaacgaggtacctccgatcaaggttgatggccgcattgccgtttgtgaagggggtaggcaccaaagctgaatcacgcaaactctatcttgcatattctcaaaccgatgatcatataatacattttatgtaaaactgactggcccctgcgcttgctgcactgtttcagctgctgaaggtgttgggcttggccagggccggtcctgacattttgggggccctaagcgaaagtctatatagaggccctatacgaaagtttgattctgctattttttcaactttaaatgatatctggaaaataaaataagttgatga

SEQ ID NO: 100047 - DNA, 896 bp, Zea Mays
aacccatgtgccctcccactgggtgccgtcggccatccaggttgccctgggctcgccgtccttgagccccctggcggcgttgtacgcgtcggacctctgcttgatgtcgtggtcgaggccgttgatgcgcgccttgaactcgtcgtagtccttgcgcacgcggcggcggtcgttgacgaagtcctcctgggagcggcccatgtaagggtgggacttgaggtcgaagtagctctcggggccgcgcggctcgatgccgtgcttgcggcagaagggcacccagacggtggcgaacttggcggcctccgccatggcctcgtaggtgagcagcatcccggagtcgtcggagaggtagcacgtgttgcgctccacggggtagtcggcggccaggatggacagcacggagttggccgtgctcaggatcggctccttgaacgggtccgccgtcgtcacgaacacgtccagccccggcagcagcgacgtccctccgccggcgcccccgcccgcgcggtcgaaccgctgccgcagcgccgccaggtccggcacgcggttgatcgggttcagcttcggcagctggtccagcagccacgagaagccgaaccagaactcgcccgcgatcgacgtcacccacagccacagcgcgtccgggttgcggtgcgagatgcgccagattacgaacagcgtgaacgcgatcagccggacgaagatcagcaccctgcagccaccccaaatccagtcgtgaataaattttgttttcacccacagttcactagtactttttttctatgacagattttaagtttaacaaattttttttgcaaatcatggtgaatggttatatgtaaataaaaaaatcatataaagcgcgagtggtgattgagcgagtgcgtgcacgcacg

SEQ ID NO: 100048 - DNA, 709 bp, Zea Mays
aactcgctcgatctgcacggcgccggcaggccagagtcgggggcggcgcggcatggaagggaagactggaccggctttcccagcgagtccaacaccgggcgcatgagcatgcattctcgatctctcaaggatcagacgatgcagtccaagagcctggagatcctctcggacatgaactcctcctgcgtgtcggagacgacgtcgtgtgccagcgagttgaacctggagttcaccctaggcccacgcatcaggcactagcgtgcaaagcgaccagaggacgatataatcggaggaggattagctataggctactatataagacggggtgctttgcattgcgtgcgtgcgtgttcatgggatcgtgttaagacggaggatgcactcatggtcccagagagagagaggcagcatatatgcatctttcatcgttaaaagaagctaggccatggacagacaccagcagcagcagcagccaggaaaaaggattaaaggtgtagcatcagcagcagctagctctagggtagtggtagtagtagtggtagagtgaggtgatcgttcgaaagctagctaaacacagatgcaatgtgtgtaatggatggagttgttgtgttagatcgagcgcgtttgcgtttaggatcggaccatctgtttaaagggcttttttcgcagcaacaatgcatgcatatgagcttgcatttgctaggggccg

SEQ ID NO: 100049 - DNA, 2018 bp, Zea Mays
ccgccccctgccctgccattcaaactgtcatcttcttccagctctgtcgtcgtcgtccagtcatggggagagagagaaaagctagctagtagctagctaccctctgtctctgtgtccgccatgcccagcccaacagggtgttgctgctcagtgctcaggtctactgctgccctcccatcattaactcatcatccaccccccctccctccatagtaaactacgctttgcccatctctctctctctctagcttttaccttcttaccccttgtctttctctctctctacaccccccactctctagaaaaggacagcatccccccgtccatccctctagctagctgagctcaagccaccacaagtttcgttccacagacaaagaaacgggcgagagggaaaggagaaagacagcgctctttgtcactcgctcgtctgcaacaagctaagtgtagagtgtagttgcaaagggattgcaagagagagagagagagtgtgtgtgtgatcgacccatggagctcttcccctcccagccggacctctccctccagatcggcctccccgccagcgccacgccgcacgaccaccaccacggcgccgccctcagcgccaggttcctcgcggcagccgcaggcggcggtggcaacgggatccctggcaacccggcggtggccatggcgccgtcgctgcagctgcccatgccgatgccgctgccaatgccgatgccgatgccccccaacgccgccgccgccgcgggggccgccggcggcctttactaccaccccgacgccgccgccatgctgcggcccatacgcggggtgccgctgtaccagcacccgcacacgcacgcggtgccgccgacgttcccgccgcacgcggcgggggcggcgggcccgtgcttctgcgagccttgccacgtcgccgcgggcgcctggcgccgcgccgggtgcggcgtcgggacgcgcgtcgtcgccgggttccccacggcggccaagcgcgccgccagggcgccgcgcatgcgctggacgtccacgctccacgcgcgcttcgtgcacgccgtcgagctcctcggcggccacgaaagggcaacacccaagtcagttcttgagctcatggacgtgaaggatctcaccctggctcatgtcaagtctcacttgcagatgtacaggaccgtgaagaacaccgaaaggccggcagcttcgtcagatctagctgatgggttcgagaacgggtcggcaggcgagatctgcgacgacaactcgctcgatctgcacggcgccggcaggccagagtcgggggcggcgcggcatggaaggttagctgcctgtaacgatcatgggagcagcaccggtgctcatggtgccctctggaatagctcctcaagggaagactggaccggctttcccagcgagtccaacaccgggcgcatgagcatgcattctcgatctctcaaggatcagacgatgcagtccaagagcctggagatcctctcggacatgaactcctcctgcgtgtcggagacgacgtcgtgtgccagcgagttgaacctggagttcaccctaggcccacgcatcaggcactagcgtgcaaagcgaccagaggacgatataatcggaggaggattagctataggctactatataagacggggtgctttgcattgcgtgcgtgcgtgttcatgggatcgtgttaagacggaggatgcactcatggtcccagagagagagaggcagcatatatgcatctttcatcgttaaaagaagctaggccatggacagacaccagcagcagcagcagccaggaaaaaggattaaaggtgtagcatcagcagcagctagctctagggtagtggtagtagtagtggtagagtgaggtgatcgttcgaaagctagctaaacacagatgcaatgtgtgtaatggatggagttgttgtgttagatcgagcgcgtttgcgtttaggatcggaccatctgtttaaagggcttttttcgcagcaacaatgcatgcatatgagcttgcattt

SEQ ID NO: 100050 - DNA, 89 bp, Zea Mays
gaaatatttacgaaaaattgcattacaacttgcagtaccacaatgcaccttccagtatgtagaaagctttaccagaccttgttttgctg

SEQ ID NO: 100051 - DNA, 1321 bp, Zea Mays
cattaaccactgaccctgtatttcgtgtcacctagcgactccgacgagccccaatcccgcgcgccggtgaccatggagttcatcgacccctgggactcccagtcccgcgctcgcgtcgtccattccggcgccaactccacttcgttctcctcctccaccgccaaagcacccctctccctccgccacgccgcatcttgcgccgccgcggccgtcgcacttctcgccgccgcgttctacctcctcccgacctaccagatcctctcctccctcctcatatggatcgcttcgtccctgctcctcgcccccttcgcgcccttgtcggccactggcggcgacatctccgtcggccgaggccgcgtcgttccggctccagaaccggccccagaacccacaccggaacccacgcccgccccccgccgcggccgtcgccagaacccagtcccgacgcccacaaaaccctcagatccgggcactccccccgtccaatcggccgcatcactgcatccgttgcagaaggcgacaactgcggatggagccgtggtggacggcggcgagagggaggaggacgccggcgagtggactgaccaagagctggagctgctccggcggcagatggtgaagcacccggcgggtgagccccagcgctgggagaagatcgccgcggtgtttggcggccgccgcacgccggagaatgtcatccgggcggcaaagtcgggcgctcccgcggcgggaggaagctcgttcgagcagttcctacgcaagcggaagccgctcgatccgagggccgaggctgctgtcactgcggacgatgcgggaggcgccgagagtgcggacgccgcttggagcgccggggatgaccgggccttgctgaacgctcttaaggagttcccgaaggacactgcaatgaggtgggagaaggtggcggcctctgtacccgggaagacaaaggccgtgtgcatgaagaggatcaccgagctcaagcgagacttcaggagcaccaagacggcatcggaagcagcatcataggcgaaacctgataattttggtagggtgccggactgaatgacatgcgctgcactggtttggctagcgaggaagaactttacatggctagctccagtgaaccatggaaacggcagaggattaactacactacggagagggccggagctatagaacagatcatgtaattttcctattgaactagagacagggtatcccttgatataggagaaactttgacttactactggacacatggcatgagacaggaagaacctgttcttgtttcaaactaaagcatgttttcattgcaatcttt

SEQ ID NO: 100052 - DNA, 1498 bp, Zea Mays
cgagaagcgccgtcttccccctttccaacctcaagtctacagtctacaccgaatccatcccccatcgccgccgccgccgccgccgacgacgacgatggcaagcctactccggcgatctgccgtacccgcgcgccagctcctcctcctcccgcgccatttcgccgccgccggctccgcccccgccttgtcccgctcgttctcccgcttcaacccccgagacgacagctctatgttcgatccaccggagccgccggtgaactggggcgtgagcatagttccggagaagaaggcttacgttgtggagagattcgggaagtatctcaagaccctcggctccgggttccacctcctgatccccgccgtcgaccgtattgcctacgtgcactcgctcaaggaagagaccatccctatccctcaccagaacgccatcaccaaggacaacgtcaccatacagattgacagcgtcatctatgtcaagcacatcgagtggcgtgactgcatgtctgtcaatttgaatctaccaagtgccatcaatgaagcagccacagattggggcctgaagtgtatccgctatgagatcagggacataaatcctccagcagggattaggcaggctatggagatgcaggctgaggcagaaaggaaaaaacgcgctcaaatccttgagtcagaagggatgaaacaggcccaaatccttgaatcagaagggaaaaagactgcccagatccttgaatctgaaggagctatgttggatctagcaaaccgtgccaagggtgcggctgaagcaattcttgccaagtcagaagctactgctcgtggaatgagattggtttcagatgcgatgacaactgaaggcagtgccaaggctgctagcctgaaacttgcagagcaatacatcgaagcattctcaaatctggcacaaaagacaaatacaatgcttcttccaggtgatagtgccagcccagcatctttcgtggcccaggcaatgaagacgtatgagcaaatccattcccacagccaggcattaaagagccacccccagatagaagagctgaaggaatcaggagagaccagtcctgctccatcttctgaggcgagcaagacaccaccactcattgaggaagcagattctaaccagaccttctcactgcaacgccccaagaacaagcagtgagcttcgctcaagtgtttgaagtccttttttctatctgttgttctgaaacatgagtgccactgagaaacaccactagtaggttttagttttctttagtctgagagagctgatatgtggcggagaagggatagacccctaggcatttggtttctgggagctaaatgcgaccggagagacctagagagattttgattctcgtgaaggttatactttggttccttgttggaatgaagtttgtaaaaaggcaaggttgggttaacgttggttagacaaaatgcataaatgcttaagttatttctttcttgctgagcttgactacatata

SEQ ID NO: 100053 - DNA, 1183 bp, Zea Mays
ctctcgtcaaagctgattcctcctctagccatgctcctctactactctctcgttgctcatcaagaaatatatgacaggtagccagctagacaagatgaagcgctcttatctagctcttcagttgcattagattcagacatgctccatctgccctagatatccaagaaaattccctcccaaaacattttctagatcttgtgcgctatatatctagcgagcgagagagagagagaccggccaattgatcccatgctgcacatggacctgagcttgggcacactggtagaagtagaagacagtcaagaagtgcaagaagaagacaacaacttgtacaagcagcaacgggctctaggtcaagatctgcaccgccggcaaggtgtcagcggcggcgggccgagccacagccacggggtggagcgggagcacatgttcgacaaggtgctgaccccgagcgacgtaggcaagctcaaccggctggtggtgccaaagcagcacgcggagcggttcttcccggcggccggcgccgggtcgacgcagctgtgcttccaggaccgcggcggggcgctgtggcagttccgctactcctactgggggagcagccagagctatgtcatgaccaaggggtggagccgcttcgtccgcgccgcacgacttgccgcgggggacaccgtcaccttctcccgcagcggcggcggccgatacttcatcgagtaccgccactgccagcgccggcgccgcgacgtcgatatcagcttcggcgacgctgccaccgtgccggcgtggccgaggccgatagttatcggaaccgcggccatgaataatgggggtgcaacggtggcgtccgccaccatcgccggccatgacatcgaggtggcagtggcaccctcgggggcgaggagcttcaggctcttcgggttcaatgttgagtgcagcggcgacgatgcaccggcaccggcacctgctcccgccgaagtggagtatgtcgacggcgacacctagtagcagcggcggcgtagagtgcgcagagagacgatgaacgatggtgatctactgatcagggaccttattacaccataggtggcgtgcatgccttgttgaatcttaattagtcatgttatttctttgttgattcccatttgcactgatgatttattttaggtcgtaactgcatgaagctagtaac

SEQ ID NO: 100054 - DNA, 791 bp, Zea Mays
gtgtaaacacaaaattccataatgatacccattcgtcagtgatcactcacttcaacagtttcccaagaacgaatttcatttctaaatccaacagagaagaaagagtcagatgctcttctctagcatcgcccggaccccggttgggagaccagagcaagatgacccctcgtcgttagcctggatttagatttcctcgtcctcaaacgaggaaatgtctccttgcatggctgaaagggctcttcagggacgcgacactcactgagccctttacaacttcagggtcaccgatccgatggttgctgtcgttatcttctccatctagtaggactgttggagcaagtcaaaccagcgtcttcagggtcatcgatccgatgcttgttgccgtgatcttctccatctagtaggattttggatagatcctgaggaagcacctccctagaaccccatccatctaatcggcgtgtgccttcttgcccatgggttgctccagcgagccatgggcctcctcatctccctgctcaagtaattcctctctgcgggcgcggatatggagaggaggcagagacggcgacagtgggattcagcgggcacgggcgacgacgtgggagaatttgttgccacctcagcttgccctcctcctcccgcgctgtgctcaagccctcggattcggtaatcagaggcgggggccacactggatgcgacgctgggtggaggaggaggttggggcctcggtcagcttctggctgatggagctcggtgtcgatgatgatttagggatctttggggcgggt

SEQ ID NO: 100055 - DNA, 113 bp, Zea Mays
ctgtttagttgttcgtttgactttaatcaaaacgacttatactgtttctataatgttttgtctctatggattgcagctacagtagtccgaacagttggctttaatttgaagcg

SEQ ID NO: 100056 - DNA, 2347 bp, Zea Mays
atgccggctaggggagaggggaggccggcgaaggagagggtagaccaggtggtcggggtcggcacccggggcgacaacacgtggatcctggcgtgggtgcccagcgacgatggccaccagggtgagttggaaaaggaagctattaacaatggtacttctccggggcaagcccatgacattgacataccgccaccacggcctaaaagaaaggctaacagtccatatcctcgaaaaagtggtctcagctctgagacaccaaccaaagaacttccaagtgacaagtcaacaaaaccaaatatgcccttgagcaatgagaatgtactaatggcaggtgatgcatctcttcagaaatttcaaaggaaggagttgtctggaaaagaaagttgctcggaagttcttaatctcttccgtgatgccccatctccatcattttcttcagttaacaaaagctcttcaaatcatggtgcaccgattgaggcaagtaaaacaaaaatccgagatatgaccattatggaaaatagttctcttaaccccaacatgcaagaggatgtaaaggaaatcaatgatcaggagatggaaaggcttaatggtacccaaatcagctctaaatgtgaacactctcatgagggatatttggacatctcaatgcaacaaatgaagctaaagccagagtctgtggagacaacatatgtggacaaacaaaccgcaagagcttcacactccctagcggagagaactgggacaactagcattccggtcactgcaactgaagaaactcattctgttctaacaagtgatcaagtgggaatcaatggaagcatgaacccatccatccatccaatgtttcctgcagatccaaaatttgatagcagtgccacaccacagccttttcctcataattatgctgcctttgctccaatgatgcagtgcaactgcaaccaagatacccacagatcattggtcaacatgtcatccaccttctccagcatgcttgtttccacgttgttgtcaaaccctgccatccatgcagctgccaggctcgcagcatcatactggccagcagctgaaggtaacactccgattgatccgaatcaagaaaatcttgcagatggtgttcaaggaaggagcatagggtctcctccaagcatggcttctattgtagcagctacagttgctgcagcatctgcatggtgggcaacacaaggtcttctccctttcttcgccccacccatggctttttcatttgtgccagctcccagtgctgccttccccacagttgatgttccacgaccttcagagaaagatagagattgcccagctgaaaatgcacagaaggaatgccaagaagctcgaaaacagggacagtttgaaggtttcagagttgccgcttcttcagagtatgatgggagtggaaaaggcgaggtgtctgtccacacagagttaaagatatctcctgtccagaatgctgatgccacgtctgccgcaggagctgacacgactgatgcattcatgaataagaaaaagcaggaccgctcttcatgcggttctaacacaccttcaagtagtgatgtagatgtggacaatgtccctgagaaagagggcaatggtaatgagaaggcgaagcaagcctcctgcagcaactcttcagctggtgacactaaccaccgcagatttagaagcagtggaagcacgagtgattcatggaaggaagtttccgaagagggtcgtctggctttccatgcgctgttcagtagagaaaagcttccgcaaagcttttctcccccacaagcagaaggctcgaaggaagttggcaaggaggaggaagatgaagtcaccacagtggcagttgacctcaacaagagtaccacaagcattgatcatgacctcgacacaattggtgagccaagggcttcctttcccaatgaactgtcgcccctgaagctgaaattgcgccgaacaggcttcaaaccatacaagagatgttctgtggaagcgaaggagaatagggtgccggctagcgacgaggttggtaccaagaggattcgtcttgatagtgaagcatcaacatgagcgatttctacatggttaccgctcggacttcctctgccgccatgaagtttatgacaaagttgtatttacatctaaactagtataggacttaaagaccttgcaatgcaatgcttcatgaaactgttgtgtgctgtattttagtacttgtgaagcagcccggtagactgcttttaaacctttatctcgtagactctgatttaagcatcaagcaactattgaactttatatttttggcgggaaggaaaataattattttttgatttattttgcagggtca

SEQ ID NO: 100057 - DNA, 2422 bp, Zea Mays
atgccggctaggggagaggggaggccggcgaaggagagggtagaccaggtggtcggggtcggcacccggggcgacaacacgtggatcctggcgtgggtgcccagcgacgatggccaccagggtgagttggaaaaggaagctattaacaatggtacttctccggggcaagcccatgacattgacataccgccaccacggcctaaaagaaaggctaacagtccatatcctcgaaaaagtggtctcagctctgagacaccaaccaaagaacttccaagtgacaagtcaacaaaaccaaatatgcccttgagcaatgagaatgtactaatggcaggtgatgcatctcttcagaaatttcaaaggaaggagttgtctggaaaagaaagttgctcggaagttcttaatctcttccgtgatgccccatctccatcattttcttcagttaacaaaagctcttcaaatcatggtgcaccgattgaggcaagtaaaacaaaaatccgagatatgaccattatggaaaatagttctcttaaccccaacatgcaagaggatgtaaaggaaatcaatgatcaggagatggaaaggcttaatggtacccaaatcagctctaaatgtgaacactctcatgagggatatttggacatctcaatgcaacaaatgaagctaaagccagagtctgtggagacaacatatgtggacaaacaaaccgcaagagcttcacactccctagcggagagaactgggacaactagcattccggtcactgcaactgaagaaactcattctgttctaacaagtgatcaagtgggaatcaatggaagcatgaacccatccatccatccaatgtttcctgcagatccaaaatttgatagcagtgccacaccacagccttttcctcataattatgctgcctttgctccaatgatgcagtgcaactgcaaccaagatacccacagatcattggtcaacatgtcatccaccttctccagcatgcttgtttccacgttgttgtcaaaccctgccatccatgcagctgccaggctcgcagcatcatactggccagcagctgaaggtaacactccgattgatccgaatcaagaaaatcttgcagatggtgttcaaggaaggagcatagggtctcctccaagcatggcttctattgtagcagctacagttgctgcagcatctgcatggtgggcaacacaaggtcttctccctttcttcgccccacccatggctttttcatttgtgccagctcccagtgctgccttccccacagttgatgttccacgaccttcagagaaagatagagattgcccagctgaaaatgcacagaaggaatgccaagaagctcgaaaacagggacagtttgaaggtttcagagttgccgcttcttcagagtatgatgggagtggaaaaggcgaggtgtctgtccacacagagttaaagatatctcctgtccagaatgctgatgccacgtctgccgcaggagctgacacgactgatgcattcatgaataagaaaaagcaggaccgctcttcatgcggttctaacacaccttcaagtagtgatgtagatgtggacaatgtccctgagaaagagggcaatggtaatgagaaggcgaagcaagcctcctgcagcaactcttcagctggtgacactaaccaccgcagatttagaagcagtggaagcacgagtgattcatggaaggaagtttccgaagaggttgtaatctaccaacactatgccaattcactctgcccaaacctttgagcatgccgcactgcctttctaattcactttttttgttggcagggtcgtctggctttccatgcgctgttcagtagagaaaagcttccgcaaagcttttctcccccacaagcagaaggctcgaaggaagttggcaaggaggaggaagatgaagtcaccacagtggcagttgacctcaacaagagtaccacaagcattgatcatgacctcgacacaattggtgagccaagggcttcctttcccaatgaactgtcgcccctgaagctgaaattgcgccgaacaggcttcaaaccatacaagagatgttctgtggaagcgaaggagaatagggtgccggctagcgacgaggttggtaccaagaggattcgtcttgatagtgaagcatcaacatgagcgatttctacatggttaccgctcggacttcctctgccgccatgaagtttatgacaaagttgtatttacatctaaactagtataggacttaaagaccttgcaatgcaatgcttcatgaaactgttgtgtgctgtattttagtacttgtgaagcagcccggtagactgcttttaaacctttatctcgtagactctgatttaagcatcaagcaactattgaactttatatttttggcgggaaggaaaataattattttttgatt

SEQ ID NO: 100058 - DNA, 107 bp, Zea Mays
gtttcgccgtatttttctaggagagcaattatttggtcaatctagaattcgtaaggccttaggccgcaacattgagagcctaaaaggttaaaacaccactttgatac

SEQ ID NO: 100059 - DNA, 459 bp, Zea Mays
gcagagtaaggacaattggatcaatttaagtagaggtctaggaggagctatgaggtactacttccgtcaggtccagcgtttggttggagatatggaaggaggagctctcttgtttatagatgacctcaactccaagtgacaaagtgaacagctgttgaacttcccgtctatttctgtttctttttgctggatttggagatggaggtgaattcctctggtgaggaaacggtgataaaggtaaggaagccatacacaataaccaagcagcgggagcggtggacagaggctgagcacaaacggttccttgaagccttgaaactttatggcagagcatggcagcgcatagaagagcatgttgggacaaagacggccgtgcagatcagaagtcacgctcaaaagttcttcaccaaggttctttctctatctgattggctagtgctcttgtttggttcagtctag

SEQ ID NO: 100060 - DNA, 293 bp, Zea Mays
aggggttggggacacatatttatagccctaggggctgcactaccacaccttctcacacacactatacaacaggattgtcctctagatgctaaagagactacagaggacagtcaaaagcgactgctgtcctctagatgctaaagcgactacagaggacagtcaaaaagcgactgctgtcctctagatgctaaagagactacagaggacagtcaagctgtcctctagatgctaaaggactacagaggacagtcaaaagcaggctgtcctctagatgctcaagacttattccatca

SEQ ID NO: 100061 - DNA, 453 bp, Zea Mays
gatttctcgcggcgctcgccgcgagagcgacccccacaggtcgccgcccctccgcggcccgcgcagcgcacagcatacagtcagcacacgcagcagctgccaccacagcgaacagcaaagcacctccgactcggagtcgcggcgagagccgagaaccttctcattcatcttcctcttctatccatcctgcctgcctgcttgcctccgtattccagctagatctccgggcagccgattgaccgagaagtttgtggttgtggcggcggcggagagggaaacggggagcgggagggcggcgcggatgccactgctgcgccggcgccggcggggccggtgatgcccgccgtggcggtcgcttgaggccgccgtgcgtgggaggtggacgggggagcgaggcggtgcggaccgaggttgcgttgggttggattcgattgggctgcgtctgctgaggta

SEQ ID NO: 100062 - DNA, 603 bp, Zea Mays
gaattacagaaacctagcacccgaacacaccacgtccaaacataggagcaagtgagcaaccaaccattggaggcacttaattagcttgtggtgctcatagctaggaatcatacatgggcagtagtagagctctgttcttggcgaccgtcatggccgtggccatggccatggtcttctcaccctactaccttgccgtgcaagggctaaaagtaaactgtttcgacttgcatggagggaaatgcgacaaagagacgtgcaccatggtttgcaaggcgaccgggtacgtcgaccctgtcgtgaaatgctccaacccccctgggaaaagcggccagtgctgttgctttgtgaagtgctgcgggggagatgcttcggttccaagcctgctgtgagactcgtacgtattggtagctagctatatacgctgcttgcgtgatctgaataaatggttgatctgaataaatggttcctaataaatctttgactattgtttcttctcgttaattatatatgtacagaacgtcagcaaattttgtaatgctattgaagttcatatacgaatcttgtcgaagtcattccacatatcagatgtggaagctctatttc

SEQ ID NO: 100063 - DNA, 523 bp, Zea Mays
tgtttgcttaggccacctacctctatatataaacatggccatacgttgagcagtcaaacaacatcaatctcgcatccatggcgcttctcaagagtcaagataatagggctctcttcttgttggcgatggtggtcgtggccatggccatcgtgttggcaccctgccctgcgcacggaggagacgatgagaggtgcacgcatatgccggggtgcaacatcagccgttgccggagccagtgcaagcagtgggggtacgccaaccctgtgataaactgctggaacacgccaccgaacacggagttggacacatgctgctgcttcagtaacgctgcaagaaaattggcttgatttttagcgctagctgtcaactccatgtgtgctggagcttgttgactgatcgcgatccaaatgtatcagaataaaatttgaatggaaatccttgttttaaagttccgaatataattgcctcgagctctgtctaaagggtggcatcctcaaataatggtatgacgtgttattattac

SEQ ID NO: 100064 - DNA, 360 bp, Zea Mays
tggcgcttctcaagagtaatgacactagggctctcttcctgatggccatcgtggtcatggccatggccatcgtgttgacaccctgccctgtgcacggacgaaatgatgagaggtgcacgcatatgccggggtgcactatcagccgttgcctcagccagtgcaagcagtgggggtatgccaaccctgtgataaactgctggaacacaccaccgaatacagttttggacacatgctgctgctttagtaatgctgctagaaaattggcttgattttatcactgacagctctagctgttggatcttgactgaacaatccaaatatatcaaaataatttgaatggaaatccttgttttaaagttc

SEQ ID NO: 100065 - DNA, 689 bp, Zea Mays
cttcccttacgcacggagatttctttgaccgcatgggcgacggagatttatttgaccgcatggacgacgaaagggacggcaccggctcggcgccgccacggccgctggccgcaggccaggggaggacaccacgcggggtgggggcggtggctggctcggggtcgggcatgccgcgtatggggcatgaggcggagactcggtgcgcaggctagagagtcggcatggccaaggggagagagggtgcagcacaccgaggaagaagagggaggagagagaggtaaacagcgagaggggctagacggagctcacctcggcacggacgacgacgaggtggaactgggtgggcgccgggcgtgggagtccaacggcaaacagcatcgtgcgtgtcgttgtctcctccatgcagcgacgacggcacgacaacctccatgcagcgacgacggcatggcaacctccacgcagagacgatggcacggcaacgagcattgtatggctgttgtgcaggaagtggatgggtaagagaatggatgtccgggctgcagtttctacgagcttctcgcgagatcgtggggaaggttgttgttgtagatgccgtggcgagagaagcagttgccgaggggagaagatagagagtttgtggctgactgacgggcggggcccatggagcagaacgcacccgtgcctgataa

SEQ ID NO: 100066 - DNA, 306 bp, Zea Mays
atggccatgagggatggggaggcacacgcgaggggcttcgccggaaggagaggaactgttcggcaggggcagagaaggctgctcgccgaggaagaagaccgacgtccagcgatggttggctcacggaagggaacgggcggtcgcgctgttggagaaggtagccaggggcgcgcctgggctaggggatttcatcgaggcatgggggtgagcaggggggtgagccgtaggaccaagatcggcgggggggctggccaaccacgccagaccgccgtgcaggcaccatggccgttggtcggccgagcatag

SEQ ID NO: 100067 - DNA, 1426 bp, Zea Mays
gtcggagaaatgacttggctcaccacaacatgctccgactcgatttcaacaagaacgaagacggccaccagttcgagcataccatcgaacacctaaggagcgttgaacttaaccttcttctccacctaattctccaaggattttactccatatcgcacacatcaacacacataaaacctcacatcagcagggtattaataagaactagtaaaacaacaaaggaatttagaaatcaccatgggagcagcagaggtggtcggccatgggaacaagggaggggctgggggcatccacttgctgcagaaaaggggagggcactgcttgctgcgatattctgtcgaacacgtcgagggcgcgacacgatggggtttcatggttgttgctgctataccgtgaccgggcttgaagataatctagtgcaggagcaaccggcaatggcgaggtggaggtccggccatcaggggcgccagccatggagggagtcccctgcgctgaaccagagaggaggggtcgcccggcttggaggagcagagagtgccatggtttggggcgtcagcttggagaggggtagcgagcagcatcggcttggagagctagagccagggagggacaagggcagctgctgttccacagctgtaaccagagaaggagacgccagggggaggagcagagggcgcggccatgggcgactaggggaatggagtgcgccataggagggagaaatggatggagcggggagcaggacggatgccgcggccagaggaagtcgaggtcgacggcgtccatggctggggcaggggcgagcgccagagaataggaacggcgagcagggagggcggtcggtgctgttgccagcagcaggaagcgccgccatggaaagcaagggcggcagctagaggatgagaacaagcgtcggcttgtgcaggtgatgaggacgtacgggaggttccagaaattgagtacgtggaagaattccggaaatttctgggcatgaggtggatgagatcggcaccacgaatggtggcttcacgaaggggataagtcagagggtttaggcggtggaagggagaaaagaaattcagattttttttttattttctccaatttttgttacaaaagactacacagataatttagttcacagattaggtctgcgcgagatgtaaccgaacgaaacaaaagataccagtcaaactagtacagactgcgcttgatttaatttagagcagataatttactggacgaataaatttcaattataaatcctcaaacgcgatttctcagtagacgagggagacgaaattattttgcaccaaaaactttagttgtcgagatccgcttaatttacctgggacaagatggtattgtttcattgatttatctgagatcaaataaattcgcacgccaccaaatacttggatttcgc

SEQ ID NO: 100068 - DNA, 804 bp, Zea Mays
ctttctggttatgtgtgttcctcttgctgcatggttattaccccacccccatccatctcgcctgtgcagaaataataaacatcactaaggtgcgttaactattttcttgatactgttgtttctattgttctcaaggtcttggattcaacatagtactagcagtttggaatcacccgacggggatgctttccatgtaataaatatttttggaacgtttcagatttaacttatgttgtttctgttgcaatcaacatggtgtcactatttggattcaccagtaagaatatttgccatttgggcttgttaattagggtgcaattttatataaaacatgcctcgttcacttgctttccagttcttgatttcagatctctgaagccgattacgtacacatttcctaccacgacttttattctgctttcctgttctcaacgtcttggacattgccggcgagcgcggtctcctcggcaacttctactgctaactcgggtgcaagatgcccagcaaacttcccaatccagctgccggcaaggagatgaggttcgcgacggcgacaattttccactacacaaccggattcttcagcagcatatggatccgttgaagcgtcgtgtgacaatgccaccaaagagcagcaacaaacaagctcaaagtctccgctaaccactaatctcataaagcttgaattttctcattgctatgtttccttctcctagcaaagttaagatgtttgcacatttctagcttattaggtccttgtgtggaatgtgtttgaacaatgatctcatttaaacaatatcaaca

SEQ ID NO: 100069 - DNA, 670 bp, Zea Mays
agcgctgtttgaggtgcgtggtcaagtcgaggcgaagatgagcaaggaggatgtgctcaaggtgcaggtgagttcgctccactcttcttcttcttgccgatcgacccaaccaccgcactccacctacacaggcacatgttcattgtttttgctgatttcaacatagtactgctcagtggcagatccaggatgagatgcaaggaggggctactagcctactaaaataaagctaaaaatatttagatataactaaatgatctaattaatatagaccaaataagtatgaaaataactaataagttgtgttaaaaagtacaatactcaaaacatacccctaatgagttgtgttaaaagtatctttgttccggttcttgatgagaaatttatccattctatccctataaactaaaaaataattttatcaattaacctagcaaataattgaccaatccaaaataccaaagtataaaacctaatctcttggtgaaaggcaatctatgtttagcaagttaagaattatatagagtaaagtctagattctagagggaagataaatgacgtcgattgaaaataaaaagggcaaggcacagtcttgaaatgacactacacactacaccgatcctccagcccttgccacgctttttcttttgtatctcgtgggtcatggctt

SEQ ID NO: 100070 - DNA, 148 bp, Zea Mays
ttatttataaaatattatcttttaaatttattacaaattttaaaatatgtaaatatatatactaacatttatctattagtcaaaaaagaaaagaaggaaaacgtttagggaatttgaaaaagaaaaaaaacaaaacgcaaacacactc

SEQ ID NO: 100071 - DNA, 1105 bp, Zea Mays
cgagaaacaagggagggtcgcaatgctttcctagacaatcttaatgatagagagaaacagatcaaagccattgaagaatccttcagagcagccaagtcaaggcctgttcaccagactaaacgtggcatgcaagctgagtgggttatgcctttgctacctgattttgataggtacgaggagccgtttgttatggtgaattttgatggcgatccaactgctgattctgagcagtacaacaaacttgagagacctgtacgtgatgaatgtgaatcccgggctgtgatgaaaagttttagtgtcagtggttcagacccttcaaaacaggagaagtttttggcatacatggccccagcaccccatgagctcgccagagacttggatgatgaaaacgatgatatccagtattcctggctaagagaatatcactgggaagtgagaggagatgataaagatgatcctacaacataccttgtcacatttgataaggaggagggtgcaaaatatttgcctctccctactaagctagttttgcagaagaagaaggcgaaggaggggaggtctggggatgaaattgagcattttccagtaccttcccttattactgtgaacaaaacaggtcatgttggtaccatggagcgcggagaatcttctggcatgcatgtgaattcaaagccacggagacctcatgttgatgatgatcttgatgagcattcaaagcgttctagggtagaagatattgaccaatatagtggagaagaatattctgagtgatgaactgtaaatcataattatcttgcaccaacgaattttatcagtacatgtgaagccttaaaaggtttcaagcaataggcacaagtggtttcatggtgcatggtcatgcagtgaaagaaaatgtctgacaacaagaggacattggggcttggccaatttgttgatctctgtagtgataatagaaagcgtcacattgttctaaagaagttgtcttcaaagtcttggatgatgcgtatattgcagttgctccacatgttccaggatagtgaaattttattcatggttgcctgataaagtgtggaattatataaattttcagcataaattgttttat

SEQ ID NO: 100072 - DNA, 895 bp, Zea Mays
ccgacgtcagatctaggtcactaggcctatcagccatcctataaaagctcccctccatctctcctcctcactcccttctccgccgccacgctagagaggaagagcgcgcggagagcgagagcccgggagaaacagcggccggcggcaaaatggtgcagcggctcacctaccggaagcgccacagctacgccacaaaatccaatcagacccgcgtggtcaagacccctggtgggaggcttgtgtaccagtacaccaagaagcgcgcgagcggaccgaaatgcccggtcaccgggaagaagatccaaggaattccacacctgagacctgctgagtacaagaggtccaggttggcaaggaaccgcaggactgtgaaccgtccatatggtggtgttctgtctggtaccgcagtgagagagaggatcatccgtgcctttttggtcgaggagcagaagatcgtgaagaaggttttgaagatccaaaaaaccaaggataaggcctccaagaactaggcgatataggcatcttccacaatgtttaagtcccttagaatttgtttcagcaagaaattttctcgtgggtttggggaatcctgatacttacacaagatatgcgagatgatatggtttaaattttgaacggaagttgcggatccttttattttttaaaatctcggtgcaatgtttatcactcgtctatgtggatgtcagatatttttgttaatgttgtttgcccatttgctccaattttcgccttaaaaacaacctcatcgtacgtaatctttaaactacttggaggatgtgtattgctatggtttctatatagactttgttttaataaaatttaaaaaatatgactgttggtgaggtgacagtaaatatggagaaaaaataacaaa

SEQ ID NO: 100073 - DNA, 713 bp, Zea Mays
ccgacgtcagatctaggtcactaggcctatcagccatcctataaaagctcccctccatctctcctcctcactcccttctccgccgccacgctagagaggaagagcgcgcggagagcgagagcccgggagaaacagcggccggcggcaaaatggtgcagcggctcacctaccggaagcgccacagctacgccacaaaatccaatcagacccgcgtggtcaagacccctggtgggaggcttgtgtaccagtacaccaagaagcgcgcgagcggaccgaaatgcccggtcaccgggaagaagatccaaggaattccacacctgagacctgctgagtacaagaggtccaggttggcaaggaaccgcaggactgtgaaccgtccatatggtggtgttctgtctggtaccgcagtgagagagaggtgaccattctttcgcaactcatgcccgtccattgaaatgattaatggtgatactaagtcacctgcatgtctcaggatcatccgtgcctttttggtcgaggagcagaagatcgtgaagaaggttttgaagatccaaaaaaccaaggataaggcctccaagaactaggcgatataggcatcttccacaatgtttaagtcccttagaatttgtttcagcaagaaattttctcgtgggtttggggaatcctgatacttacacaagatatgcgagatgatatggtttaaattttgaacg

SEQ ID NO: 100074 - DNA, 2046 bp, Zea Mays
ccaatccgatccggcgaagatcggccgcccgtccgacccggcgaagatcggccgctgctccgggagcacccccaccccaccaggtggtaggtaatcgttgctggttccagaagcgtccctgcagccggcgctagctgcacggcggtgacctttctcagcgaaacttgtgtcctcatggctcagtctcaacagatggcgagcaagaaacctcctggccttaggctattcggaggtgccggttcgctgagaacctaccagacgctagtcctggtcctcacattcttcgcatacgcatgcttccacatgactcggaagatcacgagcatcgtcaagagcgcgctggacccccagacgaagatggggttctcccactggggacggctgcacctgcacacgagcgaggctccggctcttaacactggctggctgccgttcaacaccgctgacggctcagcgttgctcggcgagatagacgtcgcgttcctcgctgcgtattccatcgggatgttcttcgccggacacatcggggaccgcatagatctaaggatctttctgacgatcggcatggtcgggactgccgtgttcacggctctcttcggcgctggatactggctgaacgtccacagcttctactatttcctggtcgttcagatggtttccggcctgtttcagtcggttgggtggccgtcggttgtcgcggttgtcggtaactggttcgggaagagcaagagggggctgatcatgggcgtatggaacgcgcacacttctatcgggaacatagctggctcgctgcttgccgccttcctcctcgagttcgggtggggctggtcgttcgccgtccctagccttgtcatggctcttgttgggttggtggtgtatgtttccttgccggttagccctgaggtgatggagatagacattgctggcagtggtgaattgaactgtgagaaggacactggcactgtgaaggagccccttttggaaccaggccaacaagttaagcataaggcagtggggttcttggaggcatggaggattcctggagttgcgccattcgctctttgcctcttcttctctaaattggttgcatataccttcctgtactggctacccttctacatcagccatacacgcatcggtggcgtgtacctctccgatgcaatggccggcagcttatcgacgatcttcgacgtcggtggcgtgttgggaggagtcctcgccggccacatctccgaccgtctaaacgcgcgggcgatcacagctgccagcttcatgtactgcgcgatacccgccctcttcctgtaccgcgcgtacgggagcacgtcgatggcgtggaacgtctgcctcatgttcgtcaccggaatgttcgtgaacgggccgtacgccctgatcacgactgcggtgtcggccgacctcggcacccacagctccttgaacggcaactcccgggcgctggccaccgtgacggccataatcgacgggacggggtctattggagctgccattggaccgctgctgacagggtacatctcgtccaagagctggagcgctgtgttcaccatgctgatggcggcggctctccttgccgggctcctcttgaccaagcttgtgtgcgccgagctgcaagggaaaacacctaccagtgcgagcaaggacgttgctgatgcgcaaggtacttattactcggatgaagtgtaaatccaaagctggttgcgctgaatgcctatctaagatagtggccggttgctgcttccactgtctttcatgatggctaccagtctgaagactcaggagggaaacagatttggctgctgagtgacttgctcaaatgccagttcagatgattttgcgtgtgtgtgttggtatagagacaatagaagatagaggtgtgtgcttggattagttttcagattttacttactagataggggtgaaaacacctcaaaagctctagagcccaaatacaggcacattttaggcaccttgtaaatatgtttgttgggcaataaactcgggcttgcactggctgcattgccagttacgtaa

SEQ ID NO: 100075 - DNA, 441 bp, Zea Mays
atggcaagcagagcaggtggcgatggcaaggaagccataaacgagcaggtaatcgccaacacctacgccaacatgcgcaccgaaatgaaccagctctacacaaagatcacggagctggagatggaggtcagcgagcactccctcgtgatgggcgcgatcgagccgctggacccctcgaggcgatgctacaggatgatcggcggcgtcctagtggagaggaccatcagggaggtcatgcctgccgtgaagcgcaacaaggagggcctggaagaggtgattgcccgcatgcacgaggcgctggagaggaagaagaaggagataaccgagtttgagctcaagtacaagatcaggatccggaaggctgatagcgacgctgaggatgaaggcggcaagaaggaaggcactgcgcagggagtccttgttggtcctgccggacagtaa

SEQ ID NO: 100076 - DNA, 1802 bp, Zea Mays
cctcatcagtggtcctttcgataatggaggtaccagcaccaccagcatgggcgtcccccctcgcgacgacgacgacgatcctgctggtcacggccgccctcgtcctcgtgacgacgaccgtcctccgccggcgtgcccaccgccaccggaaacgacaacgacaagcgccgccgggccctcggccctggccggtgatcggcaacctgaacctgctaggcgcgctgccgcaccgctccatccacgagctctcggcgcggtacggcccgctcatgtcgctccgcttcggctccttccccgtcgtcgtgggctcctccgtcgaggtggccgaggtcgtcctcaggacccaggacctggcgtacctcgaccggccccgcatggcctgcggcaagtacaccgtgtacaactactccggcatgctgtggtcgcactacgggccctactggcgtcagctccgcaagttgtgggtcacggagctgctcagcgcgcgccagctccgcctcacggagcgcgtccgcgcgaggagttcgcgcatgctgcgcgacctgcacccgcacccggtcacagtaccacagcacgcgggtggtgctcagaacgctggtcattacgtgggcgaggacgacgccggcgggccgggcgccgcggccacgcccgaggagttcaggtggatgatcgaggagatcttcttcctcaacggcgcgctgcacgtgggcgacatggtgccgtggctcggctggctcgacgcgcacgggtacgtgggcaggatgaagcggctggcggggaagttcgaccggttcatcgagcacgtgctgcgcgagcacggcgagcggcggcggcgggagggcgccgcgttcgtgcccggggacatggtcgacctgctgctgcagctcgccgacgacggcgacggcggcccggggggcctcctcgaggtgccgctcgaccgcgacggcgtcaaggcgtccgtgctggagctcgtcaccggtggcacggacacgtcgtcggtgacggtggagtgggccatgtcggaggtgctgcgggagccccgcgtcctgtgtaaggtcaccgaggagctggaccgcgtggtgggccgcgaccgcctggtcggcgagggcgacatccccggcctgccgtacctggacgccgtcgtcaaggagtccatgcggctgcaccccgtggtgccgctcctgatcccgcgggtggcccgcgagcacacgacggtggccgggtacgacgtccccgcgggcacgcgcgtgctcgtcaacgtctgggccatcggccgtgatcccaacgtgtgggggcccgacgccggggagttccggccggagcggttcctggacgggagcaagcgtagcaaggtggacgtcaggggccaggacctggagctgctgccgttcggcgccggccgccggatgtgccccgcccacggccttgggctcaggatggtccagctcgtgctagccaacctgctgcacggctacgtgtggaggctccccggcggcatggcgccggaggagctgagcatggaggagaagtttgggatatccgtgtctcgcatgcaccagctcaaggctatccctgacccaaggcttccgcatcacgtctacttcgggccgtgatgctgcataatatccgtgtatgtggtggttggtaacgaagaagagtacgtatagaagccaaccaacgaaataatctttgatgttgatgtatccgtctcagtttattcatggcgtgtgagttgaactgatttaagtataaaattcaaagtgtattctacatcaaacttttataactataaagctcgtact

SEQ ID NO: 100077 - DNA, 226 bp, Zea Mays
gatccgtaggttccagaggcaatgagccttgcagccagtttgcaatataaaaaagctcaattatgtctgctgctggttcgacgcagcgtgtgccgaggatttctactgccgagcataagaaagtatttgaaatcaagaacttgcattatttcaatcataatgtgttttctatcaagcataaacgtgtgtgttttgtttgatatttgctttcttcctctccagatta

SEQ ID NO: 100078 - DNA, 222 bp, Zea Mays
gtaatgattatttgtgtatacattgcagcagagtccagagacacttatctagctatcaaggtgtcgtattcctcacatctcatgtctgcctgtgtctacttgtatgcctcttttcaattgtttaccgagtatttgtggtcctctgtttgttgccatttgctaaaaattgaaaattttctttctgttatctttgttctttaatactattgccatttatttatc

SEQ ID NO: 100079 - DNA, 117 bp, Zea Mays
ctcctctaagaaacaagttattactttttatactacatactctcgtaagatggtaacgaattatgatccaaatattttttcttcacaatcattcgagcctttagctaatttaagttt

SEQ ID NO: 100080 - DNA, 328 bp, Zea Mays
gcatcaggttcgatcaactgctctgcaatcaagaagttaaggaatacagcatgcagtcagtcattcaggtcggcaccgtgcacgttgccatcggcgtgtcgtggcgcaccaggaagagcgctgcggcggccgcgccggcgagaaaccctagcagcaggtacccggacctcgccgcggcgagccttatcgttgaggatgggccgtccacgactcttcctccaccgccgcagtgacgctgctgcccacctccgtcacggcggaggcgctctggacgctgtcgtcgatcgctgcgtcctccattgacctcgtacgtaaattttttgacagt

SEQ ID NO: 100081 - DNA, 1620 bp, Zea Mays
gcaagttccttgaaaacaaccaaacttaagaaagaatgcatttgattttaacgaaggtttagcataaggatttgaccaacctaatattgtattatatcgtttcacagctgaatctgatccataagcaattgaaggctgcacagtgatgcaactgcatgttccgacctgtacctgaacatttggcagccagctgcgcacggtgtaaagccaccacgtcacggatccatccagctcagctgctgcatagtccagtttgccaccaaccaaagggtagaaccgtcatttcgtacggtagttcatcaagggaaatgaccccatgccttaaacacatttctgctgcaaccttctttttttttatgcccggcactgcagcgaggcaggagggcgaccggaatttcccatctctccttctcatcattcctttcgggatttcccctcctggttcccatcgatcagagggcccggcgctgttgcctttcgcattcgattcctttcgggtcggatttgtggcggagctcttgatttgctccgtccctgccagaggaggagggcttgctggatcagggatcgagcaaggaagcagccatgagcggcggcggaagcgtgagtttcctcgagatccagccgtcggagctcgcattcccctttgagataatgaggcagagctcgtgttccatgcaactgaccaataagactgaccattatgtagcattcaaggtcaaaacaaccaacccaaagcagtactgtgtgcgtcctaatattggtgttgtattacctggctcaacttgcaatgttacagtgacaatgcaagcacagaaggcttcaccacctgacatgcagtgcaaggacaagttcctagttcaaagcgttgtggccgagaatggtgtgacagctcaagatattaatgcagcaatgttcaataaggagccagggaaagttgtcgatgaattcaagctgcgtgtggtttatgtgccaacaactatgcccaacccaatccctgaagaatctgaactagggagttccactccctcattttcacaagaaaacgggatcgatcattccatgacgccactatctgtatctagatcgtctgctgaaacagcaaaggagaagccctctgaggcaacttctgtgatctccaagctaactgaggagaaaatgtctgctgttcagcagaaccagaaattacgccaagagctggagcttctacggaaagagagcagcaaaaccggcggcggtttctccatcaccttcttgtttgtcgtgggcctcctgggcatcgtcgttggctacatcctcaagagaacatagtggaacggtgtctccagcagatctctactactcccattaaaggacacccacccaccccacaggtggggtggtatgcctctctctccccatgtgttttcgctcctaatcggagcgccctgttctaacgtgtaacaacagcagcactcctagaggctagaggccttcggtttgtgtacatcattatggtggtccatacttattttttttcttccagaattcatttcggagttggtagacttgttttaacgggaatgtttgaactgttgccagtctgatgaatttgccagatattttgcatcgtttcacctg

SEQ ID NO: 100082 - DNA, 843 bp, Zea Mays
caatttaaagtattttgtaacaaacaaatataattggaagcagaattgagagggcagaattgaaaaacatctatcctaagtattgagagggcagaattgaaaaacaagctcatggattcagaaactaccacgacatatcttaccaacacgcagaaagaattagaagcagctcttgtggagaaagagagccatatcaaccaaatgaaagagaacacaattgcttcaaacccagatcagacgacaactataaaggaactcctgcagcagaaagaagctgagcctgatcttgacaaatccgaaaattccagtgatcccattcctgctacagtagaagataattccgacaatactacaatatcagagagcagccacaatgatgagagcattgtagtgggagcaaacaccgaaaatgcaacttctgaaacagtggtagacaaatatgaaaactccaacgattccatgcctgctccagaaaaaaattcaagcaacactaatgcatcagatagcagccaccggaatgagaacattatagtggaagcaaaagaagataatgcaacttctgaccttgtggtactcgacaaatctgaaagcaccaatggttttgtacctgttactacagaagaataaaattccacaacaccactgcatgggagagcaaccaacaagataacagttcctaacaagaacagttcttaacgttaacaaccaacatagaagatgtccagtttcaacagaacaaaggtgatgccaatgagcaaccagatgatgcttcatagggaagccattcagatagatttgagcttcagcggggaaccaaaaactgataggcaaccaggaagaatg

SEQ ID NO: 100083 - DNA, 988 bp, Zea Mays
tacaactccggctcactgtcgctagtcacggaacggaactcatcccgctgtgcgcttcgtttcgtggcggcgaacggccggtcgagcgccgccgcccttggctgggtcttcactcagtccttcgccggcgacgagcgtccacctggtgtctactgaactgagcagacagtagcaagagccactatgctgttcttctcctacttcaaggagctcgtggggaaggaggtgacggtggaactcaagaatgacctggcgatccgcgggacgctccactcggtagaccagtacctcaacatcaagctggaaaacacccgcgttgtcgaccaggacaagtatccccacatgctgtcagtgcggaactgcttcatccggggctcggtggtgcggtacgtgctgctcccgcaggacggcgtggacgtggacatcctgcacgacgccaccaggagggaggcgcgcggaggctgatcggcatcggcatcggcccccctcacctgtgctgcttctcccccggggaggagattgatctgccttgccctgatctcgtctggttgtacgaaacatatgctgatctgagtggccccaactcccccagcacacacttgatccaccacccacccagctccctgcctggtacttgcatgttccttgctgtgtgtgtgtgtgttcagcacacacttgatccaccacccacccagctccctgcctggtacttgcatgttccttgctgtgtgtgtgtgtgttcagcacacacttgatccaccacccacccagctccctgcctggtacttgcatgttccttgctgtttgtgtgtgtgtctgtcagtcagtaatgctgtttgaccaagagggttagcgtaaccgaacaagccctaacggagtaacggacgctgtagcggttgatgaatcacaagagtcccaatgtaagcggggttgaatcacaagaatcccaagggatgtcaatggcgaattacccgtcaggggatggctc

SEQ ID NO: 100084 - DNA, 754 bp, Zea Mays
tgaattattattgtagccatatggatatttatagtgtcattgatgctgtgctatacataaatatatccttgttacctagtcaacaaacactactatcttcaacaacagtcatatgtacttcggttcaagatctttggttagtaattaaattctactgataggtttgacatgataatccttgcagtcttgttgattgctagtacaaatttttgctcattgatatgaatgtataacactagagctcatttgcatgtatgcagtacaatgttcattggtttgttcttaattgttaagatacattatagtctgatagagcatacaaggtataatatatgtgggcatttctatgataaggtggtccataattgtgcttttggtccatatatagcatgtcatttgagtacacttaactattctgctatttttagttcgtatattatctgcattgatattactgtgttgctgatgcataaacgtgtccttgtgaaaccttcatatctctagagcaagcgcacctcaaattgtggagaagaccttccaactttcccgagcagaaagagaaacagtccagaggccagaatacgatctccaggtttggtgcattcttgtaaatgacaaagtccagttcaggatgcaatggcctcaatatgcagaattgcaagtgaacggtattcctgtacgagtaatgaccaggcctggttctcagttactagggataaatggacgtgatgatgggccactggtaagtttattc

SEQ ID NO: 100085 - DNA, 1216 bp, Zea Mays
aactgacgtgtgggccgagaaacatgtcgtctcacctcgccgcggccgcttccgcccttcctctccctcttcctccgccggcggtcgccgcgccttcccgcgccctccgagctctaatcctgtcccggggcggcgccgccgccgtatgctccagtctgcgccgcggcggcacgccggcatgcctcgtgcgtcgcctgtgctcccaccactccgccgcggcggcggcgacggcgttggaggaggcgcggcgcgggcggaagcagctcggaatgacgcctgcgctctacgactacctcctcgccaacgtccgcgagcaccccattctccgggagcttcgcgaggagaccgcggctatgagggggagccagatgcaggtttctcccgctcaggctcagctgttgtcaatgcttgtgcaaatccttggggcgcgccgttgcattgaagttggtgtgtttactgggtattcatcattagctgttgcactggcccttcctgaatctggtcacttggttgcttgtgagagggatgacagatgcctagaagttgccaagaagtactaccaacgtgctggtgttgcacataagattgatgtgaaacatgctttggctgcggattctctaagatctcttcttgattgcggcgaagcttccagctatgacttcgcatttgttgatgctgacaagagaatgtatgaggaatattatgaacttctactgaagctagtaagagttggtggtttaattgtaatggacaatgtcctttggtatggaagggttgccgatctactggttgatgaccaaaagacgatcagtataaggaacttcaacaagaaagttttagaggacaagcgtgtcgatatcagcatggtgccaattggagatgggatgacaatttgccggaagctagtagatacttgagttcacaacgtttttgtgtagatgcggaaaacttcttaccaaggtcaagccctgaaaaatcaaactggtatgcattaatcaagtaaaaatgattataggtgatgaacctcttggcattgacaatatctgtactgcaaatgttgctagtggcctgggctctactaaccacagtggtggggaagcagttggtggcagtaattttgattcgctgcttagaacgctgagatgagtgtggcgtgtcttgcacacagtataacttgaattcaagtacaaaaccagtgttatggtgttttgttgat

SEQ ID NO: 100086 - DNA, 180 bp, Zea Mays
gttcatttctgtttcttgttttcatttcaaatttgaaatttcaaactcgaatttgagttgtggtttccacttcaagtatgcacaacccaaaaattcataatggatgcatagaaaggtatcgttttattattatcttattattttatacctttaagtaaaggcaacgactgctatgcaaac

SEQ ID NO: 100087 - DNA, 693 bp, Zea Mays
atggcctcaatccttctcccctacgtcccatacaccaggcatttcccccaggcagcggcggcggcaccagcacggcggaggccatcgccggtcgtttccaacccgagatcccgagcgcagtatttcaatccgaagggcaatacacgaaaagggacgacagctaatcgcatggggaacttctcacctgcgaatgtgttgtggagtagccagtccgcggagcaaggaggcatcacggtggagcaccaactccggcgtgaaactggtggcgctttggtcgatagcttcgcacggggaggccatgaagaggtgcggagtggtatggatccgtgcacactgaagattctccagaaccacactactaggctatgcaatggtgggggcgtgggtcagcaccatgtggcgtcgcaggtgaagcaccaaggtgatggccatcaccttctctcctggcggcggaaatatcctctgctcacgtgggtgtgggttggcttcggcgtacatggatctggggtgcgggtgcgtctttatacccagacgaatcggccaagggttgaatggagggcgtcaccatcccgattagcacggcggtcgccagattctagtggagttgttgagatctctggcgcagtttgttgcgatctggtgatacgtgctcaaatacgcaggggatccacatggcccaccagtcagccgtag

SEQ ID NO: 100088 - DNA, 2742 bp, Zea Mays
cgagctcgctcctctgcatgctgcgaacgctggagtggttggacgcagcgccagcgggtgtgggtgacatcacgcgcgccctctgcctgcctctccgtctgcggcgaacgcaacaatcccttccgagtgccgactgccgagtctcgagcgccccggccgcgaagtggaagaggctggccggtggccgcgctctgggcccatatcgccagtgagacacgggccaggtgagcggcctcccatttgcgtggcctgcctgcctgcctggctatgaaggcagcggagcgaaacgaaaagacggagggagcagacaaaaccccacctccacttctccgtcagaccatcacatctctgcgagactgcgaccctcccctgcctgcttcttcttcttctccaccgcaagagccgagccgggcctagagggaggacagcgatccatctaacgtctgcttgccggtctgcaatggactgcagctctgacgagtcgtcagagctaagcgagacagatatcgacgactacgccgacaagtcgtactcggacctcaagtccggcaagttcgtggcgaggctgggcagcgacaggttcaggtgcccgttctgtccggggaagaagaagcaggactaccgctacagcgagctgctccagcacgccgtcggggtgggcgcatccaaccgtgccgcgaaggtgaaggcgaaccaccaggccctggcgaaacttctcaaggaggaccacgccgacgcggcggccacactgccagcatggcaggccatcgcgctaagcaacgcgccgaagccggcgcaggaccaggaagcgttcgtttggccctggacgggcgtcctcgcgaacgtcccggccggacaagcccaggagggtggagctacactgatggagcagctagctgagttcaaacccgtgcagatcactgccgtgtgcggtgccgatgggtatgccggctacgtcgttgttctgttcaccaaggattggatcgggttcaagaacgccttggcattccagaactgtttcaagtcacggcgcttgggtaaacaggactggaaggagacgaagggacacgtagagcaagtgtttggatggctagcaaaggaagaggattacagatcggatgacccagtcggtaggttcttgtcagcgaatggtgacctgaagacggtgtctgaactggagcaggagatgtccagcaagactgacaacctcatagatagtctggctcgacagatcaccgctaaaagcaagtacctgcaggaactggagtgcaagtgtaaccaaatgaatctctcccttcagaaagccatggaagagagcgatttgctgcacaaacgttataatgaagaaatgaggaatatgcagtctgctgtccgtgagcatacacggagggtttttcaggagactgaagaactcagaaatcagctggttgagaaagagagcaacatccagaggaggtccagggaactaaatgaactagtcgctcaaactgacatggaaagaagaaaactggaggaagagaggaaaaagaatgctgaccaaaatgattccctcaacatggctagaattgagcaacagagagctgacgaacgggcgctacagcttcttgagaaacataagaaagagaaggaggacgctctcaacagaatcctgcagctagagaggcaggtggacgagaagcagaagctggagctggatatcgagcagcttaaaggcaaactggaggtggtgaaacacatggcgggagaaggcgtggatgtgaagaaacgttctgaggagctgacagcagaactgaacgaaaggatcgaagagatggaagacctggaagctctcaaccaaactcttgttgttaaacataggatgaccaacgatgagattcaagatgccaagaaagagttgatcacgggtttgacagatatgttaggtcctcgtagcaacattgggatcaagaggatgggtgagctggacgagaagcccttcgttctgtcctgcaagcagaggtacggacaagacgccgaaatgaaagccgctgaactcgtctccctgtggcaagagcatctgaaggaccctaattggcatcctttcaagatagtgaccacaggctcaactaaagagcaaatcatcgatgacaaggatgagaagctggcgggcttgaagaagcagctcggcgagaaggtctacgaggccgtggctaccgcgctgctagagatcaacgagtacaacgctagcggcagctacgtggtgtccgagctctggaacaacagggagaaccgcaaggccagcgtaacggaagccatacagcacgtcctgaagcaatggaaggcgcagaggcgtcgaagatgagagaccctgcgcctcactggatcaagtcaagtttgggtgccagctgactatcagtgtcatcatcagcaagtccagacacctattgaagatgatctatccgcggctgtgtttttccttggcgggcgcgtgcttcgttggtttcatttagcacttcctctcttctttttttgggtcggaaatgaaataggatatcgccagcagtcggtagtactggttttaaagtacttacattccccacaagaactgcgaaaatgagactggtgatgcgccatttggccccccgcaacagatttttgtagacagtggttgctgctagcattttgcgctcttctttgaagagctaaaactatctccctgaagcaatttgtgcaatgaatgaactggtgtctgatgatgtagca

SEQ ID NO: 100089 - DNA, 3916 bp, Zea Mays
atggccatgaggcccatgagctactatgaagaccactcgatgtcatcatctcatgccgatgacacggatgaaaggaagagcacggtttcagcctcccccgaggctagcgccgacgaggagtcgttctcattctttgggctgctttactacgccgacacggtagattggctcctcatggccctgggaacccttgggtctatcatccacggcatggcattcccggtcgggtatctcctccttggaaaggcgctcgatgccttcggaactaacataaatgatccggagggcatggtccatgcgctctacaaggtggtcccctttgtgtggtacatggcagcagccactcttccagctggaatggttgagatctcctgctggatatactcaagtgagagacagttagcacgcatgcggctcgcgtttctgagatcaatccttaatcaagaggttggggccttcgacactgacttgactactgcaaccatcatcaccggagtaaccaactacatgagtgtcatacaagatgcaataggagagaagctgggtcatttcgtcgcaagcttctccactttctttgctggtgtcataattgcgtttatcagctgctggcaagttgcaatgctttccttcctggtcattccacttatcctcatcatcggagcagcatacacgaaaaagttgaatgtcttatctttgtcacgcaatgctattgtttcagaggcagtatcagttgtagagcagactttgtcacatatcaagaccgtcttctccttcgttggagagagctgggccatgaagtcctttgtccagtgcatggaaagccaatttaatctaagcaagaaggaagcattgataaagggaataggacttggaatgttccaagcagtgactttttgttcatgggcactgatggtttggattggggcagttgcagtaaccaaaaacaaggcaacaggaggtggcacgatagctgctatcatgagcatcctctttggtgcaatatcaattacctatgccgcaccagaccttcagaccttcaatcaggcaaaaactgcaggaaaagaggtcttcaaggtgataaagagaaagccatccataagttatgcaaaaagtggattagtactagacaagattcatggagagatcaaattccgtagggtgcactttgcatatccttcccgccaggataagccaattctccaaggattctcattgtccatccccgcaggcaaagtcatcgctctggtaggaagcagtggctgtggaaagagcactgtcatttcactacttcaaaggttttatgatccaacttcaggtgacatactcattgatggccacagtatcaagaaaattgatctgaaatcgctgcgcagaaacatagcttcagtctctcaggaaccatcactattttctggtaacataaaggacaacttgaagattggtaaaatggatgcaagtgacaaggagataactgaagcagcaagaacagctaatgttcattcattcatatccaaactaccaaatgagtacttgaccgaggtaggagaaaggggtgtgcagttatcgggtggccagaaacaaagaatagctattgcaagggcaatgttgaaggatccaccaatcctacttctggacgaagcaacaagtgcccttgattcagaatcagagaagctagttcaagatgcacttgagagagcaatgcgtggaaggactgttatcttgatagcccacaggatgtccacaattgtaaatgctgacactatagttgtcgtcgaaaatggaagagtagcacacactgggacacatcatgagttgcttgacaaaagcacattctactccaatgaacaaattggcgaagcacacatcaagcagtcctccacaaatcagggaccaaacaaaaagctagaaagactggagtcaaaacaaccaagaaatgagaatgtaaaggaaacaccccctttcttcagactttggtatggattgcgtaaagaggacattatgaagattctagttggctcctcagcagcagccatctctggaatctcgaagcctttgtttggttatttcatcatgacaattggcgtggcatattatgacccgaatgcaaaaaaggaagtcaccaagtattctttgatattcttcacagcagggatggttacaatggtgagtaacatcttgcagcactatatttatggtatcattggagaaagggcaatgaaaaacataagggaggcactcttttcagctgttctccgaaatgagcttggttggtttgagaaaccaaataatggcgtaggatttcttacctcacgcattgtcagtgacacgtcaacagtcaagaccatcatatcagacagaatggcagttattgtgcaatgcatcgcttcaattctgatagcaacaatagtaagcatgaaggtcaattggagaatggctttagtttcatgggcagtcatgccatgccatttcattggtggccttattcaagccaagtcagcaaaaggattttatggtgactctgctattgctcaccgggaacttgtctccctagcttcagaagctgctagcaacatccggactgtggcatcctttgtttatgaagatgaaataatcaagaaagcagaattgtcactgcaagaacccttgaggatcaccaagattgagagcatgaagtatggggtcatccaagggatctcgctctgcctctggaatattgcacatgcagtggccctatggtacaccacagttttggttcagaggaagcaagccaaatttgagaacagcataagatcataccagatattctcactcacagtaccttccatcacagaattatggaccctcattcctatggtcatgtcagccatttcaatactgaatcctgtatttgacacacttgacagagagacacaaatcgtcccggataaaccagaaaacccaggcaaagggtggctcgtcggtagaaccgagtttcaggatgtgagcttcaattatccatctagaccagaggtgaccattctggatggcttcaatctaattatagaacctggccaaagagtagcattggttggccccagtggtgcaggaaaatcctctgtactggctttaatactgagattctacgatcctgctagaggtagattgttaattgacaacaagaacataaaggactacaatctccgatggctcaggaagcagattgggctagttcaacaagaaccaatcctgttcaacacatccatcagagataacattagctatggaagtgaaagcccttcagagactgaaatcatccaggctgcaatggaggcaaacattcacgaattcatcagtggtctaccagaagggtatggcactgttgttggagacaaagggagccagctttcaggagggcagaaacagagaattgctattgcaagaacaatactgaagaggcctgccattctgcttcttgatgaggcaaccagcgcacttgatggtgaatctgagagggtggttatgagctctttagggaccaaggtgtggaaggacaaagatgagcaagccagtacgattacaagtatcacagttgcacatagactgtccacagtcataaatgctgatacgatagttgtgatggagaaaggaaaggttgttgaacttggtaatcaccaagagttgatctctgctgaagatggcgtttactcaagattgttccacttgcaaagcaacatgaaagaatgaccatctattcaagttccattatggccaaagaccaaagacacttagcaagaatagctttaggagattaagcattgctcaaatgcacttgctgtcacaagttgtaataacatagctatatcatcatatatcgatgatgcatagtccaccagttagggtaaaaaaataactatatattacttgaatggtatctgtt

SEQ ID NO: 100090 - DNA, 1003 bp, Zea Mays
agacaaataaataaatacacatacacttgaaattttgaacaggccgtttgaacgagtcgtcgtccccggcgtgtttccatccatgggccatggcacccggatattcctagcttataccatgaacgagatatgtatgactcggattacgccatggcaacacgccaacaacacctgagatgtttctgcacgcgccgctggtccggtggccactgagaaaacgaacaagagagccggcagcatatgcctgccgcagcgcgcaaccgtccgagacccgccgtctgacagccgcggagctgcgaagccgaggtggcaactcctgtccccagattctggagaatgaacccattgcggttcccttcctcatcagccaaaacatcaaaccccgtcgaaaaccaccaccaccgagccagatgcggagatcttcagcagcctgcacaagagtattccggtgaagctgttgttagtcactcattcatcgtcagttgagaatgaacgcacgctgcaagagagagccctccccttttggcgcttctctgtttggaagcaaacgcatcagcgaagcgtttccaggccgccagcgccaggcgaagacaagcattcggggctggccgcgatgacattgcgacatggacagccgcgcgtgtcctatgcgcagtctcaagggggcatatgcccgaatcatgctccagttattcctcgacacccgccttggtcttgtaagcgctcttcaacctattgcatgcgtggcgtgcagaccggacctgaccttgtgcgttcctaacatgcacggttgtcgtactaggggcaagaggcgagggatcttttagagtagagtgagattcaagacactgatttaactttcagatcgaatatttcagatgggacttccattctcgtaggagatgtgtggcagtgccaatattaaaaaacttcagaaactgatagtcagaaacagtatatatttatatttttttcatcagaagtaccctagtccctaacttag

SEQ ID NO: 100091 - DNA, 459 bp, Zea Mays
atggagagcagtaaacgtacagccaatcagaagtttctgcggcatggtatgagttacaccgaggtgttgacggagtgccatgtcgtggcatcctttgttgttgatgagttaggcatttgcgacatagaaatgatgggtttcatgatggttgttactgatgtcgaatctagtattggtgtcactatgttgatggtgaaggacgaggtcgatgataattgccttgttgttgtcattattgttgggtgttgcaatcagtctaggcagtatcaggcttatggtggtgttgcaggttccgccggaggtagtgatggtacaagtgtagatgcatctgacgttcaatatggcttgggtgttgatgcggtcgctggtgtagatgtcggcaccgaggagatcagatctgaagacactttagatgcatttgtagaaaaaataggggtgatttgcgagttgtctaactag

SEQ ID NO: 100092 - DNA, 405 bp, Zea Mays
atgggaatgtgtgccgagctccgtgctaacaatgatgccctcccaagagaagaacagtgcaatatatttgcatttctggatgcttttgctatcccaagcaacgagcgtggaattgctgctcgtgacagtggtgcttttgcatgggagattgttctagtgatttcctttctctttgctagaactagaaattatagtatttgctttgtttggtttccttattatgttcaatgttttgtcaaccagattgaagttcctgttgggatagaaaaaacacctgtacttattgagaaagatgaaagcctggataagctaaatttcctcatgcaacacagacatagcaacggggcaagaacagtcgaggggaaggcattgccatcagtgaccaaagaatttatgaaatattaa

SEQ ID NO: 100093 - DNA, 1687 bp, Zea Mays
actcagcacacacatcagatcgccacatctccgacaccaaccctcctccccctctcgccgtcggccccgcccgtcagcctcggccgagtgcgtctgcctcgcactcccgcggcccctatagacagagcagccgctctagagcgggaggaaaggcgagcagaggagacagagatggggaagggaggaggagaagaggacggcgcggcggcggccgcgcgcgcggcggagcaggcgcgggagctgcaggacgcggcggctgcgctgctgacgcagacgcgggcggaggaggaggcgctgcgccgccgcgccgccgcgttgcagggggagctgcggcggctacgcgaggccgccgcggcgcacgcggacagcgacaaggttgaggaggacttggatcgagcagcgtgcctcatcgctgaaggtgacgttgcgtcgctgctcccgagcaagacgcaaggcgcttttctgaaaatgttcttgggaccagtaaatttgcgggcaacaaggaaggaggtgcagctcaaggtgaaggaggagtacaatagctacagggacagaactgccttgctgtttctttgttttccggtgattttgttgtttcttcgacaatggttatggaatggatgttttccagtattgccagttcagctataccaggcttggttattattcctgtataccagtttagctttgcgtgagaacatactgcgagttaatggaagtgatattcgtccttggtggatacttcatcactactgtgccatgctgatgtctcttgtaagtctcacatgggagataaaggggcaacctaattgtgcacgcaagcagagaggcgtggaacttttcctttgctgggccataatgcaaggatttgtcatgatgctgcagaatagatatcagcgtcaaagattatatactaggattgctttggggaaggctaaaagaatggatgttgtatggggagagactgctggtgttgaaggtcaattgttgctgttgtgccctctccttttcctcctgcagggattcgagggttatgttgggtttttacttctgcgcacagctcatactggcgttgtccctgagtggcaggttgtggtatgcgggatcctgctgatcgcgatggcaatcggtaactttgcaaacacagtggacaccctggtaaccaagtcccggttcaaggcgaagatgaagaaatccaagggcagacgggacctcgacacatgcccctcgccaacaggttcatcatcgccgatagattcagcgaccaccaaagcatgaacaaggccaagaggaaaaggtgcccgtgtttaacccgggtgtgttaccactgtaaagcattttagtgtttttttttcttggccgtcagctcgtaatcctgtccgtcgtctgtgtcgaagctcatactcgtgtaatcaatcatcaggcaagtaggctgctgatggttctaggctggaggtggccgagaataaacttgtggtgtttgtttatatacctgtaccctgaatgaacatcgagtgggctagggtggtgggcttaggactatgtaaggcttagcaaaattttccaagtatagttgtgagacaggcaggcatttgtcacaatgaatgaaacatgcgaagttgtatacacgttgtggcaatgtgttgctttgtatgttggttggtgcatgcttacgttgctctgaaat

SEQ ID NO: 100094 - DNA, 529 bp, Zea Mays
gggacagccgtggcgtctccccaccaacgcaatgatgacatcgagatggtagtggaggaggaggccgtcaacgggagcgtagacagagaaggccgtgaggacgaggcggaggaaaaggcagcaacatccgcacgccgcaggcaggggggagacgtcgtcggctctggtgaaagccatcgccacggcatgcgcgaacatggacccctccgcgctggtggactcgctgcgcgtcagcggcaggagctccccccgctcgttcctcccggcgctgctcggcgccctggacccccacgctttccttgtctgcgtcgtcggcagctttttgtatatggcctcggcggagcgcgacgcgagcaagtgatggtgggagcgtggggttggagtagggaggggggctgcacgcgggcatctcgaatcgacggagatctcggcgtggctagggaggggcgcggaccactggcgtcgggcgcggcagggaaggaagggaggggcgcggaccaccgacgttgtgggtgcgggaggtggggga

SEQ ID NO: 100095 - DNA, 798 bp, Zea Mays
cttggcattttcatgtcacctgtgtcatcctaattttgccaacagaattaacccgtttatcgacaccaagtttatcaccaagaacaggatttggtcacctgcattttagacaattcaaaaatagataaataaagaaacatgagactgggcgtgtttgcttggaaccctggcagccaccatccatacaccccctgagagcatggacctaataatagaggtacttcaactgtcagttgcaggactaaccaagaatttccatatgatcatatccaagggaagatatgccacaaactacaggtgctttaacctgtaggcagtcaggcacccaaatttagagaccagtcaagatctttgatttttgatagttcaagacaactgtggtaatataaatgctgtcagaaaaccaagaagagacacaaggtaaatttaaacacggaatcattttgaaagtcaagttggcactgaatcaagcaagcatacgcattaatctagtctgtccttctgcatgtaatccaatacaaggatgctcacacaaaaaacatgcaatatttttttatcgaacacgcacgcgaatggcatatcttatattaagaataataaaggggggagaaccccaaacaatatcacaaagtcacaccttggattctaagaaaagaagaaaaaaggaggcctagtgtctgaagctagctcccacatgagtggggtctggagaagtgataatcggaggcaagtatttcccccgcaagtgtggagaagctgcttcgaacccgtgacctggtgactcaatgagacagctcg

SEQ ID NO: 100096 - DNA, 598 bp, Zea Mays
gttggcattagtattttctaatcacccatggagaagttcttgaagcacacccgcatccacggactctggctgctttcgatgattcttttcgcatcttctgtcattcatgcacgcataataagcggccaaatcaaagaggacaccaacaacgctaggagcttgacgatgaccaccgtgatgagtgcaggagacaacacgactggcagtgtcgacggggaagcttctagcgggctgccctccacaaaatatttttttggattttacctatgcaaaaagactggtagggtctataggggcttgccggagtgcatggcgcattgccttctaggagtctgcactaaagcgtactagttgctgagaaatgtattgggggatgtttgatatgtctgtaacatcaactattaaaattattaaatactagctatgaatattaaatataatttaattataaaactaattatgcagatggtgactatacggtaagatgagctatattaagcctaattaaaacttagtctgtgctggttagaaactctaaaacttatctataaatagatggcgtattcatatatatcaagtgaacagaaataataaaata

SEQ ID NO: 100097 - DNA, 614 bp, Zea Mays
atcataaacattatttaggcaaataagccatttgtattattagatcttatccatcacctatggtgaagagcctagatcacataaccatccgagggctctttctactttttatgtttcttgtggcatcctttgttggtcatgcacagataataagaggtgaaaccaaggagaataaggacactaacagcatgacgatgacaacaacaagactaggaagctatgtaattagcatggatgaaaaatctagcttgtgctttctggatccaagaactctatggtacatctgcaaaataacatatcgcctttttaggacattgaaggattgcttggagttttgccacagtatatgatgcaccatgttggaaaaaaagactaataagaggccatgctttctcaagattgtagatggagatggtgaagatgttatacccaatcatccatgcatgtaccaaaggataataaactataagacaacttatcagttattattaagtgttccctattttaggaaatgtcattttctcaagagtattttctttgtgtgcgattatgaaagtttcaaatttcatagatgagacgataaaaaagtttgtgtgtcttcaatgatattagtc

SEQ ID NO: 100098 - DNA, 628 bp, Zea Mays
atcatagtatcatacacattgttcagacaaacacgccatttgtattattattagctcttatccatcacaatggtgaagatcctagatcacataagcatccgagggttctttctacttttcatggttcttgtggcatcctttgttggtcatgcacagataataagaggtgaaaccaaagaggacaacgacaccaagagcatgacgatgacaacaatgagaccaggaagctatgtaactagcatggatgaaaaatctagcttgtgctttgaggatataaaaactttatggtacatctgcagaacaacttatcacctttataggacattgaaggattgcctgtcgcattgcaacagtatgtgatgcaccatgttggaaaaaaagaactaataagaggccatgctttctcaagattgtagattgagatggtgaagatgttctacccaatcatccatgcatgtaccaagggataaaaaactataagattaattattagttatcattaagtgttcccagctttaggaaatgtcattttctcaagagtattttcgttgtgtgcgattatggaagtttcaaatttcttatatgagacaataaaaaaactttgtcagtcttcaacgacaatagtcaa

SEQ ID NO: 100099 - DNA, 561 bp, Zea Mays
gacactctaaactcaaacaaatacatatattgtcggcattagctcttacccttttcacccatgatgacgaagtgccagaagcgcgcgagcatccaaggactttggctcctttccatggttcttctagcgtcgtcctctcttgtctgtgcaagcatggcggtagatgggcaaaccaaagaggacatcaacgcaacgagtgtgacgagcatgaacatgacgaggtcgtcgtcggcgagctacaacatgactggcggcggcggagaacttaacagagggcaaaccaaagatgacatcaacactggaagcacgatgattaccacaatgagggcaacaagcaacataattggcaatgatggtgcatcttctaaccgactatcctctgatcatgattgggttattggatggtactactgcaaaaggactaatacatactataggcgcttggctgaatgcttggtgcgttgccttcgaccatgcactaaggtggaaaggactgcttagaggtcacactttctcagcttgtagccaagtgcccttaaaactaaactctcggtgcactcc

SEQ ID NO: 100100 - DNA, 580 bp, Zea Mays
gacactctaaactcaaacaaatacatatattgtcggcattagctcttacccttttcacccatgatgacgaagtgccagaagcgcgcgagcatccaaggactttggctcctttccatggttcttctagcgtcgtcctctcttgtctgtgcaagcatggcggtagatgggcaaaccaaagaggacatcaacgcaacgagtgtgacgagcatgaacatgacgaggtcgtcgtcggcgagctacaacatgactggcggcggcggagaacttaacagaggtccgtgcgtcgtgagatctggattctactggtgccagaacattggctatccgaccatgtcggagtgcttgaagaactgcgaatcgtaaagcactggagtatagaaaaggaataaagtggtctctgctagcttaatttctccagtccatacaattgattaactgtgttccacacttcgtcctagagaccgcacatattcccaacagtaagcgtgcacaattctgacgacgtctctaaccgtaaatgtgcacaaatctgaccatcactacctaaaacggctgctttgccgagtgtctgaagcactcg

SEQ ID NO: 100101 - DNA, 2211 bp, Zea Mays
gcagggatatgtacacgtacgtacaaaagtgaattgaagcagctagcagcaacgagccacatatccttccttcttcttcctggtggctctggctgtgtagagctgctggttactacatgtcgtctcgtctgtctgatgccatgtcgctgtagtgttcgatggaaagcaccaattaaagtggaaccggcgtggggccctcgccatggaaaccccggccaatgcaacggaaggaacgaagtgtcattgtgaggccttgcatgctgcttgcttgcttaataatctgggggtgggggtgggatcgatccctcaggaagctaagcatcaatcagagagagagagagaaattcacgcgatggtgattattcgattaaacaaccggcgcccccgccgacgaagagtgaaggaggcagaagcccggcgctagctagctactagagaggagaggagccgacggccccggggagggagagagagagagagactgagagagagaggtcgtgttaaaagccctactataaacaccaaccagccatttgcacccagcaacgtacagctagctagcaggcagcagcacatagcctccgattattcagctggaggtcggtctgtgtgtgcgtgcatggggcatcactcctgctgcaaccagcagaaggtgaagagggggctctggtcccctgaggaggacgagaagctcatcaggtacatcaccacccatggctacgggtgctggagcgaggtccccgagaaggccggcctacaacgctgcgggaagagctgccggctgcggtggatcaactacctcaggccggacatccgccgaggccggttcacggcggaggaggagaagctcatcatcagcctgcacgccattgttggcaacaggtgggcccacattgccagccacttgcccgggcggacggacaacgagatcaagaactactggaactcgtggatcaagaagaagatccggaagccggcgatgagcacgacgacgacgagctcggccgtgacggcggcgagccctccgtgcagcacggcggcgtcggacgcggcgcttggtcgtcacctgcagacgccgttcagcgcggcggagcaccggctcgacgccatcctcagccagagccttgccttgccgccgccgaagctgggctccggcggcggcggcggcggcggccaagagtccccgccgctgcccccgcactgccccttcttcatgttcgacacgagcgtcagcgtcagcccgccgtcgcccgcggccgctgcagcacaccacctgcagcacccgttcctcactttcacggcggcggcgatggacgacaacgcgccgatgggcttccatctgccgcccttggtggacggcatgggaatgggcatgccagcagccatggactgcggcgctctaggccatgaccaccgcgttgccggcggcaacaacaatggtcaggcggcggcggcggcggccggcatggcgaacggctgctgctacgggcagctgcagaagcagcaggaggaggagcagcagccgtcgctggggcaggaggaccagtgggacgacgagtcggcgcggcacctgctgatgtgggacgatgaccaagaactaacaccgtccaacctggaagccatggaaagtacagctcactccctcctttttatgggaccaaatgaccatacatgacgaaaaagctagcttattattggtgtgcatgcgcatctatccccctctcttcttgatctgatctgctacctctagctctctcacccgatctgctgatctgtgtccatacatgcaataatgaggttgttgtccaaggagcataatttatttttgctggatttttcatttttctcatattgatttaacctttattttttttggtttttggtttgggctttgtggagtgaattgaagactaaaaggctaagagtgtgcgtgttaaatggggttttattttttgtaaagaggatttgcatgctcttgcatggcgttgcgcttggagtgtaatttgattgatgtatctaagtgaatttaaaataaggaagatgacactaaaagagatcgaaagggagtcacgcaccccttttccactttgggtgcttgctgtgtttgtttgctccatagattgcgcatgcgtatgtggatgtcgacgtggatggatgtacctaagctagctagccatgcatcaacaactatcttggccgtaagcatccaat

SEQ ID NO: 100102 - DNA, 477 bp, Zea Mays
gtcgagtgtgtcatcgagcggccgtccgtgaacgtagcgaggtcgatgctgacctggactaactatccagaatgggccttggtgatggaggtgaatttctagacgctccgtgtctgggacgctatcgacctcaacatcgacgaagaccccaacgaaggtgagtaccacgacgaccgtcaggcgatggcgggtcttcagcgctcggtcccctccgagatgtggagcaccctcgcccgcaagcggaccgtgaaagaggcatgggacacggtcaaggtactgcagatcggggacgatagcgcgcgtgatgctagcatgtagcaactccgccgcaaattcggcacgctcgctttcacggagggcgagagcatcatcgagtttgggatccgcatcatgacgctcgccaccaaattacgcaccctcggggacaacatctcggatgccgagatagtgaagaagatgttacaggtagtcccagag

SEQ ID NO: 100103 - DNA, 601 bp, Zea Mays
gtacaatgcaacacccttactttatgatgtatgctttgtacttgctacaggatgaggattacacacagtataacgcgtcatgtgatcgatcaacctgcaaatctcaacagtacactagctactgcatctgcactgcacctgcaggccggttcatgttctggtatatatatgacgatcatctagcggaattattgcagaaaagaaagaaaacccatggacggacgtacgccgtacgtaccgatcgtaagatcgccgtgacatcacatcagtgatggggttaccggagagaatcttgcttttgtctagctagctagcaacctgagccgcgacttggatcggaagaggccacactcaccactgttcctttccctgctcaaatcccaatcaatccgtcgtacgtactgcatctgcatgatgagatgctgcgaattgaagcttggcctatatatgccgccgctggtcgtcaccgagatgtgtgaaggggacgtctcccctttggagattatatttcacgtacacatttcgccgtctggcggttcattcgtttacgggagatttcactctcaagctctttccctctctctcgccgtcgtcgacggcg

SEQ ID NO: 100104 - DNA, 1880 bp, Zea Mays
ctcttatctccttcccccagccgccctccgcctccgcgccatcgacacgctcgagagcgtcgctgcctgctgctcgcgcggctacacgcaagtaataaacattatatggcgctagtacagttcaacggtgccttggttcctcaactcggtgaaaagcctcggctgctatccttgtcagctgcaatcgcaaaggctgcctattctgatgcaagattcctgacaccaaaaactggttcaagaggtagaggtaaacacctgctatcacctagttatagtttgcattcacagacctcttctgaacaactaaaccatgtaccatcgtcaagatttcgccagaaaaggggttcacgttttatcgtcagagctgaagctgatttctatagtgtacttggtgtctcaagaaatgctagtaaatctgaaatcaagagcgcctatcggaagcttgctaggagctatcatccagatgtaaacaaagatcctggtgctgaacaaaagttcaaggatatcagtaatgcttatgaggttctgtctgatgatgagaagcgatcgatctatgataaatatggagaagcaggtctgaagggtgctggcatgggcacaggagattactcaaacccgtttgatctctttgagtccctgtttgaagggtttggtggaatgggtggaatggggggtggccgtgctgctcggaacagaccaatgcaaggtgatgatgagagctacaatctggtactcaatttcaaggaagctgtgtttggtgtggagaaggagattgagataaccagattggaaggctgtaacacctgcgacggaagtggtgccaagccaggtacaaaggcaaccacatgtaaaacttgtggaggtcagggccaggtagtctcctccacaagaacaccgcttggaatattccagcaagtctccacctgcaatacttgtggtggcaccggtgaattctccactccttgcaacacctgtgggggtgatggccgggtgcgaaggacaaagaggatcagcctaaaggttcctgctggagtggattctggaagcaggctgagggtccggtctgagggtaatgctgggcggcgaggaggccctcctggggacctttatgtcttcattgatgttctctctgatcctgttcttaagcgagatgggacaaacattctctacacatgcaaggtttcttacattgatgcaatccttgggacaaccgtcaaagtccccactgttgacggaacggttgaccttaagataccctcagggactcagccaggcacaactctggtgatgtccaagaaaggtgtcccgcttctcgggaagtcaaatgcccgtggagaccagctggtgcgtgtccaggttgagattccgaagcgtctgagcagcgacgagaagaagctaattgaggagcttgcaaacctgaacaaggctcaaacagccaatagcaggagatgattatcgcacatggcttcgtaggacagcgtgcttgtgtgataggcaattttgatgcaaactgcagtgatgattggatgaaaagagttggtagtgataaactcttctacgaactacatacagcaaggggtctggagcaaaaaaatgtgccgttccacatctgtaacctcgtttttaagctattgaaagttgagtcagtgaactggacgtttttgcaatagcttagcatatgcactaggcgactttattagccatttttttttgttgttatacggcttttgtattcttggaagccttaggcaagatatctgatggtggaatcaggtttagacttgacatttcttgcacaaatgctgcaccatgcattcatggaatctgtaagctgtaccatggaaatgttaactgtagttttatggtttgtgatgcattgg

SEQ ID NO: 100105 - DNA, 457 bp, Zea Mays
agacgacgtttgacgttgtgctgaagcattctgttgacaagggatatgaaatgaggcctttcactggcgaatgggtgtgaacacaacagccctattttcaacgccaagtatgcctcaccgatatcatacttcccttcaagcctagcatccatggtgacctcaaggacaaacataccaaaggagaaaacatctgtaaggggagtggcatttccgccgcgtgcgagcttcggagcaagaatggtgaactggaagaagtgtatgtatgtttctcagcctgaagggtatgaagtgaagggaaaggagaagcatgtactcctagagcctgaaacgtgaagcttgacaaagtctaaagaagttaggcttcaccgagtgtgcttgtgagccagcagtggtactaggtatcttttgttgatgacttaattgtgataagaagtgatccagcagaaatctcgaggtt

SEQ ID NO: 100106 - DNA, 476 bp, Zea Mays
cgaagaaagagaactttgatacctatggatcgacgtcccgtggccgacgacgagcaaccacggcgtgagaattcgtcgtcgctggagaagaagacttccctaggtctttgcccacacgcaacctcaagaaggaacatgccgaaggcaaagacatctgtatgaggggacgccttccctgtgcgcagaagctcgggtgctaggtatccctttgttccaaccatatgtgttgtttgtgggtcagtgccgtgatcatacaaccttgcaaggccgaagtcgccgaggcggccgttcatttcaccatctaggagtacgttgcttgccttgatgtctctgtggatcactatcttctcccacttctcatggagatacagcaagacggtagcgatgtttctgatgactcgaaacctctgttcccagttcaaaatagcaccgtgctcttcacagtatagatatttatcaaggctaccattgggcat

SEQ ID NO: 100107 - DNA, 163 bp, Zea Mays
gcgacgtcttcatcccaccagcgcttgggggagtcataaacaaggataatgctaacgacgtaaaggaaagtacatcatcgaggctgccaatcaccccatggacccagaggcaggcgagatcctgtcaaagaaaggtgtcctcatcctccccgacatactggcc

SEQ ID NO: 100108 - DNA, 143 bp, Zea Mays
taaagcatccgtaactgattataagttctgtaggctagcaggccggcagctgccactcgcgcgtgtcgagattactccccactgtaaaatgtttgataacgagagtaaaatgcatggttttctctaaagttttggcatggatc

SEQ ID NO: 100109 - DNA, 955 bp, Zea Mays
actctactacgctccacgaacacgcacgtccgaacaattccatcctagctagctagcagttctcatcacgccaagcacctacgacgagcatggccgccagagcaagaacccacggccctctcttctccctcctccccctcctcctcgcggtactcaccgtcggtaatagcagcagcagccggtgccccggcgtgccgtccatgacggcgcagcaggcgtgcggcgcggtggccgggacgcggcgcatgctggagctctgcctccgcaccctccgcggcggcgcgccgctgccggtgacccggcacgcggcggtggccgtgcgcggcgcgctcgacgcgtacgcggccacggtggccgctgcgacgtcgctgctggacggcggcgcggtgccggccgacggcgagagggccgcgttcggcagctgcatggtgggctacggcagcgcccgcgtcgccatggcgcgcgtcgccgccgacctcgccgccgccggctgcgacggcggcggcgcccgggccgcggagctcgaggcggggtacacggccgggctccgtggcatggatgcgtgcaccgggggcatgctcagctacccggcgtcgcccttgtacgccaggaacctcgccgaccgcaacgtgaccttgctcgccgcgttgctctgcagcctcgtgcctgcgccgctggcttgaggacgccgtggttgatgtgttaatagtcctagtcacttggctagccagagagtattcggttgcagtgtatgtaccagtagcactgttaatcggtggaaccagacaagcgattaaatgtgccaaatggtttgccatttttgggttcttctctgatgaatatgaactggttggatttactatttcttagtgcggcagtggaaccgagaattttgtagcgggggttaatacttaataatatatagcaacaaagatgcttgattctacttcctcca

SEQ ID NO: 100110 - DNA, 860 bp, Zea Mays
gatgccgcgatgagggtggccgccgacgacgacagcatcacggccacggtggtgtctgtgctgctcacacttgcgttcatcagcctctccatcctcaccctcggggtgatatacctgtcggtgcaggacttcttgtagaagagggaaaatgagaagtttgagaaggaggaggccgaaaagcagaaagaggaggcgaggaagaatagggctaagtacaggcagaagagaagaaattattgatctcgggatgaactacccccaccaatgtgaccatttcttcttcttttccaccctgtttcttgtaatagcaatgattttgtatgtagcgttgcacctttggtatcacattgtggttttccttcactccattgtcggctcttggatgctataacactgaactccattgccggctccattgcttggggttgtgctcacgccatcagttttggagtctcttggatgctgtaacactgaactccattgtcggctccattgcccggggttgtgctcacgccatcagttttggagtccggaggagggaggaaaagcagggtagccagaatctatgttggtgtcgcctgtttcattgtgttcatgatgatcctttcagtaataggcctttttaggaagtaaaggaaacgttcgtgctctggtttctgcaagaggtttgcacataaacaaatttttattgcagtctaggctccaacctttggttgataaacactctcaccataagtaacgaaggaataagaataaatgatgggagatacaagaatctgaaaatgaataaatgatgtgacaggttgttgtagagcagcatgatctaagtgaatgcataactctactcttatattatatca

SEQ ID NO: 100111 - DNA, 1005 bp, Zea Mays
agaaacaaaacattatcagtatcttccacaagcacctgctatagttgtgtggtgcaaacaccaaaatgttgcctgccaaagtgtcatttgttttcctgatagtgtactgcgcagtaacattttcgctaggtcagatagctgttggcgaggcatgcacagtggatcagagggacaagatcacaacggactgcagagagttcatcaagctgaaaggccccgtcacagccccgtcgtacaccgacgactgctgcgtcgccataagagcggtgcccaatctcgacatggagtgcatcattcgcctgctctccaataaacagaagaagaagtacgacgtggacaagatccggcggctcggcagcgtcctctgcaatccacatccggtgatgacgtaaaatggggtgtggcagtagtttctgatggagtgcatcgcgtcaacaatatggagcttgaactatacaaaccctactgataatgtgtcaccatttcatatgtatatgtactccattcattaacaaaaaaaagtgtcttatatatcatatttctatgctgttgtggctgcccgttgagttgtttgacggatcacaaattcacaacaccatgccgataccactccaaaatcgtatcttagtgaattaaaaaaattctctaaagatttaaaatttcaagcatattataataaagttaagaattgagactatcttccctgcaatataataaatagtaaatataaaatgttggttatataattaaactataataaataggatagtgagttatttctatataaattatttctattgggttatataactatgtgaattccatgcttattaaatttcatgcatacaaatacttatttgagcaaagtaaataatgagtaaataagcgtaaaatatttgcatttgtgttggtgttttggttgtgcatataaatatggtttcaaaatttaaaatcagatttgaattgggataattaaatctggaaataaaaaaacagaaaaatgaa

SEQ ID NO: 100112 - DNA, 1364 bp, Zea Mays
gtcggtagtcgagtagtcacagacactagacgcgcagcctcgctccgtcgccgcaattcgacgattccaccgcttcgtccgtcggcatagcaatcatactcttttctcttcccctccctcccctcctcaccagtcacctcgacgagatctcccccacctcttccacttccaccccgcccgtcgtctctcgcgaagcacccctatcgtacgttttccgtagctcgacggggacggcgagccgctcctgctgctgccgccgccggaggaggaggaacaggattagcgggaggaggagcagggcaccggtcgcttggggctgtgccacatgccgctctgggggaccgccgcgtccgcgcagccggcagccgagggcgacgccgcccgcgcgccctcagggtccggcggcggcggcgtcaaggtgatccggtcgctgctccccacccggcgccgcctccgcctcgacccgcccgctaagctttattttccatatgaacccggtaagcaagtccggagcgctgtcaggatcaagaacatcagcaagtctcatgtggctttcaagttccaaacgacagcaccaaagagttgcttcatgaggcctcccggcggcgtacttgctccaggggaaagtatcatagcaacagttttcaagtttgttgagcatccggagaacaacgagaagcccttggacaagtgcaaggttaagttcaagattgtcagcctgaaagtcaaagggccggtggagtatgtccctgaattgtttgatgagcagaaggaccaggttgcagtcgagcaaattttgcgggtggtattcttggacgctgagcgcccgagcccacaaatggacaaactcaagcgccagctcgctgaagcagaagccgcgctggaggcacgcaagaagcctccggaggacaatggcacccgtattgtcggcgaaggccttgtgatcgatgaatggaaggaacgaagagagagatacctcgctcgccagcaggaagaaggcgttgattcagtgtagacacagaggaagccctgcagaccacactgggcgcgcgcgcattcctgatcaaaatggatttggagcagccaagcaacgatgaggccttgtgtaattaggatttgagcttcacgctggatgtagatgatccagccactgcctgataataataataataataatacgccctttcctaagccatgtactcgggtgttgttgtggagtgtgtggatgtgatacattccctagctgtattaaaagtgtaactgtaatatcgaaaggcacactccatcatgccacggggggcaattcttccgtccacttgctcatacgactcaccataataaatttatgtgtgattcagttgtca

SEQ ID NO: 100113 - DNA, 175 bp, Zea Mays
gacgtctgccctttatagacgggccaccgtaaccccttgattctatctgctaaattacaagaaccgccccctggaatatctctacatgcaaccgtccggagatctcgcacgtaacgtgcgtgcccgttactcctggttgacgtggcagtctaggtgtgatatttgataaccaaat

SEQ ID NO: 100114 - DNA, 2131 bp, Zea Mays
cgtcgccggagatcgcatgccagcgcgcgacacgacggcgcatggcaattgaccgcctgacttgactagctcgccgcgcccctttgccagattgccagttgccacagccaattctcttctcctaccaacgtcgtcttcgtcacccacgagcagcagcagtcgcacgtacgaccacgccgacgccctcgtccccacgccactcccttgctgccttgcctcctcctccacctgcatgcctatatatcccaaccctaacttctgccttcttccccaccaaaccccacggagctcgatctgcagccttcgatctgtcagtgtccactgaccagtcagctgcagctcgcaggctcgtagccgctagctcgacctctaggctctagctccaacttccccgctgtgttaatctagcgatcggcaagtcatgggcagcttggacaccaatcctaacgccttctccgccttcggcgtcgacgccaccaccggcttccagcccctccaccccgacgacgtccgcgcctacctccacaaggccgtcgacttcatctccgactactacaagtccgtcgagtcactgcccgtgctgccggacgtcaagccagggtacctgcggcagcagctaaggtccgcgccgcccacgtcctccgccccgttcgacgtcaccatgaaggagctgacggactccgtcgtccccggcatgacccactgggccagcccaaacttcttcgccttcttcccgtccaccaacagcgccgcggccatcgccggcgacctcatcgcgtccgccatgaacaccgtcggcttcacgtggcaggccgcgccagccgccacggagatggaggtcctcgcgctcgactggctcgcgcagctcctgcgcctgccgcccagcttcatgaaccgcaccggcgcagctgggcgcggcaccggcggcggcgtcatcctcggcaccactagcgaggccatgctcgtcacgctcgtcgccgcgcgtgacgccgccctccgccggactggctcccagggcgtgtccggccttccgcggctggctgtctacgccgccgaccagacgcactccaccttcttcaaggcgtgccgcctcgccggcttcgacccggccaacattcgctccatccccaccggccccgagacggactacgccctcgacccggccaggctcttcgaggtcatgcaggccgacgtcgacgccggcctcgtgccgacctacgtctgcgccacggtcggcaccacgtcgtccaacgccgtcgacccggtcggagccattgccgacgtcgccgccgtgttcaacgcctgggtccacatcgacgccgcctacgccggtagcgcgtgcatctgcccggagttccggcaccacctggacggcgtggaacgcgtcgattccatcagcatgagcccgcacaagtggctcttgacgtgcctggactgcacgtgcttgtgggtgcgcgacacgcaccggctcactgactctctcgagaccaatccggagtacctaaagaacgacgccagcgactccggcaacgttaccgacctcaaggacatgcaggttggcgtcggccgccggttccgggggctcaagctctggatggtcatgcgcacctacggcgcggccaagctccaggagcacatccggagcgacgtcgccatggccaagatgttcgaggacgccgtgcgctccgacaaccggttcgaggtcgtggttccgaggaactttgctctcgtgtgcttcaggatcaagccccatggtggcggtataatgacggaggaggacgcggacgaggccaaccgtgagctcatggagcgcctcaacaggaccgggaaggcttacctcgcgcacacggtggtcggcgacagatttgtgctccggttcgccgtcggttcgtcgctgcaggaggagaggcacgtccggagcgcgtgggagctcatcaacaagaccaccactgagatcatgcagaaataataaattaaattaaattaaatttattatatgcaagtatatacaaaaatagtagtatcataaatttaatacatgcaagtatatacgtatagtagtccatgagggaattttacttttattgatatgtttgattctttgttgtttgcccaaaggaggaataataaa

SEQ ID NO: 100115 - DNA, 779 bp, Zea Mays
caagacgacgccgactatgacctttgtccccatgagtcaacaggttggtgaacaccaccgctgggagcacctcgccaggaacgtgcgtacctcccgtgtctccttcaacccgccatgaatttcttggtttcactcgctagctgatcgactgactgacacacgtacactcatgtctttcagcctttcctcacgctcttcggtgaggatccagttggagtgagggatctgcttgtcaggtcatgaggaacatgcttgcaaatgagggtgtccgttcattctacaagggtttgtccgctggtttgctaaggcaagcaacgcacatagactgctcatcttggatccttcagctatggaatgtttgccaccagagggtgtgatagatttgtgaatgtgtgggatgacattaacaagagaatactatatcagtactcaaaagtgcgcatcaagcattgttgcactgtcattcggtaaggatggccatctgcttgctgtggcatccaactacacttatgaagagtgagaaaaaacgcactttgtctgacaaatctctgtttacgcaatattaaccgctcatgattctcctcacacttgtcctctttgtcgtcttgagttttatttgctgtgacttagcaaaagtgaattccactgatgggactaacgatacctcaatatgttttgtcaataccttaaggagtctattgtcctatttttctttcaaggttcgttgtagacttaaggtacacattatgaatcgtgcgttgccttcttttgagttgtta

SEQ ID NO: 100116 - DNA, 1781 bp, Zea Mays
cgtttccgtccaccggaagtgccggcctttccccactcgctctcgctcccaacctcctcttcttcttcgtcttcggcctcctccaggactgagtcccacacgcttcgcattccacccgcccccttttcgcgtgaacgcgccggcgccgcggatcctgccgtcacgaatggaggcgtggccggacgatttccgctgccccatcacgctggaggtcatgacggacccggtcatccttccctccggccacaccttcgagcgccgcagcatccagagctggctcgacggggggcacctcacctgccccgtcaccaacctcccgctgccgccctccccgccgctcatccccaaccacgcgctgcgccgcctcatagccgccgtctcgccttccgcggcggcgtctctcgtccctgcggagggaggggcgcacgcgaggcaagaagcggtgtcggcggcggcggcggtgccagcccggcccgcgtcgcccgtgccggcgctgctgaggctggccaagtccggcgccgcagggcggaaggaggtgctggagtccggcagcgcggcggtgctgctgcggcacgcggaggccggggacgaggcggcggccagggcgctgctgcacctcagcctggacggtgacgacacgcgcgtgggcctcgtggcggacggcgccgtggacgcgctctccgccgcggtgtcccgcggcggcgcggcggcggcgtccgcggccacggcgctgaccagcctcgccaccgtggacgtgaacaagtgcaccatcggggcgcacccctcggccatcccggcgctggcggggctcctccgccgcggcgggccgcgggagcgccgcgaggccgccacggcgctctacgagctctgcaagctgccggagaaccggcgccgcgcggtgcgcgagggcgcggcgcccgcgctcgccgacttcgccgccgccggctccgcgcgcgccgtcgaggtgctcggcctcctcgcccggtgccgggaggggcggcaggagctgtgcagggtccccggcgtcgtgtccgtgctcacgggcgccgccgggagcggcaacgcgcgcgcaatcgagcaggccctgctcgtcctcaactggatttgctccgagagcaacgagttggcgctggaagcaatcaagctgcaggctttcgacctctgcgaggctctggtgaacgacgacaactgcaagatcgccaagaacgcggtcgacttggcccggacgctcgagaaagcgtagaattggattgggctgtctcccccaaaacatgagatgagattcgccatgggttttgattcaacacctgctcgattggtcgggtgttggcctcattgtacagaggtagcaacagcaaaggtgaaccttttatctttcttctcttactccgtttcatttccaagttgtagctgcgccgaaaggaggacaaaaaaaaaacagtagaatttagcttatgttcatatggttagaaccagagagagaaaggagtatggttcctgaacttgtcagttagaacttctttccatgtttcagagagtgaccagaccatcatccagtctgagatgttgttcacaatgattcatctgatgatgtagtgaaagtgagaccaaatgatctggagtggctcacgatcaaaagtaggatcgccagtcgttttttttctctcccccttgcttcactgtgctctacagttttacattgagaattggattgtgtgtgtagcgcctatcacctccttatggctcgtgataagaaatcaaaactcctgcctgctcagaaa

SEQ ID NO: 100117 - DNA, 642 bp, Zea Mays
atggacctactttgcgatcaaggactgaaagggatattgttgatgaagaatctgaaaatagttatgaagaatctgaaaatcccatcaatgatgaaggaatactatgaagtggatgaatctggtatagattatgttataacatctgcagcaaaaaaatggagagagtttaaggctgacctaaagaacaaatattttgatgaaacattgagttttgaagagcttattgctaaaagggatgaaagggtgaaagaatctgattgggagtggttgataacttattggatgtctccagaagccgagattcatatgtatgttgtaggttcgtacaaacagaggccgagcaacaaggacgccctgcgagaagagatgaaatatatgttagaacacacatgcaactcaagggtgcatcgttcagatgaggtggcacatgattacaatggtaataaccattcacaaaatatggttgaagatgacttgcaacttactaggcgagttgcaagcactgtgggtcgtctaaggaatcgtgaagatgttaatactattgaagagcaaagtcgcaggcgagacattgcaacaatgatgggtcgtaacaaaaaatcaacgttgacccaaggttctacagcagcagaacttattcggtga

SEQ ID NO: 100118 - DNA, 112 bp, Zea Mays
cacagacggcaatgcgaccatcaaccttgattggaggtacctcgttgatcagttccattggcgacttcttgctcgtgtcctaaaacaaataaaattaatgaaagaaaaataa

SEQ ID NO: 100119 - DNA, 1077 bp, Zea Mays
aacagcactagctagctagctagaatcgaaacagaatggatgcctctactaccttcctcttcctcgcgcttgcatgcatggcggccactaatactctccctcactgtgccaacgcaaggcatttcctccctcctagtcgtagccatggcagcagcactggcacgaggagctctagcgccgtcgacgccgccgccgccgccgccagcagcagcaagctctcgtggccactgctaccgtggaagaagcctggccgtggcggcagcagccgtggctccgggagcgggcacggtttcggctggaccgtctcgcacaacgggtcggacaccgacgtcgggttcggcggcggcgccggcgccggcacgagcagctccggaggtggctcgagcgcgggcgggggagctggtctcggcgtcggcatccacgtcggcaacgacggagtggacgtcgcgatcggcgtcgccggaggcggcgccgtcgtcgtcagtaccagcaacggcggcggcgtgggtgtcggcgctggcggtggaggaggagtcgggatccacctgggccccgacgtcgtggccgtcacccgtggcggtggcggtggcgccggcggcgatgattcgtcgtctggcagcggaaccggggtgggacgcgccggaagcgctgtgggcagcgcccatgggtatgggaatgcaagcggtggaacaggggccggtggcgggagtggagctggctctggcggccaaggtggatacggcggcggcggtggcggtggcaccggaagtagcggtggccatccatgacgaccatgagcttgcattggtgaccgactgatgactgctgcatgatggttggatccggtgcctttggtttggggataaaaatgctgctttcgttggatccagcgcctttggggattgtattcaaaactatatactttttatagctgtctagtattgttgtggttactttgttttacgttgctgattgatgaggttcgttgattagtacgtactgttatccagcgcagtaatataacgcggttttcactcttcttggatgcactaaaacaatgtcagttggtggagtaca

SEQ ID NO: 100120 - DNA, 198 bp, Zea Mays
atcaggacacagatggttgctcctggaggtgaagctttcggtggggtcattggtgttgcccgccacatgatccaaactgaaggattcttctcgctgtataagggattggtgccttctcttatcagcatggcaccctctggcgttgtattctatggagtgtatgacatactgaagatggcttatctgcattctccttaa

SEQ ID NO: 100121 - DNA, 174 bp, Zea Mays
atggcgctcggaccggccaaactgattctcccctacctagccgctggccggttgctgctgctgggttacacttgtttggtcccttccccaacgcacccatgtccctctgttcgccgtggccggttcctcgctcgcgccgcggttctctttttctttggtgtctacgcgccatga

SEQ ID NO: 100122 - DNA, 1994 bp, Zea Mays
aaaattcctctccttcgaacagatccttttgcccccggacccctttcctacgcttgcccaaacccacaaaaccctcgccgtcgcgccgcgcgattgcctctccggccgccgcgagcccgcgacactagtaacggtctacaccactagaatgactgaagaattgaattccagcaaattcaagcttttgttttagccaagatttgagattcgatttgaagtgtggaagtccttacaatttgccaatcctatatttgatctctgctgtgctgcgttaaatccctaaacttcacagcgcggcgccggcccagccacgccggaagaagtcgccgcgtgaggtcagtgtccccgttgctgccgcctctaacccgaagcctaggccgctgccggtgcataacaaggagaatcaggcggaggggaaagtagcagaggagggggcagcaactgaggagggggagaagtaccgggcggaaccggaaatcttgccgctgccgccggccatggcgaagctgggcccggggcaggggctcgggtgcgaggcggcggaggggtcgctcgtgcccagccggaagcgggagtacaagccctgcggcaagcacactgaggggaagcgcccgctatatgctatcgggttcaacttcatggacgcgcgctactacgacgtcttcgccaccgtcggcggcaaccgcgtgacaacttaccgctgccttgagaatggtagtttcgctcttctacaagcttacgttgatgaggataaggatgagtcgttctatactctaagctgggctcgtgaccatgttgatggctcaccactgctggtggcagcaggaagcaatgggatcattcgggtcatcaattgtgctacagaaaagttagctaagagctttgttggccatggcgactcaataaatgagataagaactcaaccgttgaagccttcgctcatcatttctgcaagcaaggatgaatctgttaggctatggaatgtccatacagggatctgtatcttgatatttgctggagctggaggtcatcgcaatgaagtattgagtgttgacttccatcctagtgatattgaacgttttgcaagttgtggcatggacaacactgtgaaaatctggtcaatgaaagaattttggctatatgttgacaaatcatattcatggactgaccttccatcaaagtttccaacaaaatatgtccagtttccagtcttgattgctgcagtacactctaactatgttgattgtacaagatggcttggtgacttcatcctatcaaagagtgttgacaatgaaattgtgctttgggaaccgaagacaaaagaacagagtcctggggagggaagcatcgatatccttcagaagtatcctgtcccagaatgtgacatttggtttatcaaattttcatgtgattttcacttcaatcagttggcgataggcaaccgtgaaggcaaaatctacgtgtgggaagtacagtccagccctcctgtcctcattgctcggctgtataatcagcagtgtaaatcgccgataagacaaactgcagtgtccttcgatggaagcacaatccttggagctggtgaagacggcaccatctggcggtgggatgaagtggaccatccgagctccagaaactgaagaagtgttgccgctcaatgctggactgatggttacgctcggttggggttgcgatggttgaatccgttggtggaaagtgccacctggtgttttttctagtcaaaatggttggtgttaacagaatattgaatgcttcgaatgttgaaagttgggatgcttgtgctggtactctgctccgtggacgagtgaacttagtttgttgcaactttgggaaccgttgtcatctgtttgttctgcatttctaaaaagagagcaaatttcaggatacatgttcttttttttcagtacaagaaaactaaggttgaggtattgctttgcaatttactctctcttaaaaaaaactggatcttgcttcaa

SEQ ID NO: 100123 - DNA, 1820 bp, Zea Mays
aacccacaaaaccctcgccgtcgcgccgcgcgattgcctctccggccgccgcgagcccgcgacactagtaacggtctacaccactagaatgactgaagaattgaattccagcaaattcaagcttttgttttagccaagatttgagattcgatttgaagtgtggaagtccttacaatttgccaatcctatatttgatctctgctgtgctgcgttaaatccctaaacttcacagcgcggcgccggcccagccacgccggaagaagtcgccgcgtgaggtcagtgtccccgttgctgccgcctctaacccgaagcctaggccgctgccggtgcataacaaggagaatcaggcggaggggaaagtagcagaggagggggcagcaactgaggagggggagaagtaccgggcggaaccggaaatcttgccgctgccgccggccatggcgaagctgggcccggggcaggggctcgggtgcgaggcggcggaggggtcgctcgtgcccagccggaagcgggagtacaagccctgcggcaagcacactgaggggaagcgcccgctatatgctatcgggttcaacttcatggacgcgcgctactacgacgtcttcgccaccgtcggcggcaaccgcgtgacaacttaccgctgccttgagaatggtagtttcgctcttctacaagcttacgttgatgaggataaggatgagtcgttctatactctaagctgggctcgtgaccatgttgatggctcaccactgctggtggcagcaggaagcaatgggatcattcgggtcatcaattgtgctacagaaaagttagctaagagctttgttggccatggcgactcaataaatgagataagaactcaaccgttgaagccttcgctcatcatttctgcaagcaaggatgaatctgttaggctatggaatgtccatacagggatctgtatcttgatatttgctggagctggaggtcatcgcaatgaagtattgagtgttgacttccatcctagtgatattgaacgttttgcaagttgtggcatggacaacactgtgaaaatctggtcaatgaaagaattttggctatatgttgacaaatcatattcatggactgaccttccatcaaagtttccaacaaaatatgtccagtttccagtcttgattgctgcagtacactctaactatgttgattgtacaagatggcttggtgacttcatcctatcaaagagtgttgacaatgaaattgtgctttgggaaccgaagacaaaagaacagagtcctggggagggaagcatcgatatccttcagaagtatcctgtcccagaatgtgacatttggtttatcaaattttcatgtgattttcacttcaatcagttggcgataggcaaccgtgaaggcaaaatctacgtgtgggaagtacagtccagccctcctgtcctcattgctcggctgtataatcagcagtgtaaatcgccgataagacaaactgcagtgtccttcgatggaagcacaatccttggagctggtgaagacggcaccatctggcggtgggatgaagtggaccatccgagctccagaaactgaagaagtgttgccgctcaatgctggactgatggttacgctcggttggggttgcgatggttgaatccgttggtggaaagtgccacctggtgttttttctagtcaaaatggttggtgttaacagaatattgaatgcttcgaatgttgaaagttgggatgaacagcaccttagtttgttgcaactttgggaaccgttgtcatctgtttgttctgcatttctaaaaagagagcaaatttcaggataca

SEQ ID NO: 100124 - DNA, 1921 bp, Zea Mays
aaaattcctctccttcgaacagatccttttgcccccggacccctttcctacgcttgcccaaacccacaaaaccctcgccgtcgcgccgcgcgattgcctctccggccgccgcgagcccgcgacactagtaacggtctacaccactagaatgactgaagaattgaattccagcaaattcaagcttttgttttagccaagatttgagattcgatttgaagtgtggaagtccttacaatttgccaatcctatatttgatctctgctgtgctgcgttaaatccctaaacttcacagcgcggcgccggcccagccacgccggaagaagtcgccgcgtgaggtcagtgtccccgttgctgccgcctctaacccgaagcctaggccgctgccggtgcataacaaggagaatcaggcggaggggaaagtagcagaggagggggcagcaactgaggagggggagaagtaccgggcggaaccggaaatcttgccgctgccgccggccatggcgaagctgggcccggggcaggggctcgggtgcgaggcggcggaggggtcgctcgtgcccagccggaagcgggagtacaagccctgcggcaagcacactgaggggaagcgcccgctatatgctatcgggttcaacttcatggacgcgcgctactacgacgtcttcgccaccgtcggcggcaaccgcgtgacaacttaccgctgccttgagaatggtagtttcgctcttctacaagcttacgttgatgaggataaggatgagtcgttctatactctaagctgggctcgtgaccatgttgatggctcaccactgctggtggcagcaggaagcaatgggatcattcgggtcatcaattgtgctacagaaaagttagctaagagctttgttggccatggcgactcaataaatgagataagaactcaaccgttgaagccttcgctcatcatttctgcaagcaaggctatggaatgtccatacagggatctgtatcttgatatttgctggagctggaggtcatcgcaatgaagtattgagtgttgacttccatcctagtgatattgaacgttttgcaagttgtggcatggacaacactgtgaaaatctggtcaatgaaagaattttggctatatgttgacaaatcatattcatggactgaccttccatcaaagtttccaacaaaatatgtccagtttccagtcttgattgctgcagtacactctaactatgttgattgtacaagatggcttggtgacttcatcctatcaaagagtgttgacaatgaaattgtgctttgggaaccgaagacaaaagaacagagtcctggggagggaagcatcgatatccttcagaagtatcctgtcccagaatgtgacatttggtttatcaaattttcatgtgattttcacttcaatcagttggcgataggcaaccgtgaaggcaaaatctacgtgtgggaagtacagtccagccctcctgtcctcattgctcggctgtataatcagcagtgtaaatcgccgataagacaaactgcagtgtccttcgatggaagcacaatccttggagctggtgaagacggcaccatctggcggtgggatgaagtggaccatccgagctccagaaactgaagaagtgttgccgctcaatgctggactgatggttacgctcggttggggttgcgatggttgaatccgttggtggaaagtgccacctggtgttttttctagtcaaaatggttggtgttaacagaatattgaatgcttcgaatgttgaaagttgggatgcttgtgctggtactctgctccgtggacgagtgaacttaggtgccgtttggttcacatatttgtaacgtaatgggtaacagataacgttaaatcatgtttgttttatttcaaccgtaatcagataccacattaaaatttgata

SEQ ID NO: 100125 - DNA, 1622 bp, Zea Mays
ccacgccggaagaagtcgccgcgtgaggtcagtgtccccgttgctgccgcctctaacccgaagcctaggccgctgccggtgcataacaaggagaatcaggcggaggggaaagtagcagaggagggggcagcaactgaggagggggagaagtaccgggcggaaccggaaatcttgccgctgccgccggccatggcgaagctgggcccggggcaggggctcgggtgcgaggcggcggaggggtcgctcgtgcccagccggaagcgggagtacaagccctgcggcaagcacactgaggggaagcgcccgctatatgctatcgggttcaacttcatggacgcgcgctactacgacgtcttcgccaccgtcggcggcaaccgcgtgacaacttaccgctgccttgagaatggtagtttcgctcttctacaagcttacgttgatgaggataaggatgagtcgttctatactctaagctgggctcgtgaccatgttgatggctcaccactgctggtggcagcaggaagcaatgggatcattcgggtcatcaattgtgctacagaaaagttagctaagagctttgttggccatggcgactcaataaatgagataagaactcaaccgttgaagccttcgctcatcatttctgcaagcaaggatgaatctgttaggctatggaatgtccatacagggatctgtatcttgatatttgctggagctggaggtcatcgcaatgaagtattgagtgttgacttccatcctagtgatattgaacgttttgcaagttgtggcatggacaacactgtgaaaatctggtcaatgaaagaattttggctatatgttgacaaatcatattcatggactgaccttccatcaaagtttccaacaaaatatgtccagtttccagtcttgattgctgcagtacactctaactatgttgattgtacaagatggcttggtgacttcatcctatcaaagagtgttgacaatgaaattgtgctttgggaaccgaagacaaaagaacagagtcctggggagggaagcatcgatatccttcagaagtatcctgtcccagaatgtgacatttggtttatcaaattttcatgtgattttcacttcaatcagttggcgataggcaaccgtgaaggcaaaatctacgtgtgggaagtacagtccagccctcctgtcctcattgctcggctgtataatcagcagtgtaaatcgccgataagacaaactgcagtgtccttcgatggaagcacaatccttggagctggtgaagacggcaccatctggcggtgggatgaagtggaccatccgagctccagaaactgaagaagtgttgccgctcaatgctggactgatggttacgctcggttggggttgcgatggttgaatccgttggtggaaagtgccacctggtgttttttctagtcaaaatggttggtgttaacagaatattgaatgcttcgaatgttgaaagttgggatgcttgtgctggtactctgctccgtggacgagtgaacttaggtgccgtttggttcacatatttgtaacgtaatgggtaacagataacgttaaatcatgtttgttttatttcaaccgtaatcagataccacattaaaatt

SEQ ID NO: 100126 - DNA, 1972 bp, Zea Mays
aaaattcctctccttcgaacagatccttttgcccccggacccctttcctacgcttgcccaaacccacaaaaccctcgccgtcgcgccgcgcgattgcctctccggccgccgcgagcccgcgacactagtaacggtctacaccactagaatgactgaagaattgaattccagcaaattcaagcttttgttttagccaagatttgagattcgatttgaagtgtggaagtccttacaatttgccaatcctatatttgatctctgctgtgctgcgttaaatccctaaacttcacagcgcggcgccggcccagccacgccggaagaagtcgccgcgtgaggtcagtgtccccgttgctgccgcctctaacccgaagcctaggccgctgccggtgcataacaaggagaatcaggcggaggggaaagtagcagaggagggggcagcaactgaggagggggagaagtaccgggcggaaccggaaatcttgccgctgccgccggccatggcgaagctgggcccggggcaggggctcgggtgcgaggcggcggaggggtcgctcgtgcccagccggaagcgggagtacaagccctgcggcaagcacactgaggggaagcgcccgctatatgctatcgggttcaacttcatggacgcgcgctactacgacgtcttcgccaccgtcggcggcaaccgcgtgacaacttaccgctgccttgagaatggtagtttcgctcttctacaagcttacgttgatgaggataaggatgagtcgttctatactctaagctgggctcgtgaccatgttgatggctcaccactgctggtggcagcaggaagcaatgggatcattcgggtcatcaattgtgctacagaaaagttagctaagagctttgttggccatggcgactcaataaatgagataagaactcaaccgttgaagccttcgctcatcatttctgcaagcaaggatgaatctgttaggctatggaatgtccatacagggatctgtatcttgatatttgctggagctggaggtcatcgcaatgaagtattgagtgttgacttccatcctagtgatattgaacgttttgcaagttgtggcatggacaacactgtgaaaatctggtcaatgaaagaattttggctatatgttgacaaatcatattcatggactgaccttccatcaaagtttccaacaaaatatgtccagtttccagtcttgattgctgcagtacactctaactatgttgattgtacaagatggcttggtgacttcatcctatcaaagagtgttgacaatgaaattgtgctttgggaaccgaagacaaaagaacagagtcctggggagggaagcatcgatatccttcagaagtatcctgtcccagaatgtgacatttggtttatcaaattttcatgtgattttcacttcaatcagttggcgataggcaaccgtgaaggcaaaatctacgtgtgggaagtacagtccagccctcctgtcctcattgctcggctgtataatcagcagtgtaaatcgccgataagacaaactgcagtgtccttcgatggaaggtacctcactctaatccatgctcaatttggtgtactgtctattctagcatttgcttttttcttggttctgcttgagaaattctcgattgcatgtcatatgctggtgcattttcttttttctgtttctgtggtggattggtaaaatgcgacgatgccttccttatctagcacaatccttggagctggtgaagacggcaccatctggcggtgggatgaagtggaccatccgagctccagaaactgaagaagtgttgccgctcaatgctggactgatggttacgctcggttggggttgcgatggttgaatccgttggtggaaagtgccacctggtgttttttctagtcaaaatggttggtgttaacagaatattgaatgcttcgaatgttgaaagttgggatgcttgtgctggt

SEQ ID NO: 100127 - DNA, 1574 bp, Zea Mays
aaaattcctctccttcgaacagatccttttgcccccggacccctttcctacgcttgcccaaacccacaaaaccctcgccgtcgcgccgcgcgattgcctctccggccgccgcgagcccgcgacactagtaacggtctacaccactagaatgactgaagaattgaattccagcaaattcaagcttttgttttagccaagatttgagattcgatttgaagtgtggaagtccttacaatttgccaatcctatatttgatctctgctgtgctgcgttaaatccctaaacttcacagcgcggcgccggcccagccacgccggaagaagtcgccgcgtgaggtcagtgtccccgttgctgccgcctctaacccgaagcctaggccgctgccggtgcataacaaggagaatcaggcggaggggaaagtagcagaggagggggcagcaactgaggagggggagaagtaccgggcggaaccggaaatcttgccgctgccgccggccatggcgaagctgggcccggggcaggggctcgggtgcgaggcggcggaggggtcgctcgtgcccagccggaagcgggagtacaagccctgcggcaagcacactgaggggaagcgcccgctatatgctatcgggttcaacttcatggacgcgcgctactacgacgtcttcgccaccgtcggcggcaaccgcgtgacaacttaccgctgccttgagaatggtagtttcgctcttctacaagcttacgttgatgaggataaggatgagtcgttctatactctaagctgggctcgtgaccatgttgatggctcaccactgctggtggcagcaggaagcaatgggatcattcgggtcatcaattgtgctacagaaaagttagctaagagctttgttggccatggcgactcaataaatgagataagaactcaaccgttgaagccttcgctcatcatttctgcaagcaaggatgaatctgttaggctatggaatgtccatacagggatctgtatcttgatatttgctggagctggaggtcatcgcaatgaagtattgagtgttgacttccatcctagtgatattgaacgttttgcaagttgtggcatggacaacactgtgaaaatctggtcaatgaaagaattttggctatatgttgacaaatcatattcatggactgaccttccatcaaagtttccaacaaaatatgtccagtttccagtcttgattgctgcagtacactctaactatgttgattgtacaagatggcttggtgacttcatcctatcaaagagtgttgacaatgaaattgtgctttgggaaccgaagacaaaagaacagagtcctggggagggaagcatcgatatccttcagaagtatcctgtcccagaatgtgacatttggtttatcaaattttcatgtgattttcacttcaatcagttggcgatagcacaatccttggagctggtgaagacggcaccatctggcggtgggatgaagtggaccatccgagctccagaaactgaagaagtgttgccgctcaatgctggactgatggttacgctcggttggggttgcgatggttga

SEQ ID NO: 100128 - DNA, 1405 bp, Zea Mays
gggaggagtcggcctcctcagggcggcgctgggctccggcaagctgcgcatcgaggggtcgctgagcttcaagcgggcgcaggccgcactgcaggtggagaccgagatctccatccgggccgccgccctgcccgcgccgggaccgagacccttgcccaggggagctcggttcgccggctcggcggccgcggacagccccaagcacgagggtgcggcgcttaggctgcagaaggtgtacaagagcttccgcacgcggcgccagctcgccgactacgccgtgctcgtggagcagagctggtggaagctgttggacttcgcgctgctgaagtgtagctctgtttccttcttcgaagtgttgcaacgaggcagcctcgccggggcgccgaagcagcagacgaagctcccatggagagcgctgccatggccttgctcctgcggggaacaagtctgggcgaggaggaagaggaagcaggcggcacggtactaccggaagtccccccagtggcagcccatatcaaacttctatgatatcatggtaacaaacatgtcaaataacttttaaccaaaatgagaatgtagccaggtgtaccgaatctttggcacaacgatcagggatctatttcgcaaatgaacggaaaggtagcacaattttttttctttctttttctttttgtgctagtgccagtattgtggaacgaatttataaggtttgtgggttggactgctaacatttatgttcgaatttggacgcctctctctctctcaggttggaaaggggttgctgaaggacgagaatgctcagaagcttgcgttgcagcactggctggaagcgattgacccacggcactggtacggccacaaccttcactgctactacaactgctggctccactccgaaagcaagcaacctttcttctactggccgcacttgaagaaatcttatatcagtttgaggaaaaactccaagctgaaagagaggaagctgctaggaagcaggaagagttgcaagcacaactacaagctcaacaggccgcacttgaagaaaaccaaagtttgctgcgccaggcccaagaggaagtgaaggggatgcataccaagtttgaagagaccaatgcactgctatgagctgtcctgaaacttcagaaagattgaggtagggatgcataccaagtttgaggatgatgcctttgcttaaggtttttctaccttgctagaacatatctgtggttagaactttgtcagaactaagtgcaatctgtttgaatgcttcaaacctttgtggtggaacctttgtatgtttgaacctctgttgtggaagaactagtgtgctggaattgtgtatgacttgtgatgagaatgttgtgtatgatggcttttctgtgtattatgattctgtgagctatca

SEQ ID NO: 100129 - DNA, 680 bp, Zea Mays
gtagataagccaaatgtttaagatatgccttattcctgagctaatgctggcatgcgaattttttttaataaccaaacacaatgttgaagtcttgaaacagtattatgcttagatgtgacagtagatacattgttgactgttcagcatccataaggcccatatgattttttttgtttctgaacatttgagaaactgtctcaacagctgctgatccagtagttttattcactctgtttatgtcctgaatgctactatgttgaacatgtatatcatgacatgcagctttcaagcgcgtgtctcggttggagggcatcatccctgccctggagacctcccacgcgctggcctaccttgagaagctctgcccgacactggcggacggcgtgagggtggtggtgaactgcagcgggcgaggagacaaggacgtgcacaccgccagcaagtacctggacgtctaaaacaccagcgaggaggctggtttccatgtcaagttttggagggttcagcagtaattaatttagcgctgttctttttggataaaagcacaaataacctggaagctggtattgttgttgtagccggtagtgcccccctgtttttttattttacaagtaatctgaatggctttggagtgcataatcaataatcaaataaatacaaagcttttggccttattaaac

SEQ ID NO: 100130 - DNA, 1714 bp, Zea Mays
ccctgcccccacagcctatctatccccttcccctcgtcgatttattattctcatggccaccaccgccgccgccgccattcgcagccctacccgcgccgccgcaccaggacccgccgcgccggcccagcagcgcgcggttttgcgggtggcgtcgtccaggacctcctccgcccgcccccgaagggccgccgccgccgtggccgcggccgcaatgcagccggccaaggcggtcgccgcggaggcggcctcccccgccgcggtggagatggggaacggcgccgcggcgccggggctgcagaggcccgacgccatgggcaggttcgggaggttcggcggcaagtacgtccccgagacgctcatgcacgcgctcaccgagctcgagagcgccttccacgcgctcgccaccgacgacgagttccagaaagaactggacggtattctcaaggactacgttggacgtgagagccccctatacttcgcggagcgcctaacggagcactacaagcgcgccgatggcacaggcccgctcatctacctcaagagggaggaccttaaccacacgggtgcccacaagatcaacaatgccgtggcgcaggccttgcttgccaagcgacttgggaagcagcgcatcattgccgagacaggggctggtcagcacggcgtcgccaccgccaccgtgtgcgcccgtttcgggctgcagtgcatcatctacatgggcgcacaggatatggagaggcaggcgctcaatgttttccggatgaggcttcttggtgcagaggtcagggcggtacattctgggacagcaaccctgaaggatgcaacttcagaggctatccgtgactgggtcacaaatgtggagaccacacactatatcttgggctctgttgccggtccgcacccgtacccgatgatggtgagggagttccataaggttattggcaaggaaacccggaggcaggccatggacaagtggggtggcaagccggacgtattggttgcctgcgtcggcggcggatcaaacgccatgggcttattccatgagtttgttgaggatcaagatgtgaggctggttggagtggaggcagctggccatggcgtagacaccgacaagcatgcggcgactttgacaaagggccaagtcggagttctccatggatccatgagctatttgctgcaggatgatgacggacaagttatcgaaccccactccatcagtgctgggctcgattaccctggcgttggacccgagcacagtttcttgaaggacattggacgtgccgaatacgatagtgtgactgaccaggaggcactggatgctttcaagcgcgtgtctcggttggagggcatcatccctgccctggagacctcccacgcgctggcctaccttgagaagctctgcccgacactggcggacggcgtgagggtggtggtgaactgcagcgggcgaggagacaaggacgtgcacaccgccagcaagtacctggacgtctaaaacaccagcgaggaggctggtttccatgtcaagttttggagggttcagcagtaattaatttagcgctgttctttttggataaaagcacaaataacctggaagctggtattgttgttgtagccggtagtgcccccctgtttttttattttacaagtaatctgaatggctttggagtgcataatcaataatcaaataaatacaaagcttttggccttattaaac

SEQ ID NO: 100131 - DNA, 3789 bp, Zea Mays
gtcagccgccgtgcacgctcatcatatggcatagccccaagcccccaacggatcgagcgcctccccgagtccccgttcccctgccccagctgaccgccgccgagacgtgccacaccgcctccccctcccgccgccacaaccttcgcctccacgcaattggccgcactcctttccacctcccgctacaggatagcgtgggccggtcggcggcgccgacgggtggagaactggagatccacccgcacgcggactgcttccttcgctagtcgatgggaagtaagcgttgttaggtctcatgatttcttttgggagatccggagctgtggtgcctgtctgactcatcatctctgggacactgccaagtacgattaagtacttggctatttcagagattcagaagaacttttgcaagaagggaggtcttgtactttggaactactcgatagccatatttttagaggttagcaaaaggagatcagaatgactaatgaaactagaaaacatcgttccaagtgggacacaaaagaaggatctgatgtagttgagatcagtgatgatgagtctcctgataagacaggtgttcaccgtaaaggtggcgatttacacacaaaacctgacacatccatgcaccacagaggcgctggacatgagaaggaacatgctgatgggtccaatgaagatatgaaggaaatgcaacataaggcaccctctgaaagatcacaacctcttagaatggttgatgagcgtgataataatgagtggagcaaggcaactggtaaccaaggcacaaacagatatgcagatgacagaagacgtggtgatggatggggtacagctcctagtcgtgattattcttctgctagggcgccttctgatccagatgcatggaggcagcgcagccgaagtccatctccaagaggggtttggaacaaatcacgcaggaacaggagtcgttccagaagcagaagcagaagcagaagcagaaacagaagtaggagcagaagcaggagtatagggcgaggcagaggcaggagcagaagtccatatattgctgaccgtggatctgagtggagggttgagagaggcagaacatctggaggacctgttcggccctgtagggattttgtggctggtaggtgcagaagaggctcaaattgcaggttccttcatgaagatggtgggcacaggccatttgatgatcactatcctgctgacccaagggaaaggtatggttatcagagcaaggagtttatggatacaagaggaccaaatgactatttgcggagtaggcaatctcgagatcgttatgatgataggccttgggagagatctgaacctcgaagggattaccggtatcctgaacaatgctttaattttgccaaagggaaatgcatgagaggtgctagttgcatatttgcgcatagtaattctgcttctcatggtagatggagagatgagactagggaaagtgcccatgatagatttggccctgattcatcctatgggaataggactgagcaccgtagggtaaacaaaaacccttgtaagttttttgctgaaggttgttgtcgccgtggtgaaaattgttcatatctccatgaggaagctccccatagtcagataggagtgagtgcacctgatgaggctttgaattacagtgatgggcatgcagcaagaggaaactattcaaactggggtgaacaaaataatgctgtgcatgcaacctctcagattttatccagggatgacagggaaagtcctatttctcagagtattggcagaaatgattctcgcaatgattatgaaaaccagcattcaaaagatgctggaaagagccagtaccaaattattcatcaggaagattttggttcaccagggcaaaagaaacatgaagatgctatttcacaacagccacagttattgactcctgtccagactactgctcttagcatgcataatgaaaaggtatctgaaatggacagtcagaatgctccttcaagcattggaggtttgagcatgcaatcaggggttcgtagtgctaacattatagcagagcaaagcctgggtcaaatacttcagagacatgatccaattcctcatattcctgggccacaaacgcttccgatcaccacacaaccacagaatgttacgtcttcattcccatcaaatagccacgtgcaacaaaataactttcctatacatcagaacaggcaagagcagtttgtagttccacacgcagctgcaaacatctcaactcccagcatgcagagccagccaattgcttctcacatggggcacatccaacgtggcggctatggtatagagccacaggcattgcccaatatctccacacataacgggcataatttcaatgttgccagtcaagttccaccaaacattccaacagctgtgcatgctgggcagactcaggtgacaattgacatgccaaggttgggtcaagacagtggtcctcaaagcatacacaacatggagatgcagccaatgtctccaaacgtgcaaagccaatccttgcaggggttaccccttgtgccggcttccagctcagctgatatggccggagttcctgttcctcacaacgctgtgaaaagcgaagaagttagccgagttactgcatccctggcacaatactttggaaatactgctttcggcgctggtacggttggattacaaccgtcgcagccgaatatgaatgcaagcctgatggccactccacctgtggtaccaccacctgtccaacccaatccgtggccctgggcgcagcaacagacagggatagtccaacccggtctccctgttccacctcagcagcagcagcagcaacaacaggctccccagaggcagcaacaacaacaggctccccagagcttccagacgctgatcgccgttggtggcagtaatggcaactctatgctcatacctaacgcaggcgcatcggttggtcccgccaccgtggcggcgaaggaaaccgcgcctccagagagcaagaaaggagagaagaaaaatgcagacgcagaaaagaaaaatggcgacgcggagaggagaaatgccgaagcagaggcacaggaagacggcgacaagggtaagaagggcaaggactccaagcagctgaagatgttcaaggttgcgctcgcggacttcgtgaaggaggcgctgaagccgacgtggaaagacgggcagatgagcagggaggtccacaagaccatcgtgaagaaggtcgtggacaaggtgacgagcaccgtggagaacacccctccgaccaaggagaagatcgacgtctacatgacctactccaaggagaaactgaacaagctcgtgcaggcgtatgttggcaagtacgccaaggcgtagtagcgtttggccaagaacacactgacgcccattttgtgccccgaggtcggaaggatggaaagcaccgcgtgcatccgtgctcagaggtttaggatttgtgaaggcgcgcgaggttggggggggggggtgcctgggcttgtctgcagtttcagagagtttagcgtgtggtttgtgggcaaatggcgccgttccaacatctggctgtaacttttgtagaattgttttattctgggatttagaacatggtgtagcggaatcatgcatggcgtggatcattttttatggatagactatataggaggcatgcatggtgtggtgcccatcgacgtgctagtgttatagtattgttgatcggaggaccagaccagtcaaggaacgcacggtgtccctcttgatgagaagtgagttgcttgctcatcg

SEQ ID NO: 100132 - DNA, 1145 bp, Zea Mays
gtcagccgccgtgcacgctcatcatatggcatagccccaagcccccaacggatcgagcgcctccccgagtccccgttcccctgccccagctgaccgccgccgagacgtgccacaccgcctccccctcccgccgccacaaccttcgcctccacgcaattggccgcactcctttccacctcccgctacaggatagcgtgggccggtcggcggcgccgacgggtggagaactggagatccacccgcacgcggactgcttccttcgctagtcgatgggaagtaagcgttgttaggtctcatgatttcttttgggagatccggagctgtggtgcctgtctgactcatcatctctgggacactgccaagtacgattaaggaaggatttgtaaatgccactttttggagtttctggccttttggtttagtcatcaagactctagctagcaattatctaaagaaacaaatgaaatgctaattgccaccaagatggcaaaattgccggaaaacagcagttgagggagaaacttcattgcaatgctaacaataccagtgcccagatcatgacaatcagagccagtagcaactgaaccttaagtagccaccaagtttggcaaaacttctgcaactctagttgagggggaaattttttgatgcgacttgttgatgcacaagctgaacggcccaagatttctgtagttgctgcttgaaatattcttgataggaagggcaattttgtagatgtctcgagagtgtaaaaaacatgcactgtagttctctttttacctgtaagataagattgtatgcagtatgcactatttgagttgtaacgggataagttcacgaaagtatatttttttatttgatgtgtcttgattgggaaaaggttatgtctggtgcagtggtgagaactcactgagtcactaggtcgcgggttcgaagcagtctctcggcatttgcgggggaagaattgccttcccttttccagaccctactcatatgggcgccgagccatcagcaattggtctgcccttttgatgtgtcttgattgggaaataattgcaataagaaaagctgtgcataagaaatttctttgatgtctctttgttggactatatactctggtgaatgaaactgaattgtttgtgatg

SEQ ID NO: 100133 - DNA, 2107 bp, Zea Mays
gtcagccgccgtgcacgctcatcatatggcatagccccaagcccccaacggatcgagcgcctccccgagtccccgttcccctgccccagctgaccgccgccgagacgtgccacaccgcctccccctcccgccgccacaaccttcgcctccacgcaattggccgcactcctttccacctcccgctacaggatagcgtgggccggtcggcggcgccgacgggtggagaactggagatccacccgcacgcggactgcttccttcgctagtcggtaaggaaccctagcccccttggcttgcgtcgacggattcctcgtccgtgcaccccttcgcgggatcttctcttttcgtcactcccaagctatcgcccccagttttgatcctcaatttctataccaaagcagccgatgtttttgtggtccccacagtgtccgagatttgccagctagggtttacgcgcgttcccctcgtttgctaacggcggggatgcattactgttgggcgcgttttgctgctgctgatacgagtaattgcctttgctccgaacgctcgagtcgcgttaccctaggctgactttcgtcgttccgtgcggcccttgttgtaaatccactgtgctttcgtgctttggtgtgagcatgctattaaatctcgcacctttctgttgcttattatatgttaggcatctgtattaggccgttgcattgcattgcgagtcttgaggactcagtcccgtagactagactagtgattcacacacacatgatgtaatcttgtcttgtcagtgcctttcatggatacgtgcctgaatttcgtccctggttggtcccagtctggctttctattgccaggttttcatgttaagtttggagtctttcatggtttgtaacaagctcttctgtgtgccttttctgcagatgggaagtaagcgttgttaggtctcatgatttcttttgggagatccggagctgtggtgcctgtctgactcatcatctctgggacactgccaagtacgattaaggttggtatctatgctactcttctgcctctttcttcctctctcaacaagcaaatcgtgtggtctgttcctttcctgattagattagtagtctgttgacttgctccgtgggacaccctaagacttcttgtaagcgtcactctgacaatttaaactactgctctttatggataacatgtaattgactagtgaatccagtggcagtgcatctttacagttttgttgtgacttgggtatttgtttggttccgtagtctttatttgtgattatcattgaccgaatgggtcatttagtatgtcccaccttaggaaatgcgaagaaagcgtgattcactttcttgagtttgcctgcaaggtcagcattgatcaaactgttgtcgtggataatgtaaatcttgcacacaaaaaaaattctgtaaaaccttactgacttagcattcctactttatatggttaaagaggaaacaccgacacatcgttaactatgtttggtgggtacacagttttttagacaatttaaccttatggttgtcatgtgtcgaaaaaggtcactgagagatggttgtcgtagcgagtaaacagaaggaattcatgggagctgatagaattattctttctcatatgcaggaaggatttgtaaatgccactttttggagtttctggccttttggtttagtcatcaagactctagctagcaattatctaaagaaacaaatgaaatgctaattgccaccaagatggcaaaattgccggaaaacagcagttgagggagaaacttcattgcaatgctaacaataccagtgcccagatcatgacaatcagagccagtagcaactgaaccttaagtagccaccaagtttggcaaaacttctgcaactctagttgagggggaaattttttgatgcgacttgttgatgcacaagctgaacggcccaagatttctgtagttgctgcttgaaatattcttgataggaagggcaattttgtagatgtctcgagagtgtaaaaaacatgcactgtagttctctttttacctgtaagataagattgtatgcagtatgcactatttgagttgtaacgggataagttcacgaaa

SEQ ID NO: 100134 - DNA, 1859 bp, Zea Mays
tccgctgtttcccctgaccagcagaccgctgccgagagcccgagacagtgcccgctggtgagttcgaaaccccagagctttaaagcttttccgattccgcaatgctcaccgttcggttccttctcgtaccgagccgcgggtagccagccaaccgccgacgcagtccacaagcgatgaagcgcttcttccagccagtgcccaaggacggctccccgtccaagaagcggctagcgggtgctgctgaaccgggcgacggccccacatcagccggtgccgccaccggcgctggcggggatgtagaggggaggcccaccgaggagccgttcaagttcctgacgtggaacgccaacagcctgctcctccggatgaagagcgactggcctgctttctcgcagctcgtcgcccgccttgaccccgacgtcatttgtgtccaggaagtgcggatgccggcagctggttccaaaggggcacctaaaaaccccagtgaactaaaagatgacacaagcttgtcacgggatgaaaagcaggtagttctacgtgctttgtcagcttcacctttcaaagactaccgtgtctggtggtctctttcagattcaaaatatgctgggacagctatgtttataaagaaaaagtttgagcctaagaaggtgtctttcaacttggatagaacatcttctaagcatgaagccgatgggcgtgttataattgcggaatttgaatcattccttttactgaacacttattctccaaacaatggatggaaggaggaggaaaatgcatttcaaagaagacgtaagtgggacaagaggatgctggaatttgttcaacacgtggataaacccttaatctggtgtggggacttgaatgtcagtcatgaagaaatcgacgtcagccatcctgatttctttagcagcgctaagctgaatggatacaccccacccaataaagaggactgtggacagccaggattcaccccagcagagagacggcgttttggcaacatattattccaaggaaagctggtagatgcttacaggcacctgcacaaagaaaaggacatagacggtggcttctcttggtccggtcatccaattggcaagtaccgaggaaagagaatgaggatcgactacttccttgtttcggaacagttaaaggacagaatagtttcatgtgaaatgcatggccgtggcattgaattggatggattttatggaagtgaccactgccctgtttcgcttgagctttccgaagctgtagcagaagaagcaccaggacagcccaagccatccatctaaatataccaccatggtggtcattgttgagacatttccggtccttcattaaacctgactgttccatgcattgcctactctaggtagctgaggtttgattgtaggtattattatgatcccagtaggttaccagttcctgtggtcagggctggtatagtttagggatcattgccatttaagcagtgcaatttggacatctcattctgcttgaaatgttgtttgtctaagagcagccatggactacctaatacctcatggggatcgaagagattaatcccttcgtatccaattttaactagcaagggatttaatccacccctaacaagcacaataaaatcttgttcgttttttctaccagaaccaatggaattaaatctcgatggggtcttaattcttttggcctatgatatgatatattaccagagcaatcgtgcccccggtgctagttttaactcgctgcccggatctcgacactgatgaggcaagtaaacggcacaaaaatccacatgcaagcaactgacaaaataagagacaggatactaaaaaaaaatccacatacaacaacaa

SEQ ID NO: 100135 - DNA, 1480 bp, Zea Mays
tccgctgtttcccctgaccagcagaccgctgccgagagcccgagacagtgcccgctggtgagttcgaaaccccagagctttaaagcttttccgattccgcaatgctcaccgttcggttccttctcgtaccgagccgcgggtagccagccaaccgccgacgcagtccacaagcgatgaagcgcttcttccagccagtgcccaaggacggctccccgtccaagaagcggctagcgggtgctgctgaaccgggcgacggccccacatcagccggtgccgccaccggcgctggcggggatgtagaggggaggcccaccgaggagccgttcaagttcctgacgtggaacgccaacagcctgctcctccggatgaagagcgactggcctgctttctcgcagctcgtcgcccgccttgaccccgacgtcatttgtgtccaggaagtgcggatgccggcagctggttccaaaggggcacctaaaaaccccagtgaactaaaagatgacacaagcttgtcacgggatgaaaagcaggtagttctacgtgctttgtcagcttcacctttcaaagactaccgtgtctggtggtctctttcagattcaaaatatgctgggacagctatgtttataaagaaaaagtttgagcctaagaaggtgtctttcaacttggatagaacatcttctaagcatgaagccgatgggcgtgttataattgcggaatttgaatcattccttttactgaacacttattctccaaacaatggatggaaggaggaggaaaatgcatttcaaagaagacgtaagtgggacaagaggatgctggaatttgttcaacacgtggataaacccttaatctggtgtggggacttgaatgtcagtcatgaagaaatcgacgtcagccatcctgatttctttagcagcgctaagctgaatggatacaccccacccaataaagaggactgtggacagccaggattcaccccagcagagagacggcgttttggcaacatattattccaaggaaagctggtagatgcttacaggcacctgcacaaagaaaaggacatagacggtggcttctcttggtccggtcatccaattggcaatgagattaacttctctgcatatgcctctaggtaccgaggaaagagaatgaggatcgactacttccttgtttcggaacagttaaaggacagaatagtttcatgtgaaatgcatggccgtggcattgaattggatggattttatggaagtgaccactgccctgtttcgcttgagctttccgaagctgtagcagaagaagcaccaggacagcccaagccatccatctaaatataccaccatggtggtcattgttgagacatttccggtccttcattaaacctgactgttccatgcattgcctactctaggtagctgaggtttgattgtaggtattattatgatcccagtaggttaccagttcctgtggtcagggctggtatagt

SEQ ID NO: 100136 - DNA, 1182 bp, Zea Mays
atgcgcgcagcctggtgggacctggtggggctcgggctcggtggcatggtgggcgccggcgtgttcgtgaccacgggccgcgccgcccgcctctacgcgaggcccggcctcgtcgtgtcctacgccattgccggcctctgcgcgctgctctccgccttctgctacaccgagttcgccgtcgacatgcccgtagccggcggcgcctccagctacctcctcgtcaccttcggtggaggtgctccagcgttggataaaccgaaacaacgaacatccatctttttaggaaggagtactgcacaagatagatcccaatgccccagaagcatgtccttcatccctgagcgtatccgtgttatgggaagatctccagcattcactgcattggcagctacttttgaaagttcaagcaacagaaatcttttgactccacgtgtagttaagaaactttacctgagatatgttacacctgattcatcgaatacttccaagtcatctgtaattgccgctctggctggttctttggatcgcccttctcaaactcctgctccagcattcgtgaaagatggttctgagtcagagaagccaaaacagaagggagatggtaaaggtgttcatactgtggtcactcgagttgaatctctgactataaatgaagatgtaaaagaaaacaagccagaagatgaagacagccttccaatttacctgtatgaacgtctgaagaccacaactactgatcctgtcactgaaattgatgtcacgaggcaagaggtgatttcccgttctcacattactttcttgttccaaaaaaatgtaatggtcacattattttcaatttggcatgcaggggagttcgcggcgttcctgacgggggcgaacctgatcatggagtacgtcttctccaacgtcgccgtggcgcgtagcttcacggtgtacctcggcacggcggtgggcgtggacgtgcccagcaagtggaggatccccgtgccgggcctgccccaggggttcaaccaggtggacctcgtcgctgtcggtgtcatcctcctgctctccgtctgcatctgctataggttgaggttttgcctacaagtgtcattctacttgtcttttctctttgttctcagtcttgtctgttctccgcttgctgacacagaacttttggcctccgattttcaaatgttttag

SEQ ID NO: 100137 - DNA, 882 bp, Zea Mays
cgctggttgatttaataagaagatagagtctctttaacaagatagcctggcccaaggggtatccagagccatggccgattgatcaaaaatcaatggccaagattaaatctatcccacccatgaaccagtatctactggtgaccacaggatccaaaatcagcggccacgatcgaaatctctaagatctaatcctgtccacatgatcctgcctcaacggtcgagatcagcctacgcgaagtggtacgcgcgctctcatctcagccgcacaaatcgagatcgacgatctagccaccgccttctacctcctgccacggccgggcagcaactacgaacggccggggccacccccacgctggaacgaatggcgcaaggccctgaggccacattctagtgctacaaacggcacaagggacgcggaggccttatggacacagaaggggaaaatcttactggtagatttggacgctgcagcgctgcacgcgacgattagtgccccgatggcaatgcacagcttcgtcgaaggattgcatgcacatcagctactctggtcaccgagcacccacgatgaagtcacgggtatgtgcggcatgcactggtcgtcatccaccagcgccgcttggccattgctgaggacatgggcgaggatattactatggcggcaatctcagctctccacatcatagcgctctctggtgcttcagtacgtcaatggccaaggggagtcatatggagcttgattttatatcccagggcgagggtgaagcaaccagatcagccccgggatctccggtgtttgttgagatcacgtactgcacgactcgatttggcttcagatgatgctgtttgcaagttagcttgttgacatcacccatgacctcatgg

SEQ ID NO: 100138 - DNA, 372 bp, Zea Mays
atggcgatgatgaagaagaagggcggcgccgcaacaacagcggtggcagcagtggcgttggtcctgctggcggcggcggcggttagggcggacgtgaactgcgcggacgtggacgcaagcctgcgcccctgcgtcggctacgtgacgggcaaggaggcggccccggccgccgagtgctgcgccggcgtgaagcggatcagggccatgccgtccggcccggcggagcggcggcaggcgtgcgagtgcgtcaagcaggcggcggccaattaccagccgctcaacgccgacgccatccgcgacctccccgcgcagtgcggcgcgccgctgccgttcccgctcaccctcaacttcgactgcaccaccatcttttaa

SEQ ID NO: 100139 - DNA, 1816 bp, Zea Mays
gtcccataaataggccagcatttgcaatccaactttagctgccatctgtttctgaaccatggatccatttgttctctccatcctcttatgctcatcgatctttgttgtagtgtactggagaaggctgaacagcatgaggctaagacttccaccgggacctccaacatggccaattttcggcaatcttctccagttgagccctcttccccacaaagactttgcccaattttgcaccaaatatggccctctcgtctatcttcgcctgggaaccatcgatgccatcaccactgatgaccccgaagtgatccgtgaaatactcatccggcaagatgaggtctttgcttcgcggcctcggacactggctgccgtccatctcgcctatgggtgtggtgatgtggctctagctccactgggacccaactggaaaaggatgaggagagtttgcatggagcacttgctgacgaccaggcggctcgagtctttcgctgctcaccgagctcaggaggccgagcacctctgccagtttgtgtgggctaaatctcagtccgggaagcccgtgaacctcagagaggttctcggtgccttctcgatgaacaacgtcacgcggatgctgctggggaagcagtactttgggatccagtcggcaggccccggcgaggcaatggagttcatgcacatcacccacgagctgttcttcctgctgggcctgatctatctcggggactacttgccggcttggaggtgggtcgacccgtacgggtgtgagaagaggatgagggaggtggagaagaaggtggacgacttccaccagaagatcattgatgagcacaggagagctagggaggccaggaagagtcgttcctccgttgaggaagatggcggcaacggcaaagatgagatggacttcgtcgatgtgctgttatctttgcctggtgagaacgggaaggagcacatggacgacatggagatcaaagcgttgatgcaggacatgatcgctgctgctactgatacttcatcggtgacgaacgagtgggtgatggcggaggtaatcaagaacccgcgcgtgctccggcgcgtccaggaggagctggacgcggtggtggggcgcgaccggatggtggcggagtcggacctggcccacctcccctacctccggtgcgtggtgcgcgagtcattccggatgcacccggcggggccgttccttatcccgcacgagtcgctgaaggcgacgaccatcatggggtaccacgtgccggcgcgcacgcgcgtgttcatcaacacgcacgcgctggggcggaacccgcgcgtgtgggactccgtgggcgagttccggccggagcggcacctgccggcggaggagggggcgcgggtggagatcagccacctgccggacttcaagatcctgccgttcagcgccgggaagcgcaagtgccccggcgcgccgctgggcgtggcgctggtgctcatggcgctcgccaggctcttccactgcttcgactggtccccgcccgacggcctccgccccgaggacgtggacacccgggaggtgtacggcatgaccatgcccaaggccacgcccctcgtcgccgtcgccactccgcgcctgccgccgcacttgtacggcggcggcggcggcagctcggctccttagttcgatgacactttgacgcacgtgcgctgcactgccagtctcattagtcattatacgcatgatgtacttccctccatatacaatacaccgcataaaccaaacgatgaatgaaatgtagtcgttctatggtttcaatatgagaagatataattgatggttaacatc

SEQ ID NO: 100140 - DNA, 402 bp, Zea Mays
atctgtttctgaaccatggatccatttgttctctccatcctcttatgctcatcgatctttgttgtagtgtactggagaaggctgaacagcatgaggctaagacttccaccgggacctccaacatggccaattttcggcaatcttctccagttgagccctcttccccacaaagactttgcccaattttgcaccaaatatggccctctcgtctatcttcgcctgggaaccatcgatgccatcaccactgatgaccccgaagtgatccgtgaaatactcatccggcaagatgaggtctttgcttcgcggcctcggacactggctgccgtccatcacccacgagctgttcttcctgctgggcctgatctatctcggggactacttgccggcttggaggtgggtcga

SEQ ID NO: 100141 - DNA, 2075 bp, Zea Mays
cgctctagcctctggcaacggcgggtggcggcattgcggcaatggccgcgctgcggttatcaagagcaccggccacggccggcctggccgccgcgggcgttccgcaccgcctcgcgaccccagagcatccgctgccggtgcgggttctacccaacagggcccacctcaacgcgctgctcacgtcctacggccgccgcggccgcatccaggacgcccagcagctgttcgaccggatgccccgccgcgacgtcatctcctggacggccctcctcaccgcctacgccgaaggcggcgacttcgcctccgcgcgcctcgtcttcgacgacatgccccgccgcaacgccgtctcctggaacgcgctgctctccctctacctcggcgcggggcggcccgcggctgcgcacgcgctgttctgcaagacgcccgccaagaacgccgtgtcctacggcgtcatcataacgggcctcgccagggcgggcatgctgcgggaggctcaggcggtttatggggagatgccaccgcggttgagggaccccgtggggtccaacgcgatgattttagggtacctcagggccggggagattgacatggcgctgagggtgttcgatacaatggctgcaagggacgtcatttcttggagttctatggttgatgggctatgtaagtatgggactgtgtccgaggccaggaggctgtttgaggcaatgccggagcggaacgtggtgtcctggacctcgatggtccgaggatatgtgaaatgcgggatgtacagagaaggtctcttgctgttcctggacatgagaagggaaggtgttcaggttaatgcgattacactctctgttgtactagatggttgtgctcaggccagtcttgtcggcgaagggatccaggttcactgcttgatgacgagaatgggctttgtaactgatatatttttggatggttcactgataataatgtattctagatttggctggatggttgatgctagaagggtttttgctttcatgaagcagaaagacatagtatcttggaactcattgatcactggttatgttcagaataacatgattgaagatgctcatgtgctgttcaagttgatgccagagagggatgctatttcttggacgtcagtggtggttgggtttgctaatagaggttggatgagagagtctgttgaactctttgagcaaatgcctgtaaaagacgatattgcctggactgcagttatttctagctttattgcaaatggaaaccatgtgagtgtggtgcgttggttttgtcagatgtcacaggaaggatgcagacctaataccgctgcttttagttgtttgctgagtgctttggctagcctggctatgctgaatcagggattgcaagctcatgcttatgcagtcaacatgggatggatatttgactcagctgtccatgcttctttggtgacaatgtatgcaaaatgtggtaggttggctgaggctcatcgtgttttctcatgcattagaaatccaagccttgttgccattaattctatgatttcagcatttgcacaacatggcttggctgaagatgcactcaaactttttaacagaatgcaatatgatggccaaaggcctaatcatgtgacattcttgggaatactgactgcatgtgctcgagctggtttggttcaacaaggctataactactttgaatctatgagatcagtctatggcattcaaccaaaccctgaccactacacatgtatggttaatcttttaggccatgcaggcttccttgatgaagcattggaaatgattaattcgatgccccagaaagattatcctgatgcatgggcagctttgcttagctctagtagcctccattctaatcttgatttagcaaaactagcagcacagaggcttcttgagatagatccttatgacacaacagcttacagggtcctgacaaacatgttctcctcagcagggttgaagggagatgaagagatggtaaaagttgcacaattgtccaacatggctagtaagaggcctgggtatagcctcatcatacaggataagactacagaaaataactag

SEQ ID NO: 100142 - DNA, 1560 bp, Zea Mays
agtgttcatgtctcatccagttcaaatgaagtgacaggaaccattccagagacgaatggaggcgatcatcatatacctggaagctcttttcatgtttagtgaaggtctatgacatgtctgatagtcaaatgaagctaaatgattttatttcaagccttgttcttgagaggatggtcaagattaatttgagtagggtgacttcataatggacgacgaggaagaagtggaaggagaggaagaggaacaaaagagtgatgaccagaagcgaagaaacaaaactaaaaagaaaaggaagagtgctatagaggagcaacggtaccaggacgcgtcaaggttgacaaagctatctgggaccacttttgtaattgccaactcttcactgattattttcctatatgttgctccagaataaatggatcatagtgcggtggtcatgggattgggatctgctccgtatttgcagggtgaagccttcgtgtctcctcgagggaaagtcactgacctttcttgggacgtggaccactgacggcccccgtcatcccccatgacggtgatcctagggtgaagccttcgtgtttcctcgagggaaatctaccagtgcgggattgatttagtcagcaccattggacacagggtttagttccattgcctggacccatcaatgaatcatggtgccaaggtcttgatggttcgacttcaaggtactgatattctccaggactattgttagcatcccttgtggtccatctgcattagcagtgaagaaagtcgcatggggacttgcttgatatgttgttattgctcagacatggctgagaaggaggaaacaaagggccgctgccctgcctgccacacacgttatgacaaggatatgatcgtcaagatggccgccacttgtgacaggacagtggcagataaaaatgcggagaagaagcaaaaggcccaaagggttaagccaaaggcagcaccaacagcaacaacaacatcaaccgtagaatctaagaagcatcttgctactatcagggttatccagagaaatctggtgtacataattgggctacctgcgcatttatgcaatgagagcgtacttgagcgtagggagtactttggtcattatgggaaagttttgaaggttttagtttcccgtccgactgggcctccctctcagcaggcatcagcaaacagcagtattagtgtgagatatacgtggagcgtcagaattatatgtgcatctacaagaacagttacaacaattctccatcaggttgatgttcatacatctcagatataaatgtgggggagacggtgcctcatcaatgatgagtaggttgattctcatctagcggcaccattgctcactacaactggtttgcttgagcaacttaatgtcactctcaagaggaccctcctttcgaccgacaccctgaagcaccacacaagctttagaaaagtcggaattgtacttcgtatacataaattacatgatattatatgttcatgtaattctatgttgattctttagaaataatatatatgatattgtaatgtgtgttcgacatc

SEQ ID NO: 100143 - DNA, 1726 bp, Zea Mays
agtgttcatgtctcatccagttcaaatgaagtgacaggaaccattccagagacgaatggaggcgatcatcatatacctggaagctcttttcatgtttagtgaaggtctatgacatgtctgatagtcaaatgaagctaaatgattttatttcaagccttgttcttgagaggatggtcaagattaatttgagtagggtgacttcataatggacgacgaggaagaagtggaaggagaggaagaggaacaaaagagtgatgaccagaagcgaagaaacaaaactaaaaagaaaaggaagagtgctatagaggagcaacggtaccaggacgcgtcaaggttgacaaagctatctgggaccacttttgtaattgccaactcttcactgattattttcctatatgttgctccagaataaatggtaagtgttgatcggtaattcttgtgaacgtaggtaatactgaatctctgactgtttgtgacctatatcccctgaaaacctgaatctcagattgctttagcttagcgcctacatggcagtcctcttgtcgtgaacattttgatctgtgttccgtatatgcttgtaggatcatagtgcggtggtcatgggattgggatctgctccgtatttgcagggtgaagccttcgtgtctcctcgagggaaagtcactgacctttcttgggacgtggaccactgacggcccccgtcatcccccatgacggtgatcctagggtgaagccttcgtgtttcctcgagggaaatctaccagtgcgggattgatttagtcagcaccattggacacagggtttagttccattgcctggacccatcaatgaatcatggtgccaaggtcttgatggttcgacttcaaggtactgatattctccaggactattgttagcatcccttgtggtccatctgcattagcagtgaagaaagtcgcatggggacttgcttgatatgttgttattgctcagacatggctgagaaggaggaaacaaagggccgctgccctgcctgccacacacgttatgacaaggatatgatcgtcaagatggccgccacttgtgacaggacagtggcagataaaaatgcggagaagaagcaaaaggcccaaagggttaagccaaaggcagcaccaacagcaacaacaacatcaaccgtagaatctaagaagcatcttgctactatcagggttatccagagaaatctggtgtacataattgggctacctgcgcatttatgcaatgagagcgtacttgagcgtagggagtactttggtcattatgggaaagttttgaaggttttagtttcccgtccgactgggcctccctctcagcaggcatcagcaaacagcagtattagtgtgagatatacgtggagcgtcagaattatatgtgcatctacaagaacagttacaacaattctccatcaggttgatgttcatacatctcagatataaatgtgggggagacggtgcctcatcaatgatgagtaggttgattctcatctagcggcaccattgctcactacaactggtttgcttgagcaacttaatgtcactctcaagaggaccctcctttcgaccgacaccctgaagcaccacacaagctttagaaaagtcggaattgtacttcgtatacataaattacatgatattatatgttcatgtaattctatgttgattctttagaaataatatatatgatattgtaatgtgtgttcgacatc

SEQ ID NO: 100144 - DNA, 563 bp, Zea Mays
atctatgtaattatgcagtgccttgtcattgatgaagccgatcgcatacttgagcaaaactttgaggcagactgttcttttttctgctacacagactctagatgttagtagatcttttatgctgcttgtagtcaacttttcattcatgatttatataatttgctcttcttatgcggtgatgcccacaggttgaaaaaattgctaaactgtcatttgagaaaaatgaagtaaaaaaagcctgattatgttggagttgatgatgataagtcaaaggctactgttgaaggcctgcagcagggttattgtgtcatttctagcgataaaaggttcttggttctgtatgctttcctaagaaagagaagataatggtgttcttctcatcatgtaattcagtaaagttccacgttgaacttctgaatttctttaggatagagtgttttgatatccatggaaaacagaagcaactgaagcgaactactacattctttagcttttgcaaggcaggaaagggcatcttattgtgtactaatgtggctgcccgtggacttgatactcctgacgtg

SEQ ID NO: 100145 - DNA, 1167 bp, Zea Mays
atgcccgcgcctccctcccgcttccccaatccctaaccgctcccgctgctgccgtcgtcgtcggagtgggggcgccgagaggggaggggcatccggccgctcctgctcccgaggggaggcggcggcaggcaatggcgcgacgggtgcggccgtcgcacctgatgctggcggtggcggcgacctatctcctcctcatctccctcaagttctgtcgcgtgctggacctggccgccgccgacctcgcggcgaccccaccgccgctgccgctgtcgccgccttctcctcgccgtcctcctacgaccacctgcccccgctcgggtcctcctcgtcctccgacgccaccgccacttccacagcctctccgttcccggtccgccccttctggcaccgctacgatcgcgtgtccctccccggcccgacctcgcgtcccgcaaccgctctgcgctcgaccgcatggccgacgacgcctgggcgctcggcctcaccgcctgggaggacgctgccaccttcgcgggggacccctgggcgctgctcgccgccgccacctcccgcgcctccgacgccgccaagtgcccctccgcggtctcccagcgcgcgcggggccgggtcgtcttcctcccctgcggcctatgtcgagaaattcaatgcaacaaagcctgtccaatattcccacggctggaagttctgccagtatggttgcctggagaactactacacggcccactatcagtcacctaggcagatgttgtgcttgtgggataagttgatccgtggtcaggcatcctgctgtaactacagatagctaagcgaagcaaaggattgctggatgctgtcctcgcttcatcataccccagccaggtttagtttggttggctggtgttctcctttttgacatgatcaccggatcagcatcgatagtgtaggtgttgttgctcctccattgccgactcaatatgagctaaatgcatgggtgtggtaggagcttgaagatttaggaagctccaaccagttggttagtgtttttacacgatctgtattggtccaactgtggtgttggcgtccttgttcttgtaattgatccaattttgatgtggtaggccagattagaatgtccagatgagttgtacgtctccattattttgttatatataagttataactacaaaa

SEQ ID NO: 100146 - DNA, 1619 bp, Zea Mays
cagcagcagcagctgctgcctgctgctgtctagtccatcttcatcctccccatcgcccgactggatttctcccccgaattcgcacctcccccctcacttcgctgtgtctcatcaacgccggcatcaccgcgaggactgggccagctctccctccctttctcctccctccgccttcattgctgacggcgacgactgggcgagctctaccgccgctctgcgctaggtgcccaggtcttcctcgggcacttcaccggcgacgagcacccatcaggagcgaaatggacgaggctgttcctgctttggctaccggccaagcttcaaccgacgccgtgacagagcagcctgtgaatgtgtacatatgggacatggatgagacactcattttgctcaagtcacttctggatggctcatatgctggggcttttgatggcctcaaggatcatgagaaaagtactgaaataggaaagcgatgggagaacctcattcttgaactctgtgatgagcacttcttttatgaggagattgagaactacaatgaaccctatctcaatgccttgaatgaatatgacgatgggagagacttgacctcatatgattttgaggctgactgttttagttcaccatatgatgatgcgaacaaaaagaagcttgcttacaggcatcgtgctattggagagaaatatgcaaagggtttggaaaaggttctggacggacacatggtcaaagtctgcaatgatcagtacagtttgactgacaaatatactgatggctggctgtcttcagctcataagttactggaagaagcattgggcaaatcagcatcagcaccttcagccaactcttcaagcatcaactgcatagttacatcagggtcactgattccaagccttgccaaatgtttgctgtatcacctggatgatgtggtctcatctgagaacgtctacagctcatgggaagtgggtaagctgcagtgcttcaaatggatcaaggagcgcttcgacggtccaaacgtccgcttctgtgcaatcggtgatggccacgaggagtgcagtgctgcgcaggtcatgaaatggccattcatcaagatcgagttccgccctgaagcccatcacaggttccctggcctagacttgcccacagtgcagacctacatggatgtgatatacgagtcatcgagcaaagatggttgaccgacgattgatgtcgattctgttttctcctctgacctccaccacccatggagctattgtttgaggaaactgtaagcaaagagatgtcgtgggaaaggaacgtgtcgtcctccctagatctttcaccttggcgaattaggaggcaggtgtgataaataagagtcttgctagttcgtcgtcgtcgtccatgttgtcatagatcctgtcttgtgtgttcatgttactgtgatgcaggcaatggtgtgttgtgtccgggcgttatttcctgtgttgtgctttgccaatttgccagcttcagtttatgtgtatatgctttttaggctgtcttcggcagatcgtgtaaaataggggacgtgacagtgtagatgacaccgtttaacttgtttttaaaatgaagtttgaaatatacacacatcatagttcatcatc

SEQ ID NO: 100147 - DNA, 1517 bp, Zea Mays
accgctggacgccaccgccccgcccctcctcggcgccgccgctccatccaactgcctcaacgccaccatccatccaacctcctcggtgtctcctcctcactacgtggtcgtgatcaagatgccccctggaaggatggatagagaaaggacacgcaaagaccttggtgaggtgccaattactgagtatgaaaaggagagggctttaaatgtgatgaggaacaacaaaatgttgagtagccttggtataactggattaacatcagttattcgatcaagtagtacaaggaagaactctatcgctcgtgaagactttgatccattgtatgaacctgatcatagtgagaacaatgatcatcatgtggctgatcaggatgaacctttctacattgaaagaaggaacaccaacatgtctattggttttggaggaacaaaaggatccaagagagtggtagcacctaatgtagaagaccaagttggtagagtaactatccttagttgagaaagatatacatggttcgactgtaaatacagatgagcacacattgatttctgccaattttcctgcacaccatgatgacgagattaagatgtgtgatgaagggaatagacatcctgaggttcctatgcaagctgcaatgcttgcatcagaaggaggaattgtaattaggcaacatatgccgatcctaacacattggaaggaatacaagaatgacaaatcctatttggaagacttcgtcggtagaattggtggtcaatttgccatagacaccaaaaacaaagatgtcaaatatgcatgtgctgatttgatgaggtgtaatcagcgacaaatgagttataagctcaagaaggcttactttaatggtgtggcagctgacaaagtgagaacaacatcaccgttgagcactatgatagatgagcaatggatgcaactagtgaatatgtggtctaccccaaagcacaaggacaaatgtgtgaacaacaaagtgattcgtggaaaagttcggttccagcaaaagacaggatctcggagttacattgcacatatgcatgccaaacaagccaaatatggagatgcaccaccaagtgcgattgatctttttaaagagtgccattgtagtaggaaaactggttttgttgagcctgtaaaggaagcaattgacacaatggaagcacttgtggttgagcctggagtagaagggaaagaatctaagacccctacagaagcagttgctcaagtgctgtcttcatcaaaaattcttcataatattggtcttgtacccgccacaaagaaaagttgcaatggtgatgatcctacacgtgtggcagaactcgaggctaaacttgaatcagagaagcaaaactcattagcagttagagctcagttagatgccctaaagaagaaggtagaagaatcagaagaagcaagggctaaggagttagaaaagattaatgatctgcaaaaaggagcagatgagaccaatgctgtccttcgtcgtctctttagcctcaataagtag

SEQ ID NO: 100148 - DNA, 2275 bp, Zea Mays
ctcccatcgccagggcgtcggagcgagctcattctcaactcgactcaagagctctgcctcctccatcttcccttctctggcctccggagccacgctgatcagagatggaggcgaatccgaagaacaccttcacgatcaaagtggaggacgggaagcccgggaaggacggccggctggcggtcggaccggtgttccggagcgttctggccaaggatgggttcccgcagcttgagcctgacatgaagacatcatgggacgtgttcagggtagcagcagtcaagtatgccgacaaccggatgctcggatggcgtccgttcaaagatggagtgccagggccctacttgtggaaatcatacaaggagatctacgacgaggtgctgcaagcaggctctgcgttgcagaagctgggagtgcagccaggttcccgggtggggatctacggagcgaactgtcctcagtggatagtggcaatgcaggcttgcaatggctatagtctagtctgtgtcccactgtacgatactttaggtgcgggagctgtcgactacatcatcgatcatgccgagatcgatgttgtcttcatacaggacaagaaaataaaagagatactgtccccaaactgcaagtctgccaagagactgaaagcattggtggcgttcacttcggcgacaactgaacagaacaaagaagcggatcaaattgggatcaaaatgtatgcctgggacgatttcttgaaagtggggaaggataatcctcgtcaaccttgccctccgcaagcaagtgacatctgcactgtcatgtacacgagtgggacaagcggacagcccaaaggtgtgatgctgacccatgaaagccacgccatgtatgtgaaaggggtggacctcttcatggaccagtttgatgataagatgacaacagatgatgtcttcctgtcgtttctcccgcttgctcacatccttgaccgcatgatcgaagagtatttctttcacaaaggggcctcaattggctactaccacggagatctgaatgccttgagggacgacattgtggagctgaagccgactctactggttggggtgccccgagtgtacgaaaggatttatgaaggtatcttgaaggccattgcggaactcagacctctaagaagggtcatctttaatgctttgtacaaccgcaaactggcaagcatgaaagcaggctactcgcacaaaaccgcttcacctttcgcggacatgctggcttttcgcaaggtcaaggcaaggcttggaggtcgtcttcgcttactgatttcaggaggggctccgttgagtaatgagatcgaggagttcatgagagtgaccacctgtgcatacttcatccaaggctatggtttaacagaaacactgggacctagcactgtctgctacatcgacgacatggccctggtcggaagcgctggtgtgcctgccacctacaccgaaattcggctggaagaagtgcccgagatgggttataatccactcggcgttccttcgcgtggtgaaatctgcatccggggaaaatccctcttcgctgggtactacaaaagtccagaactcacaaacgaagccatcgttgatgggtggtttcatacaggtgacattggagagatgaccccagacgggatcttgaaggtgattgacagaaaaaagaacatatttaagctgtcgcaaggggagtatgttgcggttgagtacctggagaaagtttatggcttccctccactcgttgaagatatctgggtatacggggacagtttcagatcaagtttagttgcagtagtcaatccacaccaagaaaacacaatgaagtgggcagagtccaatggctacaagggttcttttgatgaaatctgcaaacttgaaggactcaaagagtacatcctgaaagagctggcagccgttgcgcagaagaacaagctacgaggcttcgagtacatcaaaggcgtagtgttggatcctgtgccttttgacatcgagagggatttggtgactgcaacaatgaagaagaagagaaagaatatgctgaactattaccagtctgagattgacacaatatacaaaaagctggaggcgcagaagagtgctgccagagctaagtgaagagatgtgccctattcgaccatcagctgaaaacaagggaaacgacaccgttgtaaatttcacattaatattgcgaagtaacaactcagggctatgagtaaggaataaaatgtatattgtgcctttgtctatagtaccggatgattcccaaatcccaa

SEQ ID NO: 100149 - DNA, 719 bp, Zea Mays
acagttcaacctactgacaaacatctagacaaacctattcaggtttcagagtcagttttgtagcgatgtaatgtttacgatggttatatttgtaaccaagtgatgctttggaactgggtttcaggggaaggataatcctcgtcaaccttgccctccgcaagcaagtgacatctgcactgtcatgtacacgagtgggacaagcggacagcccaaaggtgtgatgctgacccatgaaagccacgccatgtatgtgaaaggggtggacctcttcatggaccagtttgatgataagatgacaacagatgatgtcttcctgtcgtttctcccgcttgctcacatccttgaccgcatgatcgaagagtatttctttcacaaaggggcctcaattggctactaccacggagatctgaatgccttgagggacgacattgtggagctgaagccgactctactggttggggtgccccgagtgtacgaaaggatttatgaaggtatcttgaaggccattgcggaactcagacctctaagaagggtcatctttaatgctttgtacaaccgcaaactggcaagcatgaaagcaggctactcgcacaaaaccgcttcacctttcgcggacatgctggcttttcgcaaggttacatgcttctttgacctgatatctacctaccttctgagaacaaaataaacgtatacagccagattactacttctgcagaaag

SEQ ID NO: 100150 - DNA, 217 bp, Zea Mays
cgtaacttatgctaagtaacatgaatatcattttttcatgcacgtttttccaagttttgagtgacctgcagttcaaatttgaattttccgaagaaattcaaataaacgaactaaatctactaacgattgaaactatgttataattgttcacaaatgatacatgtaggtctacatagtgtaggaacataccacaaaaagtttgggagacaaaattaaa

SEQ ID NO: 100151 - DNA, 1574 bp, Zea Mays
ggtggtggcgaccgccgaccggagtcagcagctgatgggggctcgtcgtcgttgtcgtcaacggtcagagctcgcaacctgtttttccttgcccagcccgggaccccggtggaattgtttagtacggcgacacgcgctccgtcctcctcacgcggctcgaactatataaacccctcctcctcctcctcccggtctcgtcgtcgcctgtctcgatccgcctccatcaacaacgtctcagtctcagctctcagtacacatcggcatcgtcgtcgtccatcccattttcttgcgtttctccaccgcagctgattcgagctcactcagaatctgatccgatccaccactgctctaacatggatatggacatggacatggccatggccatggtgggcttcgatgaggacatggaccaggtgctggcggccatgagccccgccgggagctccgcgacgtcgtccgcgcccaccgccgccgccgctccaccagccgtcgtcgcagcaggcagcagcgacgacgacgaggccggcgccgccgacctccggaggggcccctggacggcggaggaggacatcctcctcgtcaactacatcgccgcccacggcgagggccggtggaactcgctcgccctctccgcgggcctgaagcgcaccggcaagagctgccgcctgcggtggctcaattacctgcggcccaacgtgcggcggggcaacatcaccgccgaggagcagctgctgatcctggacctgcactcgcgctggggcaaccggtggtccaagatcgcgcagcaccttcctgggcgcaccgacaacgagatcaagaactactggcgcacccgcgtgcagaagcacgccaaacaactccgctgcgacgtcaacagcgcccacttccgccacatcgtgcgccacgtctggatgccgcgcctcctggagcgcgcccaggccgacgccagatgcggcggcgtacaggctccggccaccaccacggccagcgcgccgcccgcgtgttataactactacgacgacggccgccaacacttgctgcagcaacagggaagcgcccaccacggcgtgccggcggcgagcgaagctcaccaccaccaccaatactacagcgagccggcaggcccgacggcggcgacggccacggccctgagccccgacgacgcgtccagcgcgctgcggccgtcgtcgtcgctcacggcggacgacgcgtcgcattatgctgcagcttacgcttacacctcggcggccacggcgaccccgacgacagacgaccaacaaggcgtcctgcaccactgcggcgccgatgcaagaaccgggccaacgccgagtgacgccgccggtgacgacgacgtgtttgccgggacgacttggtcagagcttctcgccaccaccgctaccggcggccctcacgaggactgcagctccatgtccatgatcggcctgcagctgcaggactttgggatagggtatttcgagggcggcctctggagcctggacgaccttagcttagagcagccgtgcacgctgagctcacctgctgatgcatatcatcatcaccacgcatgcagctag

SEQ ID NO: 100152 - DNA, 1418 bp, Zea Mays
ccatcaacccctcaactctcagtacacatcatcgttgtccaaccctttttcttgctcttctccactgcagctgattgatcgagctcactcagcatctgacccggccgattccgatccaccactactctatgtctagcatggacatggtcacatggacatggacatggccatgatgggcttcgatgaggacctagaccaggtgctggcggcgatgggccccgccgacagctcggcgacgtcgtctgcgcccaacgccgccgcaccagcaccactagctgtcgtcccagcaggcagcagcgacgatgaggaggccgccgccgcggatagcgccgacgacctccggaggggcccctggacggtggacgaggacatcctcctcgtcaactacatcgccgcccacggcgagggccgctggaactcgctcgcccgctccgcgggcctgaaacgcaccggcaagagctgccgcctgcggtggctgaactacctgcggcccaacgtgcggcggggcaacataaccgccgaggagcagctgctgatcctggacctgcactcgcgctggggcaacaggtggtccaagatcgcgcagcagctccccgggcgcaccgacaacgagatcaagaactactggcgcacccgcgtgcagaagcacgccaggcacctccgctgcgacgtcaacagcgcccacttccgccacatcgtgcgccacgtctggatgcctcgcctgcgagagcgcgcccaggccggcggcgtacaggctccagctaccaccacggccagcgcgccgcccgcgtgttataactactgcgggagccaacacctggtgcagcagcaaggcgcccaccgcggcgtgacggcggcgagcgaagctcaccaccaccaccaatactacagcgagccggcaggcccgacgtcggcggccacggccctcagccccgacgacgcctccagcgcgctgcggtcgtcgtcgctcagggcggacgacgcgtcgcattacactgcagcttacacttacacctcggcggccacggcgaccccgacgacgaacgaccaaggctacgaacaaactacgactgacgacgacgtgttcgccgggtcgaccacatcggagctcctcgtcaccgctaccggcggccctgacgacgagtacagctccatgatcggcctgcagctgcaggactttgggtttgaggatttcgagtacggcctgtggagcctggatgacctttgctaacagcctaacagcagctgtgctgagctcaccaccaccatacatgcacaccaacctaggagtagtcgagtagtcgacaagcaagtcagtgaggcccggcccggttgtatcttgctcgaagtagattgaggggattgaattatcttctaggagtattaaattttggctaaagatagatttaattgtttcc

SEQ ID NO: 100153 - DNA, 1304 bp, Zea Mays
gcgttattaacgtgtcttccttctctctccggcgtcgcgtcgcgtccctccttcctccctctccatttccgccaccaccccccctctctctctctcttcttcttcttcaatcctccctccccgcgccggagttggaggagggagaggggacaagctttccggcgccgacgccgacgcggacccggcgccgacacgatccggtggatcaagtgcatcacacctttagggaggccccttggacagcagtttgtgctgcaaattctatatagctctgtcgcagcatggcctcggtgggcgtggcacgctcttctttgggatttcagaatggcacaagttctagcagtgacccagatcgtcttcccaacgagttgggcagtatgagcataagggacgacaaggacgttgaagatattgtagtcaatggcaatggggcggagcctggtcatatcatagtgaccagcattgatgggagaaatgggcaggcaaagcagaccattagttacatggctgagcgggtggtaggtcatgggtccttcggaaccgttttccaggccaagtgtcttgaaactggtgagaccgtagctataaaaaaggttcttcaagacaagagatacaagaatcgtgagctgcaaaccatgcgagtgcttgaccacccaaatgtggtggctctaaagcactgtttcttctcaaagactgagaaagaggagctttacctcaatttggtgcttgagtatgtaccggagactgctcatcgtgtcatcaaacattacaacaagatgaaccagcgcatgcctttgatttatgcaaaactgtatatgtatcagatttgtagagccttggcatacattcacaacagcattggagtgtgccacagggacattaagccgcaaaatctcctggttaatcctcatacccatcagctaaaattgtgtgactttggcagcgcgaaagttctggtaaaaggcgaaccaaacatttcttacatctgttctaggtactacagagctccagagctcatatttggtgctactgaatacacaacagccattgatgtttggtctgctggctgtgtgctcgctgagctgcttctaggacagcctctgttccctggagaaagcggtgttgatcagcttgttgaaatcatcaaggttctgggcacacccacacgtgaagaaattaagtgcatgaatccaaattataccgagtttaaattcccgcaaatcaaagctcacccatggcataagatattccgtttaaagatgcctgctgaagcggtagatctcgtgtccaggcttctacgaatc

SEQ ID NO: 100154 - DNA, 2132 bp, Zea Mays
ccgcggacggtggcctcggcggtgctccgcatccagatggcgctcctggacggcgcagcggcgtgcaacgaggctgtcctccacgcgtccgcgctcctctcccgcgccgactacgacgacgtcgtcaccgagcgcaccatcgcggacgcctgcggcaacccggcgcgcgccagccctctcctgcctccgccgccgcggggccccgcttccgcatcgccctcagcgagcaccgcgtctacgacctcgaggaggcgcgcagcttctgctccggccgctgcctcgtcgcctccaaggccctacggtgtcccgccagaccgcctcgctgcgctcgtcgagggctccgccgccggggacgggttagggtttgagggcgtggatgggaatggaaagatggagggcgagggaaggaaggttgaggtaaaggagatggaggtcgccggggctggggggtctcgctgcagtactggatggggcccttctatgccattgacattgagggttatgtgccacgccgtgaccgcattgcccaggggcaaaagccacaagctaagcagaacaaagttgctggatctgagcagtccagaaccgagaatgtggattatagggcttgtgctcctagtgaagatggcatgacaagttcaccttcattggttgaagcacacgcaagctcagaagtaatagctgagggaatggacggcctggttcttggtaagagtacaaggacacctggaaggaagaaaactaaaaccccatcaaagatgttggagcaagaggaagataacagtatgctgtcatcttgcatatgtgattccattgccaagcagctcgaggatgtagttttcgaagagagaaaaggcagtcagaaaattaaagtgagtagagcatcatcaagagcacagaagggtaagtctagaaccatgcctgctgaaagtgatggtcgtgaggtggactttacgagtaccatcattattggggatgcttcgacaaacttggaggaaagcggtatgaatcagtataactacttgtcaagttctgtattggtagacaatcatccctcatcatcttagtcttcagcaaaagattcaacacaaacttatgctgaacaactgtgtgaagaattcagtgaagcagtgaacattggaaattacaagacaagtgatgaaaagatgagacctgcatggaagtcatcgttgaaaaagttgctgggtctaagagcggtagacggactgttacatgggcagatgagaatggaactgtcctagaaactagcaaagcatatgaaagcccttctagtagcataaaacaacctgaggaaggcatagacagttcaccaaggttcgcatctgcagaggcatgtgctgcagcacttattaaggcagcagaagctatttcttcaggcacggcagaagcagaagatgtagtttcaaaggctggaatcattattctgcctgacatgcttagccagaaagaatatgacaattgcaaaaacactggcggagatgttgacccagtggcctaagaaacctgtacttctggatacagacatgttttaagttgatgactcttggcatgacacacctccagaaggttttagtgtaactctgtctgctttccgaacaatctgggctgcactattcggatggatatccaagtcgtctttggcctatgtgtatgggcttgaaaggggttgttaaatggaagagttgtggattgccaatgggaaggaatatatctgagaagacagttctgaaggatgggctctcgtctgagattagaagaactctagattcctgtgtttgtaatgccgtggcagttctcatatcaaacttgaggttgcagatacggtctcaaaattggagattagtctgggctacttgattgacacactgtcgttcgtagacgccctgccttctctgcgatcacggcagtggcaggctgtggttctggtaatgcttaatgcgctctctgttcgccagcttcctgcccttgctccggtctttccaaatccaaagctcgtgcaaaaggtgagtaaccaattttactttccactgaagatttttagtgcttaggatttttagtccatggtggacctgtttctcccttttggacgaactgtgctggcaaccacgccg

SEQ ID NO: 100155 - DNA, 649 bp, Zea Mays
agtgctgcaagttgggccgtgccgtgccggcccggcacgagcccgccgtgcttcgggcctcagttagtcgggcctagccagcacgaaatagagtcgggccgtgccttaccgggcctggcgaatagaagtaaggcccagcacggccctaaagcacgacgggcttccgtcgggccgtgctggcccaggcacgacacgcctcagttcctgataagcccgcatctcggcctctctgtcgccgtcgcgctggatccaagcgttctgcggtcgtgggctcgttcgctcgtggcgcagccccaggcggacgccaacacgacgcggtacctgcgcgtgcggcgctggccgtggggccggtacgcggcggagatccgggagccggccaccaaggagcggcactggctgggaaccttcgacacagccgaggaggccgccgtggcctacgaccgcgccgcgcgctccctccgccgtggcctacgaccgcgccgcgcgctcccttcaacacagccaagatgcttcgttccacacagggagtgggctcgtccgctcgtggccgcctggggctggacaactggattgctagggccgtactctcctctcctcgatggtggtacggtggagtactggagttggagaagaccgaatggatcagctg

SEQ ID NO: 100156 - DNA, 297 bp, Zea Mays
atgcataatcttcaatctagacaccaatatcagggagatagcgagatgaaaataaacttgcctggctcgtctccctggtggttgacggtttgctacttatctctgatgattagtcacaccaccatggcaccaccacaacagaaacgtggcagagcagatgtcgcactacagcctacctttcttcgagagcggacacctttggcttggtgtttatcgttgcctcgttggccacaagcagtggtgtcgcacaagatactactgactgcagatccgcgccgcctccttttcaggtcttaa

SEQ ID NO: 100157 - DNA, 1667 bp, Zea Mays
atgccattgtgtatgaatgggcagggattcggtggttttctcgacctgcgtgtgagaaggagcggctggagcgaaactatacggattggtccagcccacgtccgtgccgcctacccacagccggggttggccagcgctagccaccaggccgtcgcggctccaacttccaacgtcgtgccccgcctggcaaccgaccgtgtccactgcctcctggctggctgggcaggcatccttttctgctccgagacacctgctgaagctggaagtacatggtgccttattcctctcttttctccttatggtacaaggatgattactttaattgaattggtctgccactggctgctgccatccactgcgggctcggtcgccacgtcgacgccatccctgtcctcgagcgcgctgtcacagtcgtggcgccgacacaagaatcgtctgccgacagcgagcctgaggccggtgcagccggcggcgacgactaccagcagctgcagcctgtcgagcccgactagaggggtggaaaatttacgagaccagctactgaaggagggaagtttgagggcttctctggagtctgggctaatgaatatgcgaagaggacaagtgtccttcccctcaacgatagacaccaagactaaggctgatcttgaggaagttgttgccgctgaagctgatattatgaacttgaagcaaaaggtttctgatcttcggggacaactcaacaaccaagttcagttgagttccacctcgttatgtgaatcatgcaacaacaagcgatccataaatgcagacaagcttgtcgaaggtgaacaaaacactgccctttctccatagattgcctcagtcgaagcaccaccaattgtagggtcttattctgtacctgacatgttctgggctacaaaccaaatggttcaggagatgttgtattcaaagggtgagattgcgaaggatggccaagacggatcacttacatcaagatggaactttgcacagagaccacactcaaatagtccagtcgtgagcagggttcaaggttccgatgcctattcaagtactaaaaccgaggaatctggaggcgcgccttcctctgcattagccaagctgacatatgtatctttcaagtagtccagtagaacctctgattcatcaagtagtccaagaacgtcgctgtgtggttcgacgcgttcgcggaccgctgccgccggcgagccgcgcacgccggcgacttcaccgcgcggctcgtagacatcatggctggctgacacgcggcggtgcgcgtacgtgctcggtcgcaatggagggacgcagacggggatgtgtggagcggaaggtcggtggctaggccgagctttatagagaaggatcgagagagcggaggcgggcgggcgctggatgtgagaagtgagggccgaggccagcaggcggcggggctcccgtcagttctgtccgttgcttgcaggacactgtccgagtactagaaaaacaaaactagccctcccctgtggcaggcgaccgggcactggtgttcgggttccaaaccgcgagtcccaacccacgtggcggcgcggtgttgccagaggcagactcgctcgtggcggcactcgtgtaggccgcgcgtggaaggagacgagggggggcggagtggatgacacccccagcccacgagc

SEQ ID NO: 100158 - DNA, 556 bp, Zea Mays
cataatatccatgcggcgccttctatggagagagcgccaaatctgacggcaccatctgcgctcccttccttacgcggcgatctgcgctctccacccactcgcgcctggcgctccacccacccgcgccatctgcgccgatccaaatccgccttggttccggctgccagccacgcctgcacatcttgcgtcctcgccctcctcctcgccccacatgctgcaccgtaaatggaaggcccggccccgcgccgtcgaaggaaatggccgtggcctggcagcgagccaggaggacctggaccgcgcggacgtggcggcgcgggagctggaggcgacggcggggtgccccgtcgacctcagcagggacccggacctcgacaagctgcagggtcggtggcggctgctgtacagcagcgcgttctcttaacgaatgctcggcggcagctgccctggctcgcccaccagtcgcctcctccccatcacgctcggccaggtgttccagcgtatcgacgtggtgagccgcgacttcgacaacatagtggagctggagctcggcgcgcca

SEQ ID NO: 100159 - DNA, 546 bp, Zea Mays
tggagcttttaactggccgctcagtttttcatgttgcgacacaatgtggcccgaggagcgcagttagatgggtacatatgccagcattcacttttctagttttcttataggacgcagcagctaatttgcttatcctaaggtgcaggctaaaccaatgcttagtcaagacaaggtggaacagtgcatagatccaaggcttggaggagggtacctactaaacgatgtcagaaagatggcttctgttgctgcactgtgtttacaagacgagccagagttccggcctgaaatgagcatcgtcgtcgaggctctgagcctgttactgaacagcaagtgaacaagtaaccgtccctgcattggtgaagcacgtggaatgtgatttccttgcatgtcattgcgagctcaagatcacgggtttcgtgaaggcgattggcccccaacagaaagttatgattactgcattcatctaggcttggaacttgtgctttctttgtctgtgcacatgtaatactcaaaattctaaataaagaatatagagagatcttctca

SEQ ID NO: 100160 - DNA, 389 bp, Zea Mays
aactcgtgttcttgcttatgagtacgccccaaggggctccttgcatgatattcttcatggtaaaatgggcatcaagggagcccgaccagggccacctctatcgtggttgcagcgtgtgaagattgccgtaagtgctgcaaaaggcatcgagttcctccatgagaaggttgatcctcgtatcatccacaacaacatcaagtccagtaacatacttctctttgacaacgatgttgcaaaaataggtgacattggtgtttcaatacatgatgcccatcgccgggttcataattgggccgagtactattctgtcagggaacatctagcacctgagttcgcattcagaagaaggtatagcacaaagagcgatgtctacagcttcgggcttgtac

SEQ ID NO: 100161 - DNA, 2096 bp, Zea Mays
tgccgatgcagatcgaggggcgaggctgccgtcgtcgtcccgggctctctgtgcgcgtacgcggaagagtgaggaagctctagtccactcatacagcctttacggttcaggcaagcaaccacccatagcattcctatcactgtgcttggttgcgcatggattaccaaggggacaatcttagagatttctttcaaactaatgggcgtaaggtgcttcagagagcggaaaacaactatagcttgaaatattttacagaaaatgagatacgaaacataactgatgggtataagtctgttctgggaagaggggcatttggtgaggtctacaaaggaacgctagaagaccaatcctcagttgcagtaaagagatatatacatgggacccacaaagaggtgtttgccaaggaagtcatagtgcactctcaaataaaccacaagaatgttgtcagactcttgggctgctgcacagaagaaaatgctctaatgattgtcatggagtttatctccaatgggaacctcgacagcatacttcatggcaacagaggtaatggtcgggttcccttccctctgaagaaaaggatagaaattgccattgaggttgctgaagtattatggtgcatgcattcgatgtatagtcctgttcttcatggtgacatcaaacctgctaacatactgctagatgaaaattttcagccaaagatatcagattttggaattgcaagactgctttctgctaatggcccccagcaagctaccactgtcattggttccataggctaccttgatccagcatactgtgagagtggaattctaaccccaaagagcgatgtttacagctttggagtggttttgctggaaattatcacaaggaataaagcagtggatggcaccgttacccttgctcaaagttttaatgaggctcttacaaaaggggaggatgtgcagcacatgtttgatgaggaaatcagtgttgcagaaaacaagaagtttcttcgacgcattggacagttagcagctaaatgcttgcagagggacgtcaaaacgcgtcctgaaatggttgaagttgctaatagtctaaggatgatcaggaaagctatgcagagagaccaggatgaggatgtactgttagcagcataccaatttggagatctaaaaattttcaatgaaactgaaatgaaggaaatgacaaaaaactacagcatggcctttaggaaatcgatgtgtgaatgtctctacaatggagtcatcggcatgaatcgtccaattatagtaagactacttgagacaagttcagaaactggcagagagatatttctgaacactatgagcatattgagtcaaaagaaccacaaaaatgttgtgaatattgttggcttccacatagggaagtccagtttagagtgtgtatatgagtcttgctgtgatctatccaagacaatgcttggctctatatcactatctaacagaaacctttatgacactatctgttccatgaaaaaacttcatcttcaacaacgcctgtcaatagcagtccagtgtgcagagggtctggttcatatccattcattagcagctgaaagtcctgaatcatgtggcaccagcctcttaggaaacttcagatctgccaacatatttttggacgagaactttgtaccaaaaatcttcaatgtgaacttgtcaacatttcttggactttcaggtgcacaaaaacatacagtgttttcaattcattacaatggaccagaaaagtattattcagacccaagggatgtttctggtcaacttcttaacaaaaaatctgatgtatatagctttggagttgttcttttagagctcatcacttggaagactgtgagatacatgtacaatcttagggctcgtgtgcttaccacagacttccttgattcttataggagagaccgtgatgcaattgggatgttcggcaaggtttgtgatgaacatgaagggtactttgttcatgaggccctttccattgccatcgattgcttacaacttgatattcaaatgaggccagaaatggaacatgtacttttccgtctccggatcattgttgctagaagcaaacttgctggtacg

SEQ ID NO: 100162 - DNA, 1673 bp, Zea Mays
gtaggggcatcgaccatgtcaataaaaaaattaactgtatgtgtctccatgaattctctgatcaagcaactaacatcattttcgatctctaaacaactgtctgctttgctcatcatttgctgctacaacaaagtctgggcaacattattaggtacatgctgacatatatgtactacaaagtccactgacacggttcttgtagcagttgttactcgattgttatcgcgatgcagggattatattgggtcttgcttattattcgttgacccggttcacaaacacggttccaagcacattgtataaatagagagtaacatctaaagcagctcttcatctcctctcctcgtcaccatctcgatcgagctccagagctaaagcagatagaaagctcagagtgagagagcagcatctgatcgaccaattgttcaccttcgtcatgaggtccacttggttggcatttgccttgtcggcgctcgtcgtcgtctcctcatcagcggcacacgtacacgcctcgccggggaaacttgaggtcggtttctacgagcactcatgcgcacaggccgaggacatcgtgcgcaacgccgtccgccgcggcatcgcccgtgagcccggcgtcggcgcggggctcatccggatgcacttccacgactgcttcgtccggggctgcgacggctccatcctcatcaactccacgccgggcaacctggccgagaaggactccgtggccaacaaccccagcatgcgcggcttcgacgtcatcgacgacgccaaggccgtcctcgaggcgcactgcccgcgcaccgtctcctgcgccgacatcgtcgcgttcgcggcccgtgacagcacctacctcgccggcggcctggactacaaggtcccgtcgggccgccgtgacggccgcgtgtccaaagaggaggaggtgctcgacaacaatgtccccgccccgactgacgaggtcgacgagctcatcgagagcttcaagcgcaaggggctcaacgccgacgacatggtcacgctctccggcgcgcacaccatcggccgctcccactgctcctccttcacgcagcggctctacaacttcagcgggcagctggggcagacagacccgtccctcgaccccgcctacgccgggcacctcaaggcgcggtgcccttggccgtccagcgacgaccagatggaccccacggtggtgccgcttgacccagtcacgccggcgaccttcgacaaccagtactacaagaacgtgctggcgcacaaggtcctgttcatctctgacaacacactgctcgacaatccctggacggccggaatggtccacttcaacgccgcagtcgagaaggcatggcaggtcaagttcgccaaggccatggttaagatgggcaaggtccaggtgctcaccggcgacgagggagagatcagggagaagtgcttcgccgtcaacccacactactagtcatgtttagccaataagccttgctagggtactaagtttgtttatacgttccatatatacgtcgatattatggagattgttttactctaaggttgtgaaatcaaacacaagtttatcaagtaaaatggtgttatttgcacaacatgcataaatttactgatgttagagcaactccaacagcctatttaaaacaacgtactagctaaaaaagaaaaaaaaa

SEQ ID NO: 100163 - DNA, 1997 bp, Zea Mays
cttgatatatatatatatatatatatatatatatatatatatatgatcaagcaagtaatatcattgtccatctctaaacagttgtctgctctgcttatcattacgttgattgatcaaaaataccccctcgtgatagctacataatttacaatcgaaagtgacgcgtgtggcaattcaaaacaaagacaagatgcgtgttttgcagctgttttgttataggaaggacgaaggagttttttttatttttaatgatggtgcatggaaattaagagggtctagcagacattagctagggaacgcgaagattgggtcttatttcttgaccgggtgcacatgacatacacacgccatcctccaactgcgacatgtcgccatgcaagcttccaatgtataaatagagacccagcggcggcaccgttcttcaaatctcctcatcagcttcacttctcaacatcaccatcgacctcgatcaactcaagcgactatagcaaacttgctgagagtttgggtatatacgactgcagttgatcatatatggggcggtcgacatgctggctgatgcctgctgccttgctggtggcactcatcgccgccgcctcctcatcggtggcactcgcctcgccgcctgggaaacttgaggtcggtttctacgagcactcgtgcccacaggccgaggatatcgtgcgcaacgccgtccgccgcggcatcgcccgtgagcccggcgtaggcgcggggctgcgacggctccatcctcatcaactccacgccgggcaacaaggccgagaaggactcagtggccaacaaccccagcatccatgcgcggcttcgacgtcatcgacgacgccaaggccgtcctcgaggcgcactgcccgcgcaccgtctcctgcgccgacatcgtcgcgttcgcggcccgtgacagcacctacctcgccggcggcctggactacaaggtcccgtctggccgccgtgatggccgcgtgtccaaagaggaggaggtgctcgacaacaatgtcccagctccgactgacgaggtcgacgagctcatcgagagcttcaagcgcaaggggctcaacgccgacgacatggtcacgctctctggcgcgcacaccatcggccgctcccactgctcctccttcacgcagcgcctacaacttcagcgggcagctggggcagacagacccgtccctcgaccccgcctacgccgggcacctaaaggcacggtgcccttggccgtccagcgacgaccagatggaccccacggtggtgccgcttgacccagtcacgccggcgaccttcgacaaccagtactacaagaacgtgctggcgcacaaggtcctgttcatctctgacaacacactgctcgacaacccatggacggccggaatggtccacttcaacgccgcagtcgagaaggcatggcaggtcaagttcgccaaggccatggttaagatgggcaaggtccaggtgctcaccggcgacgagggagagatcagggagaagtgcttcgccgtaaacccacactactagtcaagtttaattatctaattaccccgcgcgtgttatgtttgtttatacgttccatacatcaacattaagtagagtgttttttgttctcttcaaggctgtgaaatcaaacaagtttatcaagtaaaatggtgttatttgcacaacatgcatgtacatatttagtgaccacatccgatcacaaatatagaagctctttttttcccgcgagcactgtgtatgtagtctgtacaacactgagagttttatgtagaaatattttcattatcatagtggatcttcgaaaaaacagactttgtatcgactaaaatatatattttgactttcatatgctagaactttagctcgtaaacataaaagtgcggtacaaacttttatgcaacgattgggttcggtatttttagaagaattttttacgaaagaagagcaagctttttctttgatgttcaccaaaacaattcacttttctttcc

SEQ ID NO: 100164 - DNA, 1023 bp, Zea Mays
atggggtcgatgacatggttggcggccgtgctggcagcactcgtcgtcgccgcctcctcatcggtggcatcacacgcctcgccgccggggaaacttgaggtcggtttctacgagcactcgtgcccacaggccgaggacatcgtgcgcaacgccgtccgccgcggcatagcccgcgagcccggcgtcggcgcggggctcatccgcatgcacttccacgactgcttcgtccggggctgcgacggctccatcctcatcaactccacgccggacaacaaggccgagaaggactccgtggccaacaaccccagcatgcgtggcttcgacgtcgtcgacgacgccaaggccgtcctcgaggcgcactgcccgcgcaccgtctcctgcgccgacatcgtcgcgttcgcggcccgtgacagcgcctacctcgccggcggcctggactacaaggtcccgtctggccgccgtgacggccgcgtgtccaaagaggatgaggtgctcgacaacaatgtccctgccccgactgacgaggtcgacgagctcatcgagagcttcaagcgcaaggggctcaacgccgacgacatggtcacgctctctggcgcgcacaccatcgggcgctcccactgctcctcgttcacggagcgcctctacaacttcagcgggcagctggggcggacggacccgtccctcgaccctgcctacgctgagcacctcaagatgcgctgcccatggccgtccagcaacgaccagatggaccccacggtggtgccgcttgacccagtcacgtcggcgaccttcgacaaccagtactacaagaacgtgctggcgcacaaggtcctgttcatctccgacaacacactgctcgaaaacccatggactgccggaatggtccacttcaacgccgcagtcgagaaggcatggcaggtcaagttcgccaaggccatggttaagatgggcaaggtccaggtgctcaccggcgacgagggagagatcagggagaagtgcttcgccgtcaacccacactactag

SEQ ID NO: 100165 - DNA, 1321 bp, Zea Mays
acagacccagccgcgcaaatctttcatcccctcaactctacgtctctctctacctactctcggtcaccacacctcgctcgaaaacaaaactgatcaacagcattgttggtgacgatgagctcgacgtggctggcttttgcatgggcggcggccgccctcgtcgtggcggcggccacggcgcacgccccgcaccacccgtcgtcgctgcaggtcggtttctacaagcactcgtgcccacaggccgaggacatcgtgcgcaacgccgtccgccgcggtctggtccgcgacccgggcgttggcgcgggactcatccgcatgcacttccacgactgcttcgtccggggctgcgacgcctcaatcctcatcaactccacgccgggcaacctagccgagaaggactccgtggccaacaaccccagcatgcgcggcttcgacgtcatcgacgacgccaaggccgccctcgaggcgcactgcccgcgcaccgtctcctgcgccgacatcgtcgcgttcgcggcccgcgacagcgcctgctccgccggcggcctcgagtacgaggtcccctcggggcgccgcgacggccgagtttccagacaagacgaggtgctcgacaacaatgtccccacaccgaccgacgtcgtcgccgagctcatcgagagcttcaagcgcaaggggctgtccgccgacgacatggtcacgctctccggcgcgcacaccatcggccgctcccactgctcctccttcacgcagcggctatacaacttcagcgggcagctggggtggacggacccgtccctcgaccccgcctacgccgggcacctcaaggcgcggtgcccttggccgtccagcgacgaccagatggaccccacggtggtgccgcaggacccagtcacgccggcgaccttcgacaaccagtacttcaagaacgtgcttgcgcacaaggtcctgttcgtctccgacaacacgctgctcgacaacccctggacggccgggatcgtccaatttaacgccgcagtcgagaaggcgtggcaggtcaggttcgccaaggccatggtcaagatgggcaaggtgcaggtgctcaccggcgatgagggagagatcagggaaaagtgcttcgtcgtcaacccacactactagctattgcaactacatacttcgagagactacctatagagctaaaaatagagattttgaagagagagaaaaaaaagtactctcgcgagtgcaaataagactcttgtagacgctcgtattactctccgtggaaatctctagccagaaatcattaatataataaaggacaagtggcacgtctatcaccgca

SEQ ID NO: 100166 - DNA, 90 bp, Zea Mays
gtcccatcacatcatggagagattctgatatttgccatcagcaagaaacatgtttgtaaaattgccatcagacccacattccatagaccc

SEQ ID NO: 100167 - DNA, 2002 bp, Zea Mays
aatttccgggatcctcgactcgtttcccttcccactactctgatcctctctatcagcgccgcctgcctccaagtccctgaatccacgggcgactcgcttgctccccctgttttcctcggccgccggagcgcgtcgcctccgagcagcagcagcactccggcagtccctggttgttcctggtggttcttgcctcctcgtctgggtgggtgggtggtggaatagcgtcgtcttcgctggaacccacctgcctgctcttgctccgctcgcgcagtcgcgctggagctaaagctactgattggttcgtactgaccagccaagccaaagagggattctttggaggcaaccagaggtgtttggtttggtcaagctcccttcttttgtcttgcccatggaatgcttgctgtgaactgcttgtattcatgcttgagagaatttcagtgtagcatcttgtggtcttgtcctctctgattggaagagaaaacgtgctgtcttgtggcttgctatgtctgtctcggagaaggtggtgctatcatcatcagtttcttcgtcgtcagatttagatccgttgctgaagggtcttacggagaagaagttgagctttaggaggaacgtggtgtcattggcagccgagctcaaggatgtgaggagcaagcttgcttcccaggagcagctgtttgtaagggaatctcaaactagaaagcttgtggatacaaaagcaaggagcatggaagaggaagtaagcaagttgcagaaatgcttacaggacaaggatgagcaactgcgttcatccacaagtagcacggaacagctaagtcagcccagatgcagtgcttatcattgctgaaagagctgaatgagaaggacatctcgctcaaagagcacgggcttcgagtgaacaagctaggtgagcagcttgatcttctccagagggaactacaagcaagggagctctcgcaaatgcaacttaaagatgaagttataagaatcgagaccgacatcatggatgcagttgccaaagctgggtctaggtctgacaaagataatgagcttttaaagatcttatctgatgtttcaccaaggaatgtccagaacctcaacaaccttttgaatgctaaggatacagaaattgcgaggttgagagaggaaatcagaatattgtctgctcactggacgaacaaaaccaaggaacttgagtcacatttagaaaagcaccggagaactgatcaggagctgaagaagagggttctaaagcttgaattttgccttcaagaatcccagtctcagatgcgaaaattaaagaggatgggcgagagaagagacaaggctctcaaggagctcatggaccaggtggccacgaagcagccaaacagcatgtgccatggcaacaaggagaatttctgggagggccagggcttcaagttcatcgtgtctatgtcgatgctggcactagtgatcctcgcaaagcgatgaagcagcatcgcatacccaatcttgtgtaaagaaggtagagattccatctatcgttaggtgagcaactagctcatagcttaagcagatgtcgatgtagcgtttacattagtttgttgtttgtattcttgggcagctgtgcataatgcatggtcagaagttgcagtctgtaatccgtagtctctgctagggcatgtgaactcagaaggtgtcttgtactcacatctagttcatgtcagctcttgagcagtcatgaatctacatcttgtaatttcagagtagcttcagcagttgtcacatgtaactctataattgctgaatctacatcttataatttgcactcttatggttgcgaatttggtaaaaacgcgtgatgcagcattcatcgtttctttttagttgtcgctggatagttcaattttgcactatccagcgacaactaaaacgaaacggagtatgacgcaagcccagcttgaattagaaatatatggtgttgttgaacaccctcaaatcaaatgaatatgattattcaccg

SEQ ID NO: 100168 - DNA, 1632 bp, Zea Mays
aatttccgggatcctcgactcgtttcccttcccactactctgatcctctctatcagcgccgcctgcctccaagtccctgaatccacgggcgactcgcttgctccccctgttttcctcggccgccggagcgcgtcgcctccgagcagcagcagcactccggcagtccctggttgttcctggtggttcttgcctcctcgtctgggtgggtgggtggtggaatagcgtcgtcttcgctggaacccacctgcctgctcttgctccgctcgcgcagtcgcgctggagatccgttgctgaagggtcttacggagaagaagttgagctttaggaggaacgtggtgtcattggcagccgagctcaaggatgtgaggagcaagcttgcttcccaggagcagctgtttgtaagggaatctcaaactagaaagcttgtggatacaaaagcaaggagcatggaagaggaagtaagcaagttgcagaaatgcttacaggacaaggatgagcaactgcgttcatccacaagtagcacggaacagtacctccatgagttggatgatcttagaacacaactgtcatttactcaagctacagcagaagcaagtgctgcatcagctaagtcagcccagatgcagtgcttatcattgctgaaagagctgaatgagaaggacatctcgctcaaagagcacgggcttcgagtgaacaagctaggtgagcagcttgatcttctccagagggaactacaagcaagggagctctcgcaaatgcaacttaaagatgaagttataagaatcgagaccgacatcatggatgcagttgccaaagctgggtctaggtctgacaaagataatgagcttttaaagatcttatctgatgtttcaccaaggaatgtccagaacctcaacaaccttttgaatgctaaggatacagaaattgcgaggttgagagaggaaatcagaatattgtctgctcactggacgaacaaaaccaaggaacttgagtcacatttagaaaagcaccggagaactgatcaggagctgaagaagagggttctaaagcttgaattttgccttcaagaatcccagtctcagatgcgaaaattaaagaggatgggcgagagaagagacaaggctctcaaggagctcatggaccaggtggccacgaagcagccaaacagcatgtgccatggcaacaaggagaatttctgggagggccagggcttcaagttcatcgtgtctatgtcgatgctggcactagtgatcctcgcaaagcgatgaagcagcatcgcatacccaatcttgtgtaaagaaggtagagattccatctatcgttaggtgagcaactagctcatagcttaagcagatgtcgatgtagcgtttacattagtttgttgtttgtattcttgggcagctgtgcataatgcatggtcagaagttgcagtctgtaatccgtagtctctgctagggcatgtgaactcagaaggtgtcttgtactcacatctagttcatgtcagctcttgagcagtcatgaatctacatcttgtaatttcagagtagcttcagcagttgtcacatgtaactctataattgctgaatctacatcttataatttgcactcttatggttgcgaatttggtaaaaa

SEQ ID NO: 100169 - DNA, 1840 bp, Zea Mays
aatttccgggatcctcgactcgtttcccttcccactactctgatcctctctatcagcgccgcctgcctccaagtccctgaatccacgggcgactcgcttgctccccctgttttcctcggccgccggagcgcgtcgcctccgagcagcagcagcactccggcagtccctggttgttcctggtggttcttgcctcctcgtctgggtgggtgggtggtggaatagcgtcgtcttcgctggaacccacctgcctgctcttgctccgctcgcgcagtcgcgctggagctaaagctactgattggttcgtactgaccagccaagccaaagagggattctttggaggcaaccagaggtgtttggtttggtcaagctcccttcttttgtcttgcccatggaatgcttgctgtgaactgcttgtattcatgcttgagagaatttcagtgtagcatcttgtggtcttgtcctctctgattggaagagaaaacgtgctgtcttgtggcttgctatgtctgtctcggagaaggtggtgctatcatcatcagtttcttcgtcgtcagatttagatccgttgctgaagggtcttacggagaagaagttgagctttaggaggaacgtggtgtcattggcagccgagctcaaggatgtgaggagcaagcttgcttcccaggagcagctgtttgtaagggaatctcaaactagaaagcttgtggatacaaaagcaaggagcatggaagaggaagtaagcaagttgcagaaatgcttacaggacaaggatgagcaactgcgttcatccacaagtagcacggaacagtacctccatgagttggatgatcttagaacacaactgtcatttactcaagctacagcagaagcaagtgctgcatcagctaagtcagcccagatgcagtgcttatcattgctgaaagagctgaatgagaaggacatctcgctcaaagagcacgggcttcgagtgaacaagctaggtgagcagcttgatcttctccagagggaactacaagcaagggagctctcgcaaatgcaacttaaagatgaagttataagaatcgagaccgacatcatggatgcagttgccaaagctgggtctaggtctgacaaagataatgagcttttaaagatcttatctgatgtttcaccaaggaatgtccagaacctcaacaaccttttgaatgctaaggatacagaaattgcgaggttgagagaggaaatcagaatattgtctgctcactggacgaacaaaaccaaggaacttgagtcacatttagaaaagcaccggagaactgatcaggagctgaagaagagggttctaaagcttgaattttgccttcaagaatcccagtctcagatgcgaaaattaaagaggatgggcgagagaagagacaaggctctcaaggagctcatggaccaggtggccacgaagcagccaaacagcatgtgccatggcaacaaggagaatttctgggagggccagggcttcaagttcatcgtgtctatgtcgatgctggcactagtgatcctcgcaaagcgatgaagcagcatcgcatacccaatcttgtgtaaagaaggtagagattccatctatcgttaggtgagcaactagctcatagcttaagcagatgtcgatgtagcgtttacattagtttgttgtttgtattcttgggcagctgtgcataatgcatggtcagaagttgcagtctgtaatccgtagtctctgctagggcatgtgaactcagaaggtgtcttgtactcacatctagttcatgtcagctcttgagcagtcatgaatctacatcttgtaatttcagagtagcttcagcagttgtca

SEQ ID NO: 100170 - DNA, 760 bp, Zea Mays
aatttccgggatcctcgactcgtttcccttcccactactctgatcctctctatcagcgccgcctgcctccaagtccctgaatccacgggcgactcgcttgctccccctgttttcctcggccgccggagcgcgtcgcctccgagcagcagcagcactccggcagtccctggttgttcctggtggttcttgcctcctcgtctgggtgggtgggtggtggaatagcgtcgtcttcgctggaacccacctgcctgctcttgctccgctcgcgcagtcgcgctggaggtgcgtgattctttttcgccgccacgtcctcagttcatgctgtgttgttcgcctgcgaccgtgaatccgtgattgccacgcacatttcattagtctgcatttatttctatcttggggataaaagaatgtcgggagctcggaactctccgtgttatttgaatgccaagacaaatgcttagcaccagcgaactcgtggccttgacctgaagaaaaatcgtttttttctctcactcgtagtattaaatatttactatcattatttcttaagtttgcagctaaagctactgattggttcgtactgaccagccaagccaaagagggattctttggaggcaaccagaggtgtttggtttggtcaagctcccttcttttgtcttgcccatggaatgcttgctgtgaactgcttgtattcatgcttgagagaatttcagtgtagcatcttgtggtcttgtcctctctgattggaagagaaaacgtg

SEQ ID NO: 100171 - DNA, 1365 bp, Zea Mays
accccatctcatcccactgactccacccacccgcccgctgcctccgccggatctcgtcggactcggatccgcccgaccaccccgcgccgccgccgcgcagcagcagcaggaaatcgagggtctcaaatctttggtagcaaatgatcatgaagagaaagacatgcgtgagatggcagaagaggagcttcttgtggctgtcgaggaggagaaacgattgcagcatgaactgtttagatcgctgcttccaaaggatgaagcagatgaaaaggattgcatattggaggtgcgggcaggaactggaggagaagaggcttctttgtttgcaatggatatatttagaatgtacgagaaatatgcccagaagaatgggtggaaatttgatgtcattgacataatggagtctgctgtgaaaggatacaaggaagctagtggaactatatcaggtcctggggcgttcggcaaactaaagtttgagagtggcatccatagagttcagcgagtgccagcgactgagaaatctggacgaatgcacactagtgctgtatcagttgctgttcttccgcaagctgatgaggttgatgtccagctgcgaaatgaggacctgagaattgatacctacagatcaggtggctctggaggtcagtctgtcaatacaaccgatagtgctgttaggataactcatattccaaccggaacagtggttgcaatccaagatgagagatcacagcacatgaacaaggccaaagctctgaaagttctccgagcgcgactgtatgagttggagaggcgtagactacacatggacaggtcaaagcttcgatcagaacagattggaagcggtgacaggtctgagcgaatcagaacatacaacttcccacagggccgtgtcaccgaccatcgcgttggagtcacacaccactccatagcagatgtcatggagggggagagcctggacatgttcgttgatgcgctcctgcttcaagaagagatggacgccattgcttcatttggcgcatagctagattaaaccttgcaacattgattcacgtcatggacaaaatagagatcagcgaaaaacaataccgagcagtccactagtgaattgcctgtgcattgtgtcctgttttggcgtgtgctagttttacataatgctgaatttttaatgtaggcatgtgttataattgttgccgataaacgtgtcgctcatccaattctttccaaactacagttttgctggcaatgttttgttgttcgttctttccaaactacagttgtgctggcatggttttgttattcataaacttggtgcgcctgaattgtctatggacaaacatgtttataagtgatccttatttaagcttcagt

SEQ ID NO: 100172 - DNA, 1596 bp, Zea Mays
gccgaactgggcctcaaccggaacttgttttaccccatctcatcccactgactccacccacccgcccgctgcctccgccggatctcgtcggactcggatccgcccgaccaccccgcgccgccgccgcgcagcagcagcagagatgagccagcagctccctgcgaacctagtggagatcatggagcagagaatgaagttgatcgagcagaggagcgcgtacctccaagagcaaatcaaccagccagccgcctcgccggaagagtactcgagggctaacaaggagttccgcaagctggagagcaccatggagttgatcaaagacctgagatcgaaacaggaggaaatcgagggtctcaaatctttggtagcaaatgatcatgaagagaaagacatgcgtgagatggcagaagaggagcttcttgtggctgtcgaggaggagaaacgattgcagcatgaactgtttagatcgctgcttccaaaggatgaagcagatgaaaaggattgcatattggaggtgcgggcaggaactggaggagaagaggcttctttgtttgcaatggatatatttagaatgtacgagaaatatgcccagaagaatgggtggaaatttgatgtcattgacataatggagtctgctgtgaaaggatacaaggaagctagtggaactatatcaggtcctggggcgttcggcaaactaaagtttgagagtggcatccatagagttcagcgagtgccagcgactgagaaatctggacgaatgcacactagtgctgtatcagttgctgttcttccgcaagctgatgaggttgatgtccagctgcgaaatgaggacctgagaattgatacctacagatcaggtggctctggaggtcagtctgtcaatacaaccgatagtgctgttaggataactcatattccaaccggaacagtggttgcaatccaagatgagagatcacagcacatgaacaaggccaaagctctgaaagttctccgagcgcgactgtatgagttggagaggcgtagactacacatggacaggtcaaagcttcgatcagaacagattggaagcggtgacaggtctgagcgaatcagaacatacaacttcccacagggccgtgtcaccgaccatcgcgttggagtcacacaccactccatagcagatgtcatggagggggagagcctggacatgttcgttgatgcgctcctgcttcaagaagagatggacgccattgcttcatttggcgcatagctagattaaaccttgcaacattgattcacgtcatggacaaaatagagatcagcgaaaaacaataccgagcagtccactagtgaattgcctgtgcattgtgtcctgttttggcgtgtgctagttttacataatgctgaatttttaatgtaggcatgtgttataattgttgccgataaacgtgtcgctcatccaattctttccaaactacagttttgctggcaatgttttgttgttcgttctttccaaactacagttgtgctggcatggttttgttattcataaacttggtgcgcctgaattgtctatggacaaacatgtttataagtgatccttatttaagcttcagt

SEQ ID NO: 100173 - DNA, 1751 bp, Zea Mays
gccgaactgggcctcaaccggaacttgttttaccccatctcatcccactgactccacccacccgcccgctgcctccgccggatctcgtcggactcggatccgcccgaccaccccgcgccgccgccgcgcagcagcagcaggccgaacccgaaggcaacgaggactagtagattcatacttccgccgccccgccgccgcgatgcagtatcacctacgccgatgcggcggaggcgccctcgccgctctctggcggctccgccacaacgcttcctctgccgtagcgtcgcctcctgtggcctggaggcgaccctgccttcctccacggttctactccaccgccgagatgagccagcagctccctgcgaacctagtggagatcatggagcagagaatgaagttgatcgagcagaggagcgcgtacctccaagagcaaatcaaccagccagccgcctcgccggaagagtactcgagggctaacaaggagttccgcaagctggagagcaccatggagttgatcaaagacctgagatcgaaacaggaggaaatcgagggtctcaaatctttggtagcaaatgatcatgaagagaaagacatgcgtgagatggcagaagaggagcttcttgtggctgtcgaggaggagaaacgattgcagcatgaactgtttagatcgctgcttccaaaggatgaagcagatgaaaaggattgcatattggaggtgcgggcaggaactggaggagaagaggcttctttgtttgcaatggatatatttagaatgtacgagaaatatgcccagaagaatgggtggaaatttgatgtcattgacataatggagtctgctgtgaaaggatacaaggaagctagtggaactatatcaggtcctggggcgttcggcaaactaaagtttgagagtggcatccatagagttcagcgagtgccagcgactgagaaatctggacgaatgcacactagtgctgtatcagttgctgttcttccgcaagctgatgaggttgatgtccagctgcgaaatgaggacctgagaattgatacctacagatcaggtggctctggaggtcagtctgtcaatacaaccgatagtgctgttaggataactcatattccaaccggaacagtggttgcaatccaagatgagagatcacagcacatgaacaaggccaaagctctgaaagttctccgagcgcgactgtatgagttggagaggcgtagactacacatggacaggtcaaagcttcgatcagaacagattggaagcggtgacaggtctgagcgaatcagaacatacaacttcccacagggccgtgtcaccgaccatcgcgttggagtcacacaccactccatagcagatgtcatggagggggagagcctggacatgttcgttgatgcgctcctgcttcaagaagagatggacgccattgcttcatttggcgcatagctagattaaaccttgcaacattgattcacgtcatggacaaaatagagatcagcgaaaaacaataccgagcagtccactagtgaattgcctgtgcattgtgtcctgttttggcgtgtgctagttttacataatgctgaatttttaatgtaggcatgtgttataattgttgccgataaacgtgtcgctcatccaattctttccaaactacagttttgctggcaatgttttgttgttcgttctttccaaactacagttgtgctggcatggttttgttattcataaacttggtgcgcctgaattg

SEQ ID NO: 100174 - DNA, 1973 bp, Zea Mays
acgacggctgcaggagacccgtataaatacgatctggtttccgttcccaatccccttcttccccgactcgcccggcgctgaataagattcccctgtattctgttccagagatgagctgatcgagcagcccgtcgccaagccaaccggacatggtgagcgacggcgcgcgcgggctgctgggcgcgtacgagctcgggcggacgctcggggagggcaacttcgggaaggtgaagcaggcgcggcaccgcggcagcggcgggcagtttgccgtgaagatcatggagcgcgccagggtgctgtcgcagcgcgcggacgagcagatatgccgcgagatcgccacgctcaagctgctcgcgcaccccaacgtcgtccgcctccacgaggtggctgccagcaagacgaagatctacatggtgcttgagctcgtcaacggcggcgagctgctggacaggattgcggccagtgagggaaagctcccggagcaggaggcaaggaggctcttccagcagctggttgatggtgtaagctactgccatgaaaagggcgtctgtcacagagacctcaagctggagaacgttcttgtcgaccggaagggaaacatcaagatctctgatttcgggctcagcgctttaccgcaacatctcgggaacgatgggttgctgcacacgacctgcggtagccccaactacattgcccctgaggttctgcagaacagagggtacgacgggtcgctatcggacatctggtcatgcggggtgattctctacgtgatgctcgtagggcacctcccgttcgacgaccggaacatcgtcgttctctaccagaaggtactggatcaatcagataaatcgttttgtagctcttgctactttacaatttaatttgccgggtctagattttcaagggcgatgctcagatcccggagtggctctctcccggcgcacggaaccttctccggaggatccttgagcccgacccggcggagcggatcgccatggcagagatcaaggcgcacccatggttccaggagcactacgtccctgtccttcctccgtacgacgacgacgacgaccacgattcagtgaagcaaatcggtgcgggtagtaaaaccactcatcacatcaacgcgtttcagttgatcggaatggcgtcgtccctagacctctcagggttttttgaggaagaggacgtgtcccaaaggaagatcaggttcacgtccgcacaaccgcctgaggatttgttcgccgagatcgaacgctctgcgactgacatgggcttccatgttcacagagggcatagtaagcttaggctgacgcgaaactgcgaccggtcgaagaatcagaagaaccctatgtcgtcgtcgtcgtcgtcgtttctagtctgcaccgaggtaaaacgcagcaattaaactgcatgcacccccaggtttttgagctaacgatggagtgctgtgccatctgtgatcccaggtttttgagcttagcccctctttgtatgtcgtggagctcaacaagtcccatggcgaccctgcactgtacaggcagctctgtcagaggatctgcggtgacctaggtgtgctcgagatggaccagatctttgggacgaggccgccggtcgccgacgatctcgcgggcttggccttggcgttggagagacgatctgcgacgcctttggttgcgttgtgacgaaaggctgcccccgccggcccccctgaccgtgatgtttgtagcgtcagattatttagtgacgacgaagcagttcagctgcaacgcagctcggaacggttgtgtgatccctcccagaaatagaggacaaggtaaaagagtgtagccgtacacgtgtaggatcatgctccaatgtaaataaagtggtagtagccaccgatgtaaaactgaatgtaaaatctaagaaataaatcgtttatccagtacacagaagctctatagtggtggtactagagctatttgtactaa

SEQ ID NO: 100175 - DNA, 1824 bp, Zea Mays
acgacggctgcaggagacccgtataaatacgatctggtttccgttcccaatccccttcttccccgactcgcccggcgctgaataagattcccctgtattctgttccagagatgagctgatcgagcagcccgtcgccaagccaaccggacatggtgagcgacggcgcgcgcgggctgctgggcgcgtacgagctcgggcggacgctcggggagggcaacttcgggaaggtgaagcaggcgcggcaccgcggcagcggcgggcagtttgccgtgaagatcatggagcgcgccagggtgctgtcgcagcgcgcggacgagcagatatgccgcgagatcgccacgctcaagctgctcgcgcaccccaacgtcgtccgcctccacgaggtggctgccagcaagacgaagatctacatggtgcttgagctcgtcaacggcggcgagctgctggacaggattcaggcggccagtgagggaaagctcccggagcaggaggcaaggaggctcttccagcagctggttgatggtgtaagctactgccatgaaaagggcgtctgtcacagagacctcaagctggagaacgttcttgtcgaccggaagggaaacatcaagatctctgatttcgggctcagcgctttaccgcaacatctcgggaacgatgggttgctgcacacgacctgcggtagccccaactacattgcccctgaggttctgcagaacagagggtacgacgggtcgctatcggacatctggtcatgcggggtgattctctacgtgatgctcgtagggcacctcccgttcgacgaccggaacatcgtcgttctctaccagaagattttcaagggcgatgctcagatcccggagtggctctctcccggcgcacggaaccttctccggaggatccttgagcccgacccggcggagcggatcgccatggcagagatcaaggcgcacccatggttccaggagcactacgtccctgtccttcctccgtacgacgacgacgacgaccacgattcagtgaagcaaatcggtgcgggtagtaaaaccactcatcacatcaacgcgtttcagttgatcggaatggcgtcgtccctagacctctcagggttttttgaggaagaggacgtgtcccaaaggaagatcaggttcacgtccgcacaaccgcctgaggatttgttcgccgagatcgaacgctctgcgactgacatgggcttccatgttcacagagggcatagtaagcttaggctgacgcgaaactgcgaccggtcgaagaatcagaagaaccctatgtcgtcgtcgtcgtcgtcgtttctagtctgcaccgaggtttttgagcttagcccctctttgtatgtcgtggagctcaacaagtcccatggcgaccctgcactgtacaggcagctctgtcagaggatctgcggtgacctaggtgtgctcgagatggaccagatctttgggacgaggccgccggtcgccgacgatctcgcgggcttggccttggcgttggagagacgatctgcgacgcctttggttgcgttgtgacgaaaggctgcccccgccggcccccctgaccgtgatgtttgtagcgtcagattatttagtgacgacgaagcagttcagctgcaacgcagctcggaacggttgtgtgatccctcccagaaatagaggacaaggtaaaagagtgtagccgtacacgtgtaggatcatgctccaatgtaaataaagtggtagtagccaccgatgtaaaactgaatgtaaaatctaagaaataaatcgtttatccagtacacagaagctctatagtggtggtactagagctatttgt

SEQ ID NO: 100176 - DNA, 435 bp, Zea Mays
atgagcggcatgtccagcgggttgacgtccggcgagggctccggcagcagctgctccttggggatgagcatggggtggtcgaggtggcgggcctcctcgagcgagcacgcggcgttggcctccacgaaccaggcgccctcgccggtgcacgccacccgcgtctccccgccgccctccgcgtccaccaccacgaaccgccccgcgaacgggtagtagtccaccagcgccttccccagcgcctcccgcagcgccttggccggcgtcgccgtcgcctgctgccgcttcttgtcgccgcccgcggcgaacacgtgcagcgaccgcaccaggtggcgcagccccgccacgcggtcgatcaccgacagccgcagcgtctcccgcggcgtcgccgacgcaggcggcaccagcgacctgctcgtcctcttcaccgcgaacccg

SEQ ID NO: 100177 - DNA, 1704 bp, Zea Mays
atggacttggtgccgaaacaccagcagcagcagcagcagcgagggatcaaggaggaagaggagatgacggtctttgcggagcacggggaccagcaggcgacttccggggccggccacggcggcggcggcgggcgcaggagcgagatcaaggaggtggacttcttctcggccgccgccggcggtgccgtgtctcgccgcatcaccgacgaggacgacggcggggaagatggcggtcgagagcccgcaggagcagtagctcgtggctgccgtaacaccacggtcaacactgcactggacctgctgaccaggccggcagcgggcgacggcggcgaggggacggcggccagtggtcgtgacgacgatacagagatggacgtggcggcggtggagggggagctgcggcaggccggcgaggagaaccggcagctgcggcggatgctggaggagctgacccggagctacggcgcgctctaccaccagctcatccaagcccaggcggcccagcaccaccaccaccaggccagcggcgcagcgaagccgatgctaccgacgtcgggagtgcagttcatggaccccgccggccgcgtccctccgcctccggctccggcgatggcagcaggagcggcgttcagcggtgaacgggggggcgactcagaaggtggaagcggaagcggcggcgaagcgggcccgaacgatgggacggggacgcctgagcgcggcgagaacgccgataaccgggcgccggcgccggcggaggcgcctctgcggagggcaagggtgtccgtgcgcgcacggtccgaggccccaatggtgcaacggtgcgcggaggacaaggcggtgctgatcaccacgtacgagggcacccacagccaccagctgccgccgcaggccgccgcgatggccaagaccacctcagccgcggccgccatgctcctctccggcccggccgtcagccgcgacgcgggcgcgctcttcgccggccaccacgtcgcggcgccgctcttcgcccagtaccacccctacgcgtcggccgccacgctctccgcctccgcgccgttcccgacgatcaccctcgacctcacgcactcgccgccgccgccggccgcgggcctgctccagcaccgtctgcccacgccgcccgtcccggccatgccgttcccgatgccgtacggcttccctggtgctggtgggcacaggctggcggcggcgccggtgccagccccacacccaccggccggcgcgacgctgctgggtttggacggaaggaaccggtcggcactggacaccatgacggccgcgatcgccagcgaccccaactttaccacggcgctggcggccgcgctctcgacgatcatggccggagccggaggcgctgagccacaagctcctcacctaagcggcgccgctgacgcctccggagatggtggtaacggtagcgccggcactgggcccgccacggctgcggctgccggagcacgtgagactgcattgcatgcgcttttgcaaaggcttaatgacagcaggcaatgacattggaaccaaagctctcatgcaccgccatctgtgcataaatccgtatacacacatcggctttaatttgtacgcttaatgtataccatagagccctcttatatacttactacgttgtagagagttgtaaatggattataattgagcttttataaaggcaatttgaattttcac

SEQ ID NO: 100178 - DNA, 1094 bp, Zea Mays
aacataaaaaattcatttttaattactactacgtctgtggatgtgtgccacgccagccttttcattcctcttcctctcccaccggcagggcaatagtcagcgatgggcggcggctcgggcaatcctcttcctcccccacaggcggcggcggcggccttccgcgtggaccggccgctgcaggcgctgggcttcgagttcacccgtgtcaccgccgaagaggtggtcggccgcctccccgtcaccgagacctgctgccagcccttcgactggctcaacggcggcgtgtcggcgctgatggcggagacgacggccagcatcgggggctacgtcgcgtcggggtaccggaggctggccggggtgcagctctccatcaaccacgtcggccccgcgcgcctcggcgacctcgtccaggcgcgggccacgcccgtccaactcggccgcaaaatccaggtttgggaggtccagatatggcggatcgatccttccacctcggagagcaaagatctggtgtcaacagcgagggtcaccctattgaccaatctaccaacaccagaaaagatgaagagcttcgaacaaggcctgaagaaattttcatccaagttgtagagctactgacgaaggcatgcctgccgcctacattatcacatacgtacagcgggggagcgccgtctatgagtttactccatcatcagctctaggaggaaggagagctgctcagtggctgctgtctgctgacctgtctgtcattggcatggcacatcgtcaagaactcgccgcaagcccgcctcttcctgcgttggagcagaacgcgagacatttcaaacaccaatttttttcccctttcgtagtctcggtaaaactctggatccagctctcgcgatgcagtgttacctgagcttgtttaactgggtagttagatcactgatctccaggaggagagcttgcttgagtgaagagagtgttcctgctaggcacctcttctgcgaatgatgtagacagtttttctcgctgcggcttccatcttccgcagagcctgttgagaaataacaacaagtgaaaattgcttcgcagaatgtatactgtcttgttcgtgg

SEQ ID NO: 100179 - DNA, 1045 bp, Zea Mays
aacataaaaaattcatttttaattactactacgtctgtggatgtgtgccacgccagccttttcattcctcttcctctcccaccggcagggcaatagtcagcgatgggcggcggctcgggcaatcctcttcctcccccacaggcggcggcggcggccttccgcgtggaccggccgctgcaggcgctgggcttcgagttcacccgtgtcaccgccgaagaggtggtcggccgcctccccgtcaccgagacctgctgccaggtaggtaggattagaataggatacgcaggccccgcgccccgccgccgcctcgagtagtattttatttgtttttgttttcatctcattatcgtccctatcgcgccgcgcgtgatgacggagacgggatgcggtcgatgcagcccttcgactggctcaacggcggcgtgtcggcgctgatggcggagacgacggccagcatcgggggctacgtcgcgtcggggtaccggaggctggccggggtgcagctctccatcaaccacgtcggccccgcgcgcctcggcgacctcgtccaggcgcgggccacgcccgtccaactcggccgcaaaatccaggtttgggaggtccagatatggcggatcgatccttccacctcggagagcaaagatctggtgtcaacagcgagggtcaccctattgaccaatctaccaacaccagaaaagatgaagagcttcgaacaaggcctgaagaaattttcatccaagttgtagagctactgacgaaggcatgcctgccgcctacattatcacatacgtacagcgggggagcgccgtctatgagtttactccatcatcagctctaggaggaaggagagctgctcagtggctgctgtctgctgacctgtctgtcattggcatggcacatcgtcaagaactcgccgcaagcccgcctcttcctgcgttggagcagaacgcgagacatttcaaacaccaatttttttcccctttcgtagtctcggtaaaactctggatccagctctcgcgatgcagtgttacctgagcttgtttaa

SEQ ID NO: 100180 - DNA, 84 bp, Zea Mays
cgttcaaatatgaagtccgtctcaaaactatttcgcggacgacgaatgcaatcccgttcgcttacgtttgaaatgttcaattct

SEQ ID NO: 100181 - DNA, 1113 bp, Zea Mays
attcttgtttggttggcggttggcggatgcgcacacactacaccgtttgacctctgcccgtctcttcttccctaccacgccacgccacccttacacacgcaccagcaccgctctaggccgcacgccgcaggccgcatcagcttgagcgtctaggactaggaagaggtagcagcgttcgatggccggcgacgactgcgacagcagcaagccaaagcctccgccgccagcggcggagggtgcgggcgaggtcgtcgaaggccccgtggctgcggacaaggcgctgcacgcgctgggcttcgagttcacccgcatcggcgcgcgcgaggtcgccggccgcctccccgtcacagacacctgctgccagccgttcggggtgctgaatggcggcgtgtcggcgctggtggccgagtccacggccagcgtcggcgcgtttatggcgtccgggtaccggcgggtggccggcgtgcagctgtccatcaaccacctccgccccgctcgcctcggcgacgtcgtccgggcgcaggccgtccccgtccagctcggccgcagcatccaggtgtgggaggtccagatatggcgagcggacccttccacaggggagtgcagagatctggtgtcaacagccagagttaccatgctgataataaccaacccatcaaaaccagaggagatgtcgactcacaaagcaagcatcaagaaatacgcaaagctgtagagagagagagagagagagagagagagagaggactacaatttacattactattatatatgaaataaaaccaaccgctttcacctgtttacacctcccagtactaggaacactaaaccaacatcatctccagacatttcactctccaactaatcgatgctcaaagacgaacgaaggacatgtgtgtcgtttctttttgacaattgtgtcagtgcctctgttttagagtaaaactatagattattaccctgttttttagactttgcatttttgtccctattttttttttaaataaaactgctgtataccattatttcgtcagttatacttaatggtgttaagtgggtgtttgtcactgctctgggtttcaacttgagcgtgaagatgatatgtttgcaata

SEQ ID NO: 100182 - DNA, 722 bp, Zea Mays
taaggaaagtgatgacagcaaaggagaattgtccggtgacatggctgaagctgattatgaaggatgggacaaagggtatatttcgaaattaaaaagagcacagagggctgtcaaacaaattgctggaggtgatgatagcatggatgagcaggaggatgaaacacaagaaaatgtttggggcagaggtaaaaatgcatactatgctcctggtgaacaatctggtgatgatgaggtggattacgaggaggcacaaaggatacaaaaaaataaggaaaaaggctgtctatgaaggattttggattagaagatggtgaaagtgatgaagagggtaatgcaacaaaggtatccaaccatgaatccaaaatgaaagaagactttgttgtcttatcaggcgatgagaaaatggatgtgctatacaggtttgtttttttgactcgtactatatgtctagttccttcgtaaagtctgtcctgatgacataatggatgtaccgttcaccagtgcttgaagaattgtccaaacattttttttactttttggctcaggctctcgcaattaacagatcattctgcatatagtaccaaacaagcctatatgactgtcatcatagagtaggggttcaggtaatggaagagtttggggtttaaccaaatggcttgttcttactacacacaaactgcaagtaacttcacagaaacatctgtatgcacagagaaactaag

SEQ ID NO: 100183 - DNA, 199 bp, Zea Mays
tctttttgagctaacaaaaacactccagtctgtcataagtagatgcctccttggttgccctaaaagtaacagcaaatactttaagggtcatagtaacctaaatcattatgaaagcatcattgtttgtgataaaaaatagttacaataaatttgtttctgaatcaggggaactaagttcattcaaaattaacaccacatc

SEQ ID NO: 100184 - DNA, 803 bp, Zea Mays
ccgccgtccgcgcagcgtgaaagaaagaattggatgctgctgcttagcagcgaaggaagcgggcaggaaggccgtgtggggtccacacctccccggacacccgcgcagccgccgcccacgcttggtccgtcgaccgccggccgatcgattgatggatgcatgcatccaccgtccacgtacgcggcgacgagacgtgttgcgtttgcgtgccaccggactagctagtagatcgctcgactggtatgtagctgtcgccatcccatcgccctccctctcgtccaaggtctgcctgcctataaagtgaaagtgaagccagggaagaggcaaagcgaaaggagagaaggaatccgatccatccaagccaagccaaggcagagaagaagaagaggaggaagaagaagcatcggcagcatgtcggaggggactgccaactgcgtggacatcctgatcgccatcatcctgcctccgctgggggtgttcctcaagtacgggtgcggccacgagttctggatctgcctcctcctcaccttcctcggctacatccccggcatcatctacgccatctacgccatcaccaagaacacctagctagtcatccttgccgacgacgatccatgtctctgtatctgtgtctgttcatatgcctgatgccgacttgtgctgtatgtagttgcttgaattcagtcgtgttcctgttttgctaccgtacccaccccatgcatcatctgtcaccgcgacgcaataatcatagtaataacaagttcagataatcgaattcattcgctgctaaaaaaacactaaaa

SEQ ID NO: 100185 - DNA, 359 bp, Zea Mays
acatccggtgttccacggtaacagaaggcgctggcggagcagggttacgcgggagcaccgtcgtgaagtcgcgctagggtgtcgatctacatccttcggtgggctggagggcacaacctagagcttgtgtttggagttgcggcacattgtctcacgggaatccacccagacccagtcaatttcttgtcgtagtaaacctgtggcgaccgcgtctgccatcaccgtcactcgggcaccacaacaccccggatgcgagaggtcatgagtcatcggaagaccaacatggtacctggaatctcgagtctaaggcaagttgtgtgcttgatcactcttctttacctaataatgttcctgttaat

SEQ ID NO: 100186 - DNA, 107 bp, Zea Mays
gtgcagtcccacgaacggtgccggcgacgagaaacttgatcagtgttggtcgagcggacgaagcgagcagtcgcgagtacgctccccaaaaacctgattgcccgcac

SEQ ID NO: 100187 - DNA, 1354 bp, Zea Mays
gtttggagtcttgactaatatattctttttcttttatatgatgtattagtatctattaataagttcaaatggtcgatgggcaaatagtttgccagctctctggctaacaattagtcagtcggtttagaggcaaaagtgctaaattaatctgaaaactgtttaccacagagatcaaacatgtctgacaaaaaaaaaagaaaaagaaaacggacttgcctctgccgtgatggttatgatgatagtgcaaatcgagaagggcatgacattggcatggacgacggtgagcccgaggccctcgaccacggcgagcgctgccgccgccacccctttgccgcccccgcaatggatcctcaccatcgcgctcctctcggagaagcgtgcctcgatctccggaagcgccggtgaccccgacgacgacgatgccgacgtcggcgaccgggagccgccattctcgtccgtcgtcgtcggcgctttggtcctgctgctgccggcggcggcggcggcagcctcttccagggccttgagccgctgctggagctccttcacgtacttggctgcgtcggagaggatcgtcgccttgtccatctgccatgccacgatcgagcaggttatcggggatttgatcgatgcagcagagtgcagagagaacaagggcaggggttcagttcatatggatcggctgggactgagaaaggaccttcttgagtcctgggatgacggtggagagctcgatcaagcgattgttgatcttctcccggcgtttgcgctccgcgacgatgtgttccggcgtgcacgacgcggctcccatgccgcgtgttgggtggtgggctcttctcggcggcggtggcggcgaccggcggcggtgggccagctccggcggcacgcggcgtatcgggacggcgccttcctccagcacgccgtcgctgcgaggctgcgccgccgccgagccggtgacgaagttccagctcaccctcaccgtgggcagactggtgttggttttgccgctcgggaacgagttgggcgagtgtggcggcccggagccgccgtagaaatccgcggcctccgcagccgcgggggctgcagggtcagtggccccgctgctgccgccgtcggtgacctcgccgccagaaccgctcgtcgtccagctgtttgccgcgtcgtcggtttcgacggcggccatcagctcccgcaccatctccgccgcgtgggaggcgtcgcggagcccttgcaacgaggggaagacggctactgcctcgccgcagctgtcgtagagcgccgcaggctcctcctcctcctgcagcagcgtgtccatcgcccattccatgagcaggcttgtgtcctccatgttgtttgc

SEQ ID NO: 100188 - DNA, 2873 bp, Zea Mays
acacatagccggaagcaaaaccaagggaagggctaaacctcccttggcacaagccctcaaccacctccaccaccacctttaaaagaaggtgctaaagggctgtcctgcagagaaaaagagaggagtgccccccacaaacctttccttgcattccactgaaatcttcctatctgcaaccatgcagttgctcaattctggcctcagctgaagcccaaccatccattgttatataagtcgctgcagcctttgcaatttcccactccttcagccaccatcggtcattgaaggagcttcgtgccaccagagaaggtgttcgccgtgcataatcacagactatatacattccacagacctgtaaagctctgtgaatttggagctcccacaggttctgcattggcgttgagatggggaggcattcttgctgctacaagcaaaagttgagaaaggggctctggtcccccgaggaggatgagaaactcatgaaccacataacaaagcatggccatggctgctggagttctattcccaaactcgctgggctccaaaggtgcggaaagagttgtaggctgaggtggataaactatctgaggccagacctcaagagaggggcattctcccaagacgaagaagacctcatcattgagctgcacgctgtccttggaaacaggtggtctcaaattgcagctcagctgccagggaggactgataatgagatcaagaatctatggaactcgtgcatcaagaagaagctcaggcagaaaggcattgatcccaacacccacaagccccttactgaggctgatcgcagcggagcagctcccaccatcagcaccgagagaacctcagggtccagcgaaatcaacccatcaagcgctggtgctctgggaaacttgagccacctcctcagcgagacggctcaatcatcaatgctgatgcccgtgtatgacaagaatcgcgctgaaactccaaacttggcacgccctaaggtgccaccaaaggagttgttcctggagcagcttactgctggacacgagagtccatcaacctgccgctcatcaggccaaactctctatttccctttccaacagcctttaggctacaacagtgagagtggcagtggcgatggggcgaatatgaattcactctggttcaaccagagtgacttcaactgcagcacaatttctacagtgatgccgccagcttcaccatcggccctctctacatcaatggggctgaatcttccacctgataattctcgacatggaggaactggcattggaagtactgcagtagattcattctactgggatggtactaatcctagcagcagtagcagtactgggagcagaggaagcaacagtatgggatttgaaccacagagcacgagctcaattctggagaacagtgtcttccaatggacagacatcggacaagaaaaagatacaagagctcacctggtagaggaacttaagtggcctgacttgctccatggaacctttgccgagacgaccacagccatgcagaaccagagccagacgctctatgatgacgtgatcaaggcagagagccaattcagcatggaagggatatgtgcttcttggttccagaatcagcagccacagcaacagcttcaggcaacaccagacatgtatgacaaggacttgcaaagaatgcaactgtcttttgagaatatctaggcattatgttccacatggaacagagcagatcagcagaagcagaaatttgtaattttcagagattcgtgggcagaactatgctgaattgcttacatagatacattaagttgatacagaaatcatcctccacagctgctcctcagttgaagacctggcaatatcaaggaaaggacagccctggcattagaagtggcagcagaatgcatacaaaagtacgttctagagtctctttttctttatcttgaaaaatgatgtttccttctgtacacaacgactcaacttttgcatatttgagtttttgttcactctctggtggaaattaaataaatataggcagccatgggcaaaactgcatgtgttggtagctctcaccatgcaagtagacccaaacatttcaactgctgccatgcacgtccatgcaaattaattattgcatgttgtattttctttttcttttttttgataagttgccgacaaacgacagttgtatatttgtaagaagaaatttggaatgttgacctgagagctattttcttccccctttcactttcccgtttctgtcgtaaacttttctgtgtggagaacccaagctacttgagcgctttctacttgaatacaggaatggaaaacgattggttgatttgatagggtacaaaggagcaatcattctcaagaagaagtaaacacattcaggaaagaaaaaaggaagaaactattcatgaatatctacctaccatgtagattgggtaatctatgaagcctcaatgtggtgagactcaatatatgatccattgagtttgtgcatcattatttatgtaacatagccatgatgtgttctgtaaatttagtcagtgaaatctcttaaagctttgcactttggctgagttaatattcagctgtcatgggggctgaagctagcatgcttcctgggtggctgggtctattcctcattgtttgtgcaatagtctagggcgagttttgtttacataaaatggtgtatcacccccctcaagctagctatgactgaaaaaacccaaatgagttaaagaacatggtttttcaacatcttcattaaaaggtacattgcctggattttgagaagccttactcgtacacatccctgccttttattttcttatagactttggcaattagtacactaggggatattaaata

SEQ ID NO: 100189 - DNA, 699 bp, Zea Mays
acacatagccggaagcaaaaccaagggaagggctaaacctcccttggcacaagccctcaaccacctccaccaccacctttaaaagaaggtgctaaagggctgtcctgcagagaaaaagagaggagtgccccccacaaacctttccttgcattccactgaaatcttcctatctgcaaccatgcagttgctcaattctggcctcagctgaagcccaaccatccattgttatataagtcgctgcagcctttgcaatttcccactccttcagccaccatcggtcattgaaggagcttcgtgccaccagagaaggtgttcgccgtgcataatcacagactatatacattccacagacctgtaaagctctgtgaatttggagctcccacaggttctgcattggcgttgagatggggaggcattcttgctgctacaagcaaaagttgagaaaggggctctggtcccccgaggaggatgagaaactcatgaaccacataacaaagcatggccatggctgctggagttctattcccaaactcgctggtatgtacaacaattttttttcttccctttggtcctcagttatcaactctcaattctccccttcttcctctgcatttttctcgttccagttgccaactgaaatctctctctctctcctgtctctcaaatacctcttggtcagttcaattacctaaattcgag

SEQ ID NO: 100190 - DNA, 105 bp, Zea Mays
ctatcctcgaatttagatattaacttccattcaaagttggacccagtgttacacgtgtattgcgacatgaggagaatggatgaaaggagagagagaaaatctgtc

SEQ ID NO: 100191 - DNA, 125 bp, Zea Mays
ggtcgtgcgcgtcttcggccacgctgcgccttggccgtttccgtccggaagaccggtgcccctctcccgtgtgttcgaaacctagtcgctaggcggtgcgtagggtggggggagggacgaatccg

SEQ ID NO: 100192 - DNA, 465 bp, Zea Mays
tctgatttcgagtctgtagagaaccgagtgcggtttcaacgtcgaggcatcacccggttcacctccagacgtccagttctccaccccacttcgcccaccgagtgccagtggagcgcttccttgacctcgccacctcctgtcctccccctcccctaccggcgcctgttctttctttcccttgtcggacgcccgccgtcgaagctgaagaggaggaatgcagccgccacagcactacccgccgacgcctgaggcggagtcgcgggggccagggccggccccaccaccatcgacgaggcgtccatggaagtcagcaagagcttcatcaaggctctacagtttctacttcgtctcacaagggatccggttggatttatgcttcatgatgatggcgcgggagctcaagaacctacgcccacaactctgcaccatctccgagtactgcgagaagtcctacctccacagcaa

SEQ ID NO: 100193 - DNA, 1438 bp, Zea Mays
cctggattgctatggctatcgttgtgttgttacttggacctctggtgttaggttcctcatattctgcttactagatttctgctgttgatgcctgtagattggtaggtagctcgagatggatctgattcttccatataaggttggggacctcgcggagtccaaatccttggtgagcggttacagaggtgcatggtttcgctgtaagatacataatatgcgtgtcaggcttggatacctggagtgttacttggaatacattgattatccaggagaaaaaaaggaatgggttaggctctttcgaaagaactctgcaaggtccaaccaaaattcaagtgatagtattcacaccatgataaggccttcatttccaaaatggtattttgtgcatgaagttcctgagcagttcccaaatagtgatgtcacagcaattgttgatgaaacctggcaaattggtgatcgagttgattggttgaaggaaggttgttattggtctgggacaattactaagataatcaatgaagatctggtcgagatagagctgccggcacctcccataggtgaaggaaaatgttataaagctaaatgtagtgatctgaggcctactctcgagtggtctctagcaagaggttggatggtccctctttcacagaatcagatgatgataatgacgacaacgatagctgggatgcccggcaaacggtgtgcagagcttcaaacacgcctgaggaagctccaggccccatggtccctgcacctccgtcagccacaaacaacgctcccagccacatgtatcagaaggatgctgctgtcacatccacagaggacctgctgaagcccagctcaacatccaagtcgccagaccccaggcacgacgcccaagctagcactcaacctgcaggtacgggggtctccatgaagccggaaccggttattggagtctcaacaatcaagaaagaggactcctccttgacagaaggtgaggttgatggcggcacggaagagtgcctggagaagctgggcgcgatcaaagccaggctcaaatacctcatgcagggcacgcggctggaacatgagcgcagcgccaccttccgtgggtagtcaggcagatgaagctgcatcaaaggtgcaacttcacgcaggggtttagggtttagggccatctaacgcctgttgtggttgctgaattttgtgtcctgtggttacaggtattattgtcctgaataatgacgttgtgaataagtggtttgtttttttgagtgcggcaatttgtaggagctaagaggaatgtgttgctgagttaagttatgaattagaccgtgtccagcagttcactcatatggtcatcctaaacaccgtgcagtagagtttgaatattagtatgaggatggataaactggtgcagatagccttatgttgtgaatgaatatgttgctgagta

SEQ ID NO: 100194 - DNA, 1490 bp, Zea Mays
cctggattgctatggctatcgttgtgttgttacttggacctctggtgttaggttcctcatattctgcttactagatttctgctgttgatgcctgtagattggtaggtagctcgagatggatctgattcttccatataaggttggggacctcgcggagtccaaatccttggtgagcggttacagaggtgcatggtttcgctgtaagatacataatatgcgtgtcaggcttggatacctggagtgttacttggaatacattgattatccaggagaaaaaaaggaatgggttaggctctttcgaaagaactctgcaaggtccaaccaaaattcaagtgatagtattcacaccatgataaggccttcatttccaaaatggtattttgtgcatgaagttcctgagcagttcccaaatagtgatgtcacagcaattgttgatgaaacctggcaaattggtgatcgagttgattggttgaaggaaggttgttattggtctgggacaattactaagataatcaatgaagatctggtcgagatagagctgccggcacctcccataggtgaaggaaaatgttataaagctaaatgtagtgatctgaggcctactctcgagtggtctctagcaagaggttggatggtccctctttcacaggcaaatggaaaaggttggcatgctgctcgtctacttcagcattataaatctgaatcagatgatgataatgacgacaacgatagctgggatgcccggcaaacggtgtgcagagcttcaaacacgcctgaggaagctccaggccccatggtccctgcacctccgtcagccacaaacaacgctcccagccacatgtatcagaaggatgctgctgtcacatccacagaggacctgctgaagcccagctcaacatccaagtcgccagaccccaggcacgacgcccaagctagcactcaacctgcaggtacgggggtctccatgaagccggaaccggttattggagtctcaacaatcaagaaagaggactcctccttgacagaaggtgaggttgatggcggcacggaagagtgcctggagaagctgggcgcgatcaaagccaggctcaaatacctcatgcagggcacgcggctggaacatgagcgcagcgccaccttccgtgggtagtcaggcagatgaagctgcatcaaaggtgcaacttcacgcaggggtttagggtttagggccatctaacgcctgttgtggttgctgaattttgtgtcctgtggttacaggtattattgtcctgaataatgacgttgtgaataagtggtttgtttttttgagtgcggcaatttgtaggagctaagaggaatgtgttgctgagttaagttatgaattagaccgtgtccagcagttcactcatatggtcatcctaaacaccgtgcagtagagtttgaatattagtatgaggatggataaactggtgcagatagccttatgttgtgaatgaatatgttgctgagta

SEQ ID NO: 100195 - DNA, 1453 bp, Zea Mays
agagaagaatgggaatccaaaatcctataagaccctcctcccttcatgcacagctctgccgcttgcctccgccggcgagggaagggacgaggcgccgagccggcaaccgttttcggggttgctggcggcgattggctgcggttccgcatcaaggctggtcgaacgctgcccctcctgattggtaggtagctcgagatggatctgattcttccatataaggttggggacctcgcggagtccaaatccttggtgagcggttacagaggtgcatggtttcgctgtaagatacataatatgcgtgtcaggcttggatacctggagtgttacttggaatacattgattatccaggagaaaaaaaggaatgggttaggctctttcgaaagaactctgcaaggtccaaccaaaattcaagtgatagtattcacaccatgataaggccttcatttccaaaatggtattttgtgcatgaagttcctgagcagttcccaaatagtgatgtcacagcaattgttgatgaaacctggcaaattggtgatcgagttgattggttgaaggaaggttgttattggtctgggacaattactaagataatcaatgaagatctggtcgaggcaaatggaaaaggttggcatgctgctcgtctacttcagcattataaatctgaatcagatgatgataatgacgacaacgatagctgggatgcccggcaaacggtgtgcagagcttcaaacacgcctgaggaagctccaggccccatggtccctgcacctccgtcagccacaaacaacgctcccagccacatgtatcagaaggatgctgctgtcacatccacagaggacctgctgaagcccagctcaacatccaagtcgccagaccccaggcacgacgcccaagctagcactcaacctgcaggtacgggggtctccatgaagccggaaccggttattggagtctcaacaatcaagaaagaggactcctccttgacagaaggtgaggttgatggcggcacggaagagtgcctggagaagctgggcgcgatcaaagccaggctcaaatacctcatgcagggcacgcggctggaacatgagcgcagcgccaccttccgtgggtagtcaggcagatgaagctgcatcaaaggtgcaacttcacgcaggggtttagggtttagggccatctaacgcctgttgtggttgctgaattttgtgtcctgtggttacaggtattattgtcctgaataatgacgttgtgaataagtggtttgtttttttgagtgcggcaatttgtaggagctaagaggaatgtgttgctgagttaagttatgaattagaccgtgtccagcagttcactcatatggtcatcctaaacaccgtgcagtagagtttgaatattagtatgaggatggataaactggtgcagatagccttatgttgtgaatgaatatgttgctgagta

SEQ ID NO: 100196 - DNA, 1570 bp, Zea Mays
agagaagaatgggaatccaaaatcctataagaccctcctcccttcatgcacagctctgccgcttgcctccgccggcgagggaagggacgaggcgccgagccggcaaccgttttcggggttgctggcggcgattggctgcggttccgcatcaaggctggtcgaacgctgcccctcctgattggtaggtagctcgagatggatctgattcttccatataaggttggggacctcgcggagtccaaatccttggtgagcggttacagaggtgcatggtttcgctgtaagatacataatatgcgtgtcaggcttggatacctggagtgttacttggaatacattgattatccaggagaaaaaaaggaatgggttaggctctttcgaaagaactctgcaaggtccaaccaaaattcaagtgatagtattcacaccatgataaggccttcatttccaaaatggtattttgtgcatgaagttcctgagcagttcccaaatagtgatgtcacagcaattgttgatgaaacctggcaaattggtgatcgagttgattggttgaaggaaggttgttattggtctgggacaattactaagataatcaatgaagatctggtcgagatagagctgccggcacctcccataggtgaaggaaaatgttataaagctaaatgtagtgatctgaggcctactctcgagtggtctctagcaagaggttggatggtccctctttcacaggcaaatggaaaaggttggcatgctgctcgtctacttcagcattataaatctgaatcagatgatgataatgacgacaacgatagctgggatgcccggcaaacggtgtgcagagcttcaaacacgcctgaggaagctccaggccccatggtccctgcacctccgtcagccacaaacaacgctcccagccacatgtatcagaaggatgctgctgtcacatccacagaggacctgctgaagcccagctcaacatccaagtcgccagaccccaggcacgacgcccaagctagcactcaacctgcaggtacgggggtctccatgaagccggaaccggttattggagtctcaacaatcaagaaagaggactcctccttgacagaaggtgaggttgatggcggcacggaagagtgcctggagaagctgggcgcgatcaaagccaggctcaaatacctcatgcagggcacgcggctggaacatgagcgcagcgccaccttccgtgggtagtcaggcagatgaagctgcatcaaaggtgcaacttcacgcaggggtttagggtttagggccatctaacgcctgttgtggttgctgaattttgtgtcctgtggttacaggtattattgtcctgaataatgacgttgtgaataagtggtttgtttttttgagtgcggcaatttgtaggagctaagaggaatgtgttgctgagttaagttatgaattagaccgtgtccagcagttcactcatatggtcatcctaaacaccgtgcagtagagtttgaatattagtatgaggatggataaactggtgcagatagccttatgttgtgaatgaatatgttgctgagta

SEQ ID NO: 100197 - DNA, 1654 bp, Zea Mays
actttacaacatgccggtggctccggacattttgcggtcaaagcattcagcaccgaagcaaagaaagaagggctgaagctcgcgcaggcatgtcgacgctcgccttcgctgtgcgccggcgcgaggcggagctcgtcggtcctgccgcgccgacgccccgcgacaccaagcgcctgtcggacctggacgaccaggccattctgcggcgccacgagcggctcatgttcttctaccgcggcaggtccgggtcacgggccaccaacgccgacccggcggccgccgtccgccgcgcgctcagcgaggcgctggtcccgtactacccgctcgcggggcggctgcgggaggtggaggaggggcggaagctcgccgtcgactgcaccggcgagggggtgatgttcgtggaggccgacgccgacgtgcgcctggcggagctggaggcggccacgggcgggctgaggccgccgttcccgtgcgtggaccagctgctgttcgacgtggaaggcagcggcggcgtgctcggctgcccgctgctgctcgtccaggtgacgcggctcctgtgtggcggcttcgtcgtggcgctccgcctcaaccacaccatgtgcgacgcccacggcgtcgcccagttcgtgtccgcggtggccgagctcgcgcgcggcctcgctgcgccggccgttgcgcccgtgtggtcccgggaggtcctggaagcgcgcagcctaccggagccagccggcgtactccaaccccatcgccgcgaccatgacgtcgtgccagtagtaccgcagccaccgccgccaccgcccggagacggcgacatggtcgtgcggacattcaccttcggcccgcgcgacgtcgcggcgatcaagaagcgcctcccgccgcgcctccgggacacggccacgagctacgaggccctcacggcggccatctggcgtgcacgcacggcggcgctggagctcgcgcctggcgaggaggtgagcctcgtggtcgtcgccaactgcaggggcgtgcgtggcctggggatccccgacggctactacggcaacgcggtcgcgtacccggttgctcgggccaccgcgggggcgctggggctgggcaacgcggtggagctggtgcgggaggcgaaggcggcggtgactgccgagtacgtgcggtcggcggtggacctccttgcccggcgccgcgggtgcccgccagcgctggcgacgatggctaacgtcttcgccgtgtcggacaaccggcacgccgggttccatcgtgttgacttggggtggggcgtgcccgtgttcggcggcgtcgtgaccaccgtgtttggggcaagcttccttgttcccgttagcggcagcgacgggaaggaagccgtggccgtgccaatcgtgctgccacgtccagccatggatcgtttcgcgtcggagatagagatgacactgacactgacctgccacgccgcggtcggctcagcagcgccgccaccaccccgtgggagactttgaacttgccttgcctgctgcgttacacgaacgtaacgtctacgtagaacgtccgtgttatgcgttccatgtttacaatttgtccgtgactatgctgaaaatagtcatctttggatatatagtcataattatgttaatccacgcgtgatagtggaacttaaactaaa

SEQ ID NO: 100198 - DNA, 483 bp, Zea Mays
cgcatcatcgtcgccgcgcgcccatctagctcaagagccggacaatcggagatgaatcgctggggcaagagcaagaaccctgccccgcccgcccgcagcggcgccggcgccggtgctgcaggtgtcggggaggtgccggtgcagaaggtgagcaagatcgagttccacagcctggtcaacaggcccgccatctacggcggcggcggcggcggccgtgcttcacgaggggcggaagacgacatcaacgagaaggcggagaggttcatccgggagacgaggctgtggttccaccgccagaagccggccgcctgatgacgtcgccgtcatgcagatgcaggcatcatcatcgtatgcatatatatgtatacggatggatattattattatcctttattactatggatatagccaacgcatatatatagtataagtacaataatatatagaattaatatcgttggtatttgatcattgaaaccaata

SEQ ID NO: 100199 - DNA, 723 bp, Zea Mays
aacaagcaacaagcgcaaggcggccaaacatctctagctaagctagcatccagctgaaaagctgcaggtgacgatgtttcgacgcgccaaggccaccaccacggcgcctcctcctactgatggcgaggtgaggattcagaaagttgacaagattgaggtcgtctacaaaaacatactctccaagccaaaactgtacaagcctactgcggcaaccgggaagcatcctactgctggtcatgaggtcgcaggctggaagaagaaggtcgttgatcagaaccccagcaggcctagaagtgcagttcatgtagatgacatcaacaagctgtctgaaaggtacatcacagagatgaagaaacgatttcttggctagcagctagtacctgatgaacctcctgtgatggccaaggtggtgatattaattggtgtgtcgtccatgtacgtaattggtttggttatatgtatatagttgatattgctacgtgggatgtaatatatatatatatatatatatatatatatatatatatatatatatatatatatatatatatatatatatatatatatataagagagagagagagagagactactttagttataaatggtacaattgtgcatgttgtatccatctatgctatctgtatcatacagagagaacataatgttgagtaacaagcttagtatcagtatgcctgatgcgcgcaaatggtcggttttcac

SEQ ID NO: 100200 - DNA, 666 bp, Zea Mays
aaggcaaacaaaacaagctcaaacaacgtgtcctggggtacacagctatagcttcctcgctccgatcccttgcaacaaatcgaacgccatggctcctcgcgctaagaactctctagtggcggagggtgacgtgagcgtgcagaaggtgaagaagatcgagcctgtctacgactacgacctagtcaccagaccctgggtgttcggcaacccgagagtggtgacggtgctggcaaggccgccgccgggtgccggggtttctgtcgcctcaggccagaagaagctgttccagagggcgctgtcagagcaagagatcatcaacgactacatcgccagaaagaagaagcagtttgccggggagatcccatatagtacctagggtgtttacatatatagtttgagaagagataaaaaaatcctacaattaagccctctctatatatatctatatatgtactcagagagtacatcgttaattatatgtgttgtgttatggaattaataccttatttcctatttctgagggtttaagccgtcgaaaattcctcgttttagtgttgtgatatgtcattagttatgaatgctgctgcaaaatatatatgtacatgtgtgaggtgtttgctttatgatatgtgtattaattgttcctgatataaaaaatctttatct

SEQ ID NO: 100201 - DNA, 645 bp, Zea Mays
acagatcgagcaattaatctatagctagaaaatcatcagcatcgattagcgaagaaagaacttagaaaggggccggccggccggccgggatcgatgtcgaaaatgttccgcggcaacaacaaccctagtagcaattacgagctgccagtggagagcgtggtgagggtgaagaaggtggagaggatcgaggcgaacaacctggtcagcaagcccaagccgtcgcagaccaaggtgaccaggagcctgaccgtcagcgttgtccgggtcggggacgtggacgaaatgcccgacgacagccacagcagctttgtctcggtgcctattgctgcgcatacctaattaattaataagtgatcaccagttcaccaccgctcctgtctgtctgtcatatagtaaagccgttttcgtttcttgttgtataattaaataaccttatatatgcaacttttcgattttctagctctctgaattgagttcgaccactgcaattgtaccctgtctctgaattcagcgcgtggataagcacgtacacgagacaaatatctagaatatattcttcacccataccatgctcttctatagcacctacgcccacacgcaactttagcaacacagaattcagacaatatttacttacatgtgtga

SEQ ID NO: 100202 - DNA, 1826 bp, Zea Mays
aattccccaatcgctcgttttccaccgccgcggcggggctaaatcgcccggttttccccaagccaccgtcgctccacgccaccccagcgtcgccgcctccacacgttcgtccccggtaacacccgtttttatccgtcctaccaccccgcacgcccgctcgcctcctcctatcgtcgcatctctccacggccgcgagcagcaatcgatggtgggggacctgtccctcctcgccgtcgcctccgcctcccccgtcgtcctcccgccttccaaggagctccatggcgtgcttcctctccagggtaagagaccgcaggacgccggcgtgcagctctgcgcgccgttgcagcagcatccgccccaccatctagaggcggtgccttaccaccagggccagcccgtgcagatggtcgtgcccggcaaccatcagggacaggccctcccggcggcctaccaggccatcacgatgcccgacacggccgtgctcatcgacgtgcaagattctcaccctgactcggttcaacttagccttgggattgcggagcaatgtgcaaggcaagagaaactcctcaagtttctggtgtcaggatctgatgtaaaggaacttgatgaatccttgttagctgaattcacggggcaacagactctagcaataaacatgggaactcatccatatatgccggatgataagctatcaattcctgaattcatgttgaatgagccccaacactatctgccagagaaagaacttgtcatcccagatcctcttctgcacttcatccagtcccatggtgctgctcttactattgatcaaagtggtcgggtcctcttagctggcaatggtgatgagatgagagacttgctctcaattttcctggcgttcaacatgtcgagacgagaaacaggtggctgcaaggctgcatttcttgttccatactttgagaggaaaagacgttctagggctaacagccaagtatccaatttaaaattagcaggcacaactgctgatgtttcaaaaagtactgattttaattcaaaatctttgtcaaagaagaaacataaagtgaaaaacatcaaagaacgtgactcgtatcagagaaactacatacatgctagcgaggttattttatccatcctgctggacaaggacaggagcagctcgacaatcctctcgctgaaaaaggctggtcctgagatcactgaacttttaacgcaatgctctatcggcattgctggaactggactggctattctcctgtcagttatgtgcaagatgtctaatggcatgaggactccttttgcttctgcccgactgcttagcaccagcgtcggattcggactcttctggctatcctgggcagtcaatggattgcgtgacaccatcgccagcattttcagaagccgaagtggcatgaatatcgaggatgacgaggtcgcagtgaaaatagaaaaaagtgtgaacgagatcctcttcagggcattaactctcctggcaatcactgcactgaagtttgcatgagcagtcatcacgattttataggtttgtcgatgcagttgtgatatactcacctatgtctatgtggttcaggagtgtagacgtgtagtactgctttctgtaggaccaagttccacctgcccaaaccatggttatagcttcccagttctcattgatctcgtagaaaatgagccaagttgtaaattgtacagaaattttgcaggaaactcggtgtatattgtggatgatggattttaactctgtgaacattggataatctgatgcccagagcttatttatatttttatctacttaatagctgctgcattgtttc

SEQ ID NO: 100203 - DNA, 2365 bp, Zea Mays
aattccccaatcgctcgttttccaccgccgcggcggggctaaatcgcccggttttccccaagccaccgtcgctccacgccaccccagcgtcgccgcctccacacgttcgtccccggtaacacccgtttttatccgtcctaccaccccgcacgcccgctcgcctcctcctatcgtcgcatctctccacggccgcgagcagcaatcgatggtgggggacctgtccctcctcgccgtcgcctccgcctcccccgtcgtcctcccgccttccaaggagctccatggcgtgcttcctctccagggtaagagaccgcaggacgccggcgtgcagctctgcgcgccgttgcagcagcatccgccccaccatctagaggcggtgccttaccaccagggccagcccgtgcagatggtcgtgcccggcaaccatcagggacaggccctcccggcggcctaccaggccatcacgatgcccgacacggccgtgctcatcgacgtgcaagattctcaccctgactcggttcaacttagccttgggattgcggagcaatgtgcaaggcaagagaaactcctcaagtttctggtgtcaggatctgatgtaaaggaacttgatgaatccttgttagctgaattcacggggcaacagactctagcaataaacatgggaactcatccatatatgccggatgataagctatcaattcctgaattcatgttgaatgagccccaacactatctgccagagaaagaacttgtcatcccagatcctcttctgcacttcatccagtcccatggtgctgctcttactattgatcaaagtggtcgggtcctcttagctggcaatggtgatgagatgagagacttgctctcaattttcctggcgttcaacatgtcgagacgagaaacaggtggctgcaaggctgcatttcttgttccatactttgagaggaaaagacgttctagggctaacagccaagtatccaatttaaaattagcaggcacaactgctgatgtttcaaaaaggtactgcattctttttgcttcctttttatgatcaggcatatgttacttcatgttgctgctttcaaacattattagttatgccatcccccatgctattttctcatttcacttattttagaagttttgatactgagtactgcagtgcttagtgttatgccaattgtcagcacagcataaatctttctgattgtagtggggtgtgaccttatcatttgcagcacagatagtagtcggcatttttttgtaactatctttattctgcatgttatagaatttaggaagtttctatgaaagttagcaaacagctaaacactaagcagaggggactgttgttattttgaacatttttaagtggttataaagttttgtctgtgccagaagtatgcgtaagtcatcattttggggcttaaacatgcatgaaagacctttaattgtggaaggtcttcatttaaccttgatatgtaatgttctaaatgaattctttaaatttacatgcgggtgcagaaacatttggaacatttaacttttatgttcttgctacattttagattgttgtttccacctttttagacagtcaagatattgatacgttctgttgtttttttaaatgtgcagtactgattttaattcaaaatctttgtcaaagaagaaacataaagtgaaaaacatcaaagaacgtgactcgtatcagagaaactacatacatgctagcgaggttattttatccatcctgctggacaaggacaggagcagctcgacaatcctctcgctgaaaaaggctggtcctgagatcactgaacttttaacgcaatgctctatcggcattgctggaactggactggctattctcctgtcagttatgtgcaagatgtctaatggcatgaggactccttttgcttctgcccgactgcttagcaccagcgtcggattcggactcttctggctatcctgggcagtcaatggattgcgtgacaccatcgccagcattttcagaagccgaagtggcatgaatatcgaggatgacgaggtcgcagtgaaaatagaaaaaagtgtgaacgagatcctcttcagggcattaactctcctggcaatcactgcactgaagtttgcatgagcagtcatcacgattttataggtttgtcgatgcagttgtgatatactcacctatgtctatgtggttcaggagtgtagacgtgtagtactgctttctgtaggaccaagttccacctgcccaaaccatggttatagcttcccagttctcattgatctcgtagaaaatgagccaagttgtaaattgtacagaaattttgcaggaaactcggtgtatattgtggatgatggattttaa

SEQ ID NO: 100204 - DNA, 108 bp, Zea Mays
cttatattttggggtgggtgtgggatgaatatcaaagttattatattggggtatggatgggagtgggttggattttttgtcattagcaggcctacctataggtgcata

SEQ ID NO: 100205 - DNA, 2136 bp, Zea Mays
atgctactacgggtctacgccgagggggagggagggaaagcgcgctttgcagtctcctactgcatatcccgtttccctgagtctatttctcctccgtctgattactgatgggtctggtgcaggcgcggggcatggtcgacaggttccggatgcgcgccaagggcggcgacggcggcaatggctgcgtcagcctccggcgctctaggtccaaccgccacggcatgcctgacggtggtaatggagggaagggtggtgatgtaattcttgagtgctcacggtctatctgggatttcagtggcttgcagcatcacatgagaggaggccgaggtggcaatggagtttctaagaatcagataggaacaagaggttctgacaagattgcacaagtacctgtaggcacagtgattcatcttgtcgaaggggagcaaccttctctcacagtaaataaaccgaccagagctctagatccctgggacatacctagtgctgaagaacactcttcagatttgtaccagattgctaatatagtgacagaaggttttgatggtggcttgccccatcagcatattgcccctaagcataacactgatggaaatgacactgtaaagggaagcaacagtaactcggataatccaaaatactttcatacatgctccaaggctcagttctcaaacacaaatcgtgatgtaagaatctattcatgtcaagagggcacagatgaaaaagatcagactgaaagtggggatgaagaattttgggaggatgaagacgagtttgacatggatgaggaggaagaagaggatgagagggaagaacaagatgtgcaatattgtattgctgagatgacaaaacctgggcagcagttaatcatagcacgaggaggcaaaggtggactggggaatgcttttatcatgaaggagatgcggccatccaaagcaaacagacaagagaagatagcccatttgagtactgggcagccaggaactcagagcttgcttatcctggaactgaagagcattgcagatgttggtctggttgggttgcccaatgctgggaagagcacattgctcagtgctctctctagggcgcacccagagatcgccgactatgagttcaccacgctgaggcccaacattggtagcctgatctacgaggactacttctcggttaaagtggctgatatacctggactgatcaaaggagcacatgagaaccgtggcctgggtcatgctttcctaaggcacatagagcgcaccaaagttatcgcctatgtgcttgaccttgcagccacacttaatggcaggaaaggtgtcccaccttgggagcagctgcacgatttggtcgcagagctggagcattaccaagaaggaatgactcggcggccatcactgattgtcgcaaacaagatagacgaagagggagctgaagagatgtgccaggagctgaagaggagagtgcagggagttccaatatttccagtttgcgccatcttgcaagagggggtgccagatctgagagtgggtctaaggaaccttatggatgactcagatccacagggcaaaaattttgagaaaaatgactgttgaatgagattctattttttttctttctcatgacactaacacatatgagtgtgcggggattagatctgcaaatattgatgactctggctattcctttcttgttgtgttgatgacaataattgaacatttgtaatcttatcattcttgtgaaagagcagaaatactatagggtttgtttcagggcagcagcagctgaaacattgggcttggtcagtaaataaacagaactgcatctgtacttggtaaaatcaacaagtcaaagaattagagcctgtttttctctattctgggagctagttctcaatgtcactgtaatctgcacgtctctgacttcctaacttctaagcatgctactactgtatccctttgtaatttaatcagctgtaccatccaatactctgtttacatttgtagtaacactttgcaaagaaactattatgttggagtttctttgcttttataaatgttatgtttttgtttaatcagctgtaccattcaatactctgtttacatcctagcttgtggaggagtcaatctccttgccgtcatattc

SEQ ID NO: 100206 - DNA, 1315 bp, Zea Mays
acatagctcttgttttcattcatgacaataacaattgtactgcattcatacataaagttcacaagtttgcttttgttgtaataaagatcaaaataggcagcaacaacactaagtttggcttgtgaaagctcagagatactagctagtacaaccacatgttggtttcacaattttaagttcacttgcaaatttctcttttggagaaaatacaaaaaaaaatatctagctgcatccatccaaaagaacttttgatctttcttgttgtagcatccataggcaccaccgcgatctgcttgctattgtcatcatggagtaaacaagtgacttactacctctaggacctccctcctgacaaaattaaaacccaaatcattagtagactacttagaaatccattccaaaataaactatagaatagataccaccattgctccataattaagctaaatatacaatagttgaacgcaacagaactgcatggtcacaacaccttgctgctgcttattgagctacatgaattttagagagcagctactcaagtatccttgctagggtccatgctatgttgatcaaacaagtgtccttgctgctactcaaaatatcaaactagagagcatcaacttctatcaatgatccatgcaaacaacccttgagtttttaaggaacaaaccagcatagcatggagatcatttgctagcttaagttttcagtttttatgtggataagatggaaatgttagttgcaatatagcagtataagctaattttaattgaaataatatgaggttcctgatttcggtggtcatgcagtcaaaagagatcaaaaaggtcttcacgatatccatggaaacatatctgctaataatggaaaggaccacagggttgaattgatttatgctggtaggtcaagtattagaactttgatggaagaagagatggccaacaacacacaacccttgaagcaagcacaaagcaatgtcgctgggatatgctctgaagatattgatctaaacttgggtggaagtctcatggaaatctacagatctcatactgaagaccaagaaaccaggaggtcgattgagtcaggtcgtagttccatttcgactgacgaagagaagaatactgaccctccttctcatcactatcagatcccatctagtatccagagagctctagaagatgttgctgaagcagttataaggcatcaatctgcaaacaaaaaatacataaacaacagtgatgaaactaggtccagagaattcattgatgccctatagctactgagctcaaacaagaaattgtttctgatgcttatg

SEQ ID NO: 100207 - DNA, 804 bp, Zea Mays
ggattataatcagtaaaaaagatagttttgttgcctaagagcgtcttgatctaaccatgagccttatagttaagccttataatttaatttactacctgttctatttgtttagggcccaaattcaattgtcgattccaatcatgcatgggccctaaaatagcttacgtttgcaactacatcacgttcgtgtacatagccccctctatttctctcccactccgcacgccattcccgcctagcttttcttccgattgcttccagaaaatcgttgagccctcgctgacgtacggctgcgaccgtggggacgacggcctttgatccatcaagcacctagcagatcaagaggaggggagatgtgagacaaaagacaagagcgcctagcaaatcaagaggagctgggagacgaaccacggggaggcaggatgatggagaggggacgatcgtcttcctcagcggctcctcaccgagaaacgaattaatgaggtgacctagagatgagattgggggcgggcgcgtgggtctggatcggtggcggcgaggaagttgtctcggtgaaatgtccaacgaaggttggaatgaccgcgaacagtattgggccggccgcacgtttgtgagccccaaatctgccgctcttttagcttaaaacatttagatgaattttattaaaatgaggctcctgttggagctcacctttcttgtttaagccttatatttcaatttgtttcagcgttagggcttctgttgaagttgctctaataatcaattattttgggcgctgggctatgtatctccagcagaatcctt

SEQ ID NO: 100208 - DNA, 1070 bp, Zea Mays
atggatcccaacttcaatggtgtgtggagtgcctccgagatggatatggcgaagtcactcatcccaagtcaaatcaccaacaaaacctacacaaacgacatggagacgaagcacattgactttgtggatgatctccaagcaatgttcccatggaaggagaagcaccaggtaaccaatttatatgttgagctactagtggagatcatgagggcacagagcaacaaccaacatgttgtgccaagtagcgtccttgtgaatgataactttgggatgctgtcaaaacccatggacaacatgaaagtgatagaagggtatctaatggatgagatggaggccatgaggattctagaggagcaaccaaatatgctgaatgtcattcataagaaaaagaggcatggagtgaagttttggaccacagacgagcacaggaattttcttcgtggtctggaagcatttggccgtggtgaatggagtaacatctccaagtactttgtccccacaaggacaccagtggacatctctagccatgcacagaagtattttcgtaggcaggagtgcaccacaggaaaacaaggcttcaacatcgacaatgttagcttctatggcacacaaccatgggtgcaaaacaacccttccagctgtgaggcgctcaccttcactggtggtgcttacaacacaaactacaatgacttagacgagaaacatgttgccttcaacagcttcgcaagtgacaaccagttagctacatggtttgtagaccagcatacaagttcttatctagctccactgatggaggaggatgtgagccagacaaataagtggatggacctagaaaatattgactagtttttatctatgacctagtatcaaatgatgcttgtaaaacctagttggttgaagacaatttatattgttaagtgtcattagcgtgccattctatatgggctacaaataattttatcgccagaacaatgcaatcaaatactatcaatgtgtaatttctatattaatgtatctgtttgtatgtgttagttatatgttctctatcttatgttctttgtttggtatat

SEQ ID NO: 100209 - DNA, 1068 bp, Zea Mays
aaatttccccacccagtccgctgcgcaggccagacatccgcggcgtccgcctccccggccccgatcgatcggaagcttcggcttcccctgacacaaggccggcgcgaaaacgcccccacaaacaaacggcggaccattgccgcgcgtcgattcgaacccgccggggaaagcgccgacgccgtctcaccccgcggaggcgaaaccctagcgatggcggcgtccgtggacgctgcggcggccctggcggtgacgccccccgctgtggaggaggcgggcggcgctgttgagcaggccaggacgctcatcggcgcgctcaacctgctttcccgcaacctgccgctgccccccgacgtcctgcgcgcggtctcgtccatctaccacgatgggggtgcgggtgacgatgaggaggaggaggggggagagcgggaagcggagaaggaagggaatatggagatgacggccgcggaggagggttaccccgttgacgttgcgaccaaggggagctccttgattgaagagcttgaagatgcaatatataagaataaaaaaacaccaatatcctactcagagttagcagctctgaaagaagggcgattcaatgcatccattcagcatcggctagctgaacttgaaggattaccttctactaggggtgaagacttgcaaatgaagtgtttgcttgaaatgtatgggcttaagctgttagatttgcagaagaaagtgcgatctgatatcagtgcagaatattggctacagaagaaatgtgcatatccggagaggcaactttttgattgggggctgatgcggatacggtatcctttatccatgtatggaataggagatatcctttcaatggatgctgatgatgttcaccgcaaaaagagatttacagagaggatgtcaagactcgaagaggaagaaaaaaatcaggcagatattaggaagaggaagttctttgcagaaattctaaatgcttctagggaacaccaggtgcaattaggcactacattcaagcaaagaaagcagcggaatgatggagtccaggaatgttttgtcaccatatactga

SEQ ID NO: 100210 - DNA, 821 bp, Zea Mays
aaatttccccacccagtccgctgcgcaggccagacatccgcggcgtccgcctccccggccccgatcgatcggaagcttcggcttcccctgacacaaggccggcgcgaaaacgcccccacaaacaaacggcggaccattgccgcgcgtcgattcgaacccgccggggaaagcgccgacgccgtctcaccccgcggaggcgaaaccctagcgatggcggcgtccgtggacgctgcggcggccctggcggtgacgccccccgctgtggaggaggcgggcggcgctgttgagcaggccaggacgctcatcggcgcgctcaacctgctttcccgcaacctgccgctgccccccgacgtcctgcgcgcggtctcgtccatctaccacgatgggggtgcgggtgacgatgaggaggaggaggggggagagcgggaagcggagaaggaagggaatatggagatgacggccgcggaggagggttaccccgttgacgttgcgaccaaggtgcgtgtgggtggttcttctggtctgtgtggggattgccccccttctgttcgggtgctggggactgcacctgaccgttgtctttgcttgcaattgattgctctattggcccttgcattagtagctttgatagttagtatttggcggctgatgcgcttgtatgaggttctgcaaatttctctgttgaggggtcttcatattcattaggtgggatactttatttggacataactgcttgattatgatgcaagggacaatgcttgagacaattgtatttttgggactacaaacagtgtgctttgcaataatgccattccaaacaa

SEQ ID NO: 100211 - DNA, 794 bp, Zea Mays
gctcttgttgttcagtaactgtttttcccaatgttatgtctaaccgtgttattcagttttgcaatatgcacggcaatttatggtgctatgaatgtacatggctacctcatgtttggagacaagacgctctcacaaataactttgaatcttctgaaagattcatttgcagcaaaagttgcacgatggaccacgatagctattattgtcggtttctctgattcaattaagtgggaacccttggtagtgattcaatcaagtgagaagtgagaaccctcattgtgctatttttttgtttcatgtgatcattcctttcacaaaatattctttagtgataaaaccattagcttagagtatggaagagttgtgtccagcaaggtttatgacggatagtcttcgctgttatgctgcatactcgatgtgttgcctttctcctgccattctttgggttgttatctgtctttgtagccaaagaaacaatcctgagaaagaatggagagctccttggctaggagtaatgtttctaagtggaatcacctgggttatgcgagaagcacatcaatggattccattggtcctctgttagctggtaggagaagtagcagacatggctcaagtgagatgggggactgcatattcagctcaatgagacattttcttcagttggcgaatcaattactaggagaatttgttagatattaagattaatagtaatatgtattaattcgtttttatataatcattgtgcaccaacattttatttgaaagagagaaataaatcctagcaaaattgacta

SEQ ID NO: 100212 - DNA, 666 bp, Zea Mays
tatgcattgcaggctcaacacttttcatcttgctggaaggggtgacatgaatgtaactcttggtataccccggctgaaagaaatactgatgactgcatcagataatattaggacgcctgttatgaagtgtcctttgctcgaacatatttctagggatgatgctaatggtggttgcaaagcttaggagggttcgtgtggctgatatagtggagaaaattgaagtctgcacagttcctttttacaactctaatgggtgtgtttcaaccctgtacaagttacagatgaaactctatccacaagaccagcttgagtcaggtcttactgtagatgagtgtcaggcaatcttgagaacagtttttgttgaggcaatggaacatgcaattgaaaagcatctagatctgctatacaaaataaatgaaatccgtgttgttaagatagaagatacagagggctcattattaaatggtgatgaagaatctcaaagtagacatgctgatggaggagacactggtacaagtgatgatgatgatcaaaatgataatgatgttgacttgggaactgatgcagaaaagatgaaacggcaagagaaagatgagatggagtatgatgatgatactgaaaccgaggagggaatgggtagcgaatctgaggagagcgatgaggatc

SEQ ID NO: 100213 - DNA, 1924 bp, Zea Mays
atgcccaaaacacctcctgtcaatgcaagcaagaacactgaaccgcagaaacaatctgcacccaacttaacaataacaaatgggcacacaagtacaaaggtagtggttaaaaaagagcaccctatcaatgatgtgaaacacattagcacttgggtttgcaaaaatttggcctgtaaagctgttagaccagcagaagattccttctgcaagagatattggaaaaggcaattagtaatcgggaaagatgcccgccgagttgataatctatgccaacgcatttatttgagttacaggctattagagggaactgtccattttaaagaattgcatgagattattgaagatgcaaaagcaaaattggaaagtgaggttgggccacttgatggaatgtcggcaaagaatgcacatggtatcgtaagcaggttctcagctggtatcgctgtgcagaaactatgctctacagcaattcaaagagctgacgagtggttgagttctcctgacctgcatcttcgagacataacatcttcttccctcattgtcatcttgaaagaaacctcgtcttctgacactatcaaaggttataagctatggtactggaagagcagagagcaaccaagtatggaaaagcctgttattgtgtccaaagatgaaagaaaaatacttctttatgaccttaccccatgcacagaatattctttcagagttatatcattcacagatgatggggtacttggccattcagaatctagatgccgtactgaaagtagggagatatttgtcatgcgtgcaccaaagaatgcagtgggaggaggggctacacatgcgcaaaaaaaagacaggaaccagtcttgtaagtcaactgggttcaagatccgagatatttggaagaactttcaggaagctttagatgcagaaggctgttttgaaggattttctgaagatgtacatgaaggttcctgcagcagaagtgttacagagacagagttatctggagcttgtcgcaaacttcatttcaactcatcttctgtccccgacctaaacgccgaggttcctgtacccgtggactacactgagaaccattattattctaagaagggacttgtgaggtcaaatgacagtggtgactctgagacctgcgccgttggccagactgcagagccgcctgcagttgaatctcggcaagtaagcaaggtgaatagcgtaccagttaataaatgcgagcagaatggtgcttctgctatttgccatgaaaagatgctctccggatcgacgaggcaactggatggggattatgagcactgcgtaaaggtagtaaggcagttggaatgcgatgggcacatcgaaaatggtttcaggatgaagttcttgacatggtatagtctaagatccacagaccaggagcgcaaggccgtgagcacatttgtcagaacgttaagcaacgaaccaagcagcctggccgagcagctcgtcgattctttcggagaaatattaaacagcaagaaggccaaaaccggtttctgcagcaagctatggcattaggacaaaaaggactagatctcaagatactgctaactcactgattatccatatttttcactgaccggtgcagtgaaattctagtttattccatcaaatttgacagcgatgaaaagggggcatctgtgagaataggagattattttgggcagcaagtagcctgctctgaaataattcttttccatcaggaagtagtggaaacttgattttcattggattacctgggtcaatccagaaattattgtagaaggttgtctttttttcccctttgttgttgtggttcgctgagaaattctttggagatagcagtccgttggttattctgggttattatataaatcatggtaaatggaatgtgatggtacaaagtctctggtttacttgtgct

SEQ ID NO: 100214 - DNA, 897 bp, Zea Mays
ctggccaggggagcctcctctcctctcgtctcgtctcgtcgcacgcgagcccatccccccgcccgccgcctgcgcttgacttgacccgcgctcctcctcggcgtcggggagaccgggctcggtccgcgttgtctcggcggacggaggaggaccgtagcgcgaccgcccgtccgccgccagagccctcgtcatcgtgccggctgctcctgccgctcgtcccgccgcgttgagcattggggatctcgcgggcccttcgtctgtacccgccgactcttcaaaccctagcctctgtggcccgccgacgccgacgggaggagctggagctggggctggggctggagggcgcggaagctggtggctgttgtttcgctgattgaaagtactccatggcttaatgatgaactggtaataaagaggtcaatcattgtcagctagctgtctgaggagggtttttggagttcttactaagaagagagttactcatgctagccagtgaaggacggacacagatcttgcttgctttactgaactgaagacatgcccaaaacacctcctgtcaatgcaagcaagaacactgaaccgcagaaacaatctgcacccaacttaacaataacaaatgggcacacaagtacaaaggtagtggttaaaaaagagcaccctatcaatgatgtgaaacacattagcacttgggtttgcaaaaatttggcctgtaaagctgttagaccagcagaagattccttctgcaagaggtgctcgtgttgtatttgccacaagtttgatgacaataaggatcctagtcaatggttagtttgttcatctgacaatgatagcaagaattgttgtggttcttcttgtcatattgaatgtgcattccgagagaagagggcaggatgcttt

SEQ ID NO: 100215 - DNA, 3850 bp, Zea Mays
atgcgcggcgaggccggcaatgactgtggtggcggggatacccaagtcctggacggcgggacacctccgttaggttctcctccgagtgatggcgatgagacacaacgcgaggcggatgattgggccctgtacgacgaaacacagcctctggatgatgctgagacccagttaatagacgaggtggaggagggtgtggctggcgattggacggagacacagttgatggatagtggcaacgaggatggtggctgtggcgatgaggatcatggcaatgacggtgacccagtgaagacgaagcaggtggaagatgaagaaggaggcgacgttggtggtggcgtggatgataatgccaacaaatggaccaagacccagttggatgaaaaatgtgaggtggatggagtgaacaacattgttggagacatggttgagacccagttggttgaggaacctgaggaggatgccgacaaggatggattaaatggtcatggtgaacatgatcttggtgagtgggggaagacccagttggttgaagactctgacgaagatataggtgactatgagttgagtgatggcaccgttgtcctaagtgacaatgagagcctctcaggggatgagagggttgtgaagtcaggaatggataaaagggatgtgaagttcggaatggaaggaagaatcgaggggttaactggagagataaggaagcatgatgataataatttggtggattctgatgcatcgacggacgaggagggtgacacagattcaggtcaccttcatatgaaagtaccttttgttcgtgttgcatcagtactgacatgtggaatttctgaacctcgggacactatgtctgtgaactgtatgaagcaagggaaacaaatggcctctgatgcaatacaccccatgccgaaagttgtagatcaatctactaaatgtagcacatcctttggtgaggttgataatgactctcatggttatgtacagaaccatgataaaggtggagctaaaagcagagacaagtgctcaacggcaaaaaagctttttgctgacacaacagctgaggatggagaaaagaacagcagatgtcttgctggattaagctacgctggatcacaagagcctggtgatctgtcacaagcaaatgcttttgatgttgtggacaggttgatttcaataaattgtggattatcatctcaagaaaccatcccaaataaattggaaatagcaaagccacatgcttcaagtaagaggggtactttaatgttggctgagaaggttgaccttggtagaagttcaaatgggaaggccgaaatatttgaatttgtggataaccttgaagatgagggaggaggtgactttttcagtaaaaacagagacatcttgttgccaaaaccaattggtagaggtgaaccaaagagtcattataccagagcaaagaaaccttccacaaaaaaatcatgtggagaaaataaaataggggaagccatgaacaaaagaaattccaaactacctgggaggttggaaactattcctttatcacattcaagactattcaaaagtgacgtaaagagtaagcaggcttatggaagcaggactaagaaaaaccttttgaaggacttagataacctatcaaatgccaaatcgttggaagaacaggaaagggctgatgtagctttgaatgatgttggtccagatactcaaatggctgttgaagctatggaggccctggtacaatgttcacctgctaaaagtttatctgctgaagatcaacctctgctcaatagagatacgatggctgagaagtctggaatagctaaaagtcatttgaagaatggttctcagagaactagcaacatccaggaaggtgtcacaacacgttctaagagaagaaaagtacctgacttcagtaccaagcctcagaaagaaagactaagaggatcaaaggtgcaagaaagttctgagcctatagtaaaagtgaagcataagcaaacaaagtctgtacctgagaaaagcaaagtttcaaaggaatttattgatgaaaataagtaccacgggacacctattgctcaccgaactaggcattgtggtaggaatgacccttctgcatttatcgagttctctaataaacacttgaggagaggcaagaaattgaccggtgacagctccactattcagcaagtgcaaaataaccgaattgcaattgaatctggtttgagttattttgaaaaagaaagcacagagcagatttgtacaaataatgatcaagatcttcagcaatctaaggatggaagcactcaacggaccagtgtaaataatgctcaaaaccttgaaacacacagagttgaaccaacaactgatgttacctgcagagatatcccattgcatcccaaacggcgaagaacgcctacaaaattgatactgtcaacttctgcagcagctgcaaatcatgaaataccatcagaagtggcaagaccatacaagaaaaggcggatttttgtaagaagtgtttctgacctgctaaagtatgcaaagagggaaccttcccatgggagatcagcttctatgctgtccagcatattagagaagtcattagctgcttctcctgtacttaatttttctgtatgtggtgacagcaaaacttcttctgatgtcattagctctgcacagagaccgaaggaatcctcccatgacgaggatacaagtaaatcaccagaaaacaatcctcaagttccaaatcgttccatgaaaacaccgtcaaaagtggttaatgaattgtcacccacttttagtcctgcgaatccatcaaaaggctcaagtagaaacttgtcaaaagcttctgttgcgagagaattgctgaagctagatcctgaaaatgtactaccaaatcagcagagaaaagattctagaagaaggaaggatatggcccatgtcagtattctattaagccatcatttggatgatgatgttgtcaagcgtcagaagaagatcttggcacgcttacgaggttctgaagcattttcaatggccgatgcaacacactttgttgcagatagattctgccgcacaaagaacatgctagaagcaataactattggcaagccaatagttacatcgatgtggcttgaaaattgtggagaagcaggttgttttattgatgagaggaagtatattctgagggatgaaaagaaggaaaaagagataggtttcagcatgcctatatcactggcctcagcttgcaatcatcctcttctgctgggaaaacgagtttttgtaacatcaaatgtgaaaccaagtcaagcagtggtgactagcttggtcaaagcatcatcggggcagccactggagagggtaggacggtccataatgaatgagaaggaagtagctccggacctactggttatctcatgtgaagaagactaccaaacctgtgcaccgctgctcgagaaaggtgcgagtgttttcagcgtggagtttctgctaaacggtatcgtcattcagaagctggagtacgagaggcaccgccttttcttggaccgagtcaaacagacccgctcgtcgcggtggttgaaggacaccgtgcaggaccggtttgtccctgtacccaagcgtcgccgtagataggcgaacaggttcggtgcatagtttttctaactaaatcatgcttctgtttcccgagccttagcagctcaagaccactgtatatgtatgtaagccatatgctaaagtattcctgtgctgccatgtgctgggtgattgagtaatgcgggcctaaccttttgttttcctcgtctgtaaattttgtagtgtaggtgttcatatgtgttgtagcctgttttcgcccccttctcagctg

SEQ ID NO: 100216 - DNA, 112 bp, Zea Mays
acctagatcagatcaaattcctcgccttgtggctcctcctgaaccacatgttcttctccttcaatgagctcctgctcagctacttctatctgctgctcaccaggatcctcag

SEQ ID NO: 100217 - DNA, 2878 bp, Zea Mays
accaggccgccagtcccgacctccccggctccagcccccgcgcacgaccagctctgacgaccccgctcctgcctcccacctcctccggtggcctcgcgcctgactccctcctccggcacccaggccagccgcgccccgcctctcgcacaggacggaaatgatgccttctcctttttgttagctgattctgatcaaactggagcacttagagcaaccatgggggggaaatcggagcagaagtctcgaaaagagaggcggaaagaggcgagatcagagaagcacaagctgcgatttctttcttgggttgggcatcagggtggcaaaaagaagaagccgtcaatgtcagtagtagagccaagttcggttgaggagaagccaaagaaagagcctgatggcatgatgaagaagaagagaaagagggaagcagagggtaagcggaagcccaggtccaacttccaggaatatcttgagatggagatgggtggacctgtgagcatggaggaggatctagagatggagaggaagcttgcaaaaaagctcaagttgaagaaaggaaagttgggaggtcctgatgatggtatggatgacctttttgcggaccttgggtttggtggtgactttggttcagatgatggtgaaacaaaagcatatgattggaatgtggtggaggacactaatttagacaagagaaaaggtaaaaagaaaaataaggagaaaaaggatgacacagtgatggaggaaccagatgacattgatgaagagaatggtcggaaaaagaagaaaaaaaagaagaaggatggtatggagaaggaggaactggttgatgtaggtgaagagaatggtcagaaaaggaaaaagaagaagaagatgaaggatgactcagagatggacgaaccagatgatgaaggtgttcacatggatgaagagaatgatggagcagtcctggaatctgaggatggagtgtctaatgtggttgaactgcccaaagaatcaaaagggaagtatgtacctccgagtctgcgtaatgcttccaattcagaatcagaagaaattgcccagatgcgtcgcagagtaagaggacttctgaacagactttcagagtcaaatgtggagtccattactcaggaaattgccacactttttcgatctgttccacgaagtgatggctcccagataattggggatgaggttttggctagttgttcccgaggacctcgtggcaatgaacagtatgccgctgtctttgcagcctttgttgcaggtatggcatgtttggtcggtgttgacttcagtgccaagatccttgcatctattgctaagtcatttgaggatgagtattcaaaagaagatggtctatctttgagaaaccttaccttactcttctgctatttgtgcatatttggtgttacctcaagcgatcttgtgtatgatcttctgtcgattctgagcaagcgcttgacagagctagatgtctctacagtgttgaccatcctacagtgctgtggaatgaagctgcggggagatgatccatgtgctatgaaagattttgtccttagtattcagaactctgtgaatgatcttaaattgcactctggtgttggagcagacgggaagactgatatacgtagcagaagaatggaatttatgcttgaaaccatatgtgacattaagaacaataagaaaaggcctaaagaggatccttcacaccatactcgaataaaaaagtggcttcaaaagcttaaggcagaagatgtcctcttgcgtgggttaacatggagcaggcttttggaccctgataagaaagggcagtggtggttgtctggggatgttccatctacagtagctaagattgaagatgttgcagctgttataagcaaggatgttgcagagacaaaaaaacttcttcagcttgcagctgctcaacggatgaacactgacatacgaagagcaatcttttgtattataatgagtgctgaagactatgtagatgcttttgaaaagctcttgaggctgggcctttctgggaagcaggaccgagaaattataagggtcattgttgactgttgtctgcatgagaagatgttcaataagtattacacagtccttgcttccaagctatgcaaccatgagaaaaaccacaagttcagcttgcagtactgcatctgggaccattttaaggagctagataatatggagtcaagtagatccatgaaccttgcgaagctagttgcggagatgctgttgaacttcacgctctccctcgcaactttgaaggttgttaacctggccaacccggtggagatgactccggcaagggtctcgcatttccggatgctgtttgagaccttgctacagaaagacgatgcacgcgtgtggaatgtcttcactcgtgtcgctggccttccagagctcgaggtattgagggatggcattgtgatgttcatcaagcagcacgtgatcgccgaggactcagggaaggacttggctagcaaattcaagattgcgaagaaggcgctcgacaatactgccggagttctgatgtaactctgcccttgtcgaacattctgggcatctccaagtaaaacaaagttattagaacattctgctggagtcctctgttctcgttttgccttgttattagaatgcttctccaagagacctttcatgggttttgaatgcttacccaaaaaaaaggctttgatggtcatacattgtaccatttcttagaagtactctctgtttattgtttagctgcacatgaagatccttaggctatctgcactgccacatggtatctattgctccaaaagtgcgctgtaacaaatagagcaaaattgctccaggacgccaatcactacggcaccgtttgtttgggctt

SEQ ID NO: 100218 - DNA, 2874 bp, Zea Mays
atccgtcagtgcagtcaagtagtcaccggttcacgcaaaccctagtaccaggccgccagtcccgacctccccggctccagcccccgcgcacgaccagctctgacgaccccgctcctgcctcccacctcctccggtggcctcgcgcctgactccctcctccggcacccaggccagccgcgccccgcctctcgcacaggacggaaatgatgccttctcctttttgttagctgattctgatcaaactggttagttcgatagagaatatcagtaatatcttgctgcccaaactgcagcttcaactgattccgcgtcaggagcacttagagcaaccatgggggggaaatcggagcagaagtctcgaaaagagaggcggaaagaggcgagatcagagaagcacaagctgcgatttctttcttgggttgggcatcagggtggcaaaaagaagaagccgtcaatgtcagtagtagagccaagttcggttgaggagaagccaaagaaagagcctgatggcatgatgaagaagaagagaaagagggaagcagagggtaagcggaagcccaggtccaacttccaggaatatcttgagatggagatgggtggacctgtgagcatggaggaggatctagagatggagaggaagcttgcaaaaaagctcaagttgaagaaaggaaagttgggaggtcctgatgatggtatggatgacctttttgcggaccttgggtttggtggtgactttggttcagatgatggtgaaacaaaagcatatgattggaatgtggtggaggacactaatttagacaagagaaaaggtaaaaagaaaaataaggagaaaaaggatgacacagtgatggaggaaccagatgacattgatgaagagaatggtcggaaaaagaagaaaaaaaagaagaaggatggtatggagaaggaggaactggttgatgtaggtgaagagaatggtcagaaaaggaaaaagaagaagaagatgaaggatgactcagagatggacgaaccagatgatgaaggtgttcacatggatgaagagaatgatggagcagtcctggaatctgaggatggagtgtctaatgtggttgaactgcccaaagaatcaaaagggaagtatgtacctccgagtctgcgtaatgcttccaattcagaatcagaagaaattgcccagatgcgtcgcagagtaagaggacttctgaacagactttcagagtcaaatgtggagtccattactcaggaaattgccacactttttcgatctgttccacgaagtgatggctcccagataattggggatgaggttttggctagttgttcccgaggacctcgtggcaatgaacagtatgccgctgtctttgcagcctttgttgcaggtatggcatgtttggtcggtgttgacttcagtgccaagatccttgcatctattgctaagtcatttgaggatgagtattcaaaagaagatggtctatctttgagaaaccttaccttactcttctgctatttgtgcatatttggtgttacctcaagcgatcttgtgtatgatcttctgtcgattctgagcaagcgcttgacagagctagatgtctctacagtgttgaccatcctacagtgctgtggaatgaagctgcggggagatgatccatgtgctatgaaagattttgtccttagtattcagaactctgtgaatgatcttaaattgcactctggtgttggagcagacgggaagactgatatacgtagcagaagaatggaatttatgcttgaaaccatatgtgacattaagaacaataagaaaaggcctaaagaggatccttcacaccatactcgaataaaaaagtggcttcaaaagcttaaggcagaagatgtcctcttgcgtgggttaacatggagcaggcttttggaccctgataagaaagggcagtggtggttgtctggggatgttccatctacagtagctaagattgaagatgttgcagctgttataagcaaggatgttgcagagacaaaaaaacttcttcagcttgcagctgctcaacggatgaacactgacatacgaagagcaatcttttgtattataatgagtgctgaagactatgtagatgcttttgaaaagctcttgaggctgggcctttctgggaagcaggaccgagaaattataagggtcattgttgactgttgtctgcatgagaagatgttcaataagtattacacagtccttgcttccaagctatgcaaccatgagaaaaaccacaagttcagcttgcagtactgcatctgggaccattttaaggagctagataatatggagtcaagtagatccatgaaccttgcgaagctagttgcggagatgctgttgaacttcacgctctccctcgcaactttgaaggttgttaacctggccaacccggtggagatgactccggcaagggtctcgcatttccggatgctgtttgagaccttgctacagaaagacgatgcacgcgtgtggaatgtcttcactcgtgtcgctggccttccagagctcgaggtattgagggatggcattgtgatgttcatcaagcagcacgtgatcgccgaggactcagggaaggacttggctagcaaattcaagattgcgaagaaggcgctcgacaatactgccggagttctgatgtaactctgcccttgtcgaacattctgggcatctccaagtaaaacaaagttattagaacattctgctggagtcctctgttctcgttttgccttgttattagaatgcttctccaagagacctttcatgggttttgaatgcttacccaaaaaaaaggctttgatggtcatacattgtaccatttcttagaagtactctctgtttattgtttagctgcacat

SEQ ID NO: 100219 - DNA, 3062 bp, Zea Mays
atccgtcagtgcagtcaagtagtcaccggttcacgcaaaccctagtaccaggccgccagtcccgacctccccggctccagcccccgcgcacgaccagctctgacgaccccgctcctgcctcccacctcctccggtggcctcgcgcctgactccctcctccggcacccaggccagccgcgccccgcctctcgcacaggacggaaatgatgccttctcctttttgttagctgattctgatcaaactggttagttcgatagagaatatcagtaatatcttgctgcccaaactgcagcttcaactgattccgcgtcaggagcacttagagcaaccatgggggggaaatcggagcagaagtctcgaaaagagaggcggaaagaggcgagatcagagaagcacaagctgcgatttctttcttgggttgggcatcagggtggcaaaaagaagaagccgtcaatgtcagtagtagagccaagttcggttgaggagaagccaaagaaagagcctgatggcatgatgaagaagaagagaaagagggaagcagagggtaagcggaagcccaggtccaacttccaggaatatcttgagatggagatgggtggacctgtgagcatggaggaggatctagagatggagaggaagcttgcaaaaaagctcaagttgaagaaaggaaagttgggaggtcctgatgatggtatggatgacctttttgcggaccttgggtttggtggtgactttggttcagatgatggtgaaacaaaagcatatgattggaatgtggtggaggacactaatttagacaagagaaaaggtaaaaagaaaaataaggagaaaaaggatgacacagtgatggaggaaccagatgacattgatgaagagaatggtcggaaaaagaagaaaaaaaagaagaaggatggtatggagaaggaggaactggttgatgtaggtgaagagaatggtcagaaaaggaaaaagaagaagaagatgaaggatgactcagagatggacgaaccagatgatgaaggtgttcacatggatgaagagaatgatggagcagtcctggaatctgaggatggagtgtctaatgtggttgaactgcccaaagaatcaaaagggaagtatgtacctccgagtctgcgtaatgcttccaattcagaatcagaagaaattgcccagatgcgtcgcagagtaagaggacttctgaacagactttcagagtcaaatgtggagtccattactcaggaaattgccacactttttcgatctgttccacgaagtgatggctcccagataattggggatgaggttttggctagttgttcccgaggacctcgtggcaatgaacagtatgccgctgtctttgcagcctttgttgcaggtatggcatgtttggtcggtgttgacttcagtgccaagatccttgcatctattgctaagtcatttgaggatgagtattcaaaagaagatggtctatctttgagaaaccttaccttactcttctgctatttgtgcatatttggtgttacctcaagcgatcttgtgtatgatcttctgtcgattctgagcaagcgcttgacagagctagatgtctctacagtgttgaccatcctacagtgctgtggaatgaagctgcggggagatgatccatgtgctatgaaagattttgtccttagtattcagaactctgtgaatgatcttaaattgcactctggtgttggagcagacgggaagactgatatacgtagcagaagagtaagctatcttgttcaatgcacctatttaagaagcatcactttccacgtaggttttaaatttgtctgaatggttttaacttactgctcagatggaatttatgcttgaaaccatatgtgacattaagaacaataagaaaaggcctaaagaggatccttcacaccatactcgaataaaaaagtggcttcaaaaggtttgaaccagtattactttcccatcatctgcgttatgaattgtgatttcatattgcagttaatgcatttttttattcctcttttacgtactgacagcttaaggcagaagatgtcctcttgcgtgggttaacatggagcaggcttttggaccctgataagaaagggcagtggtggttgtctggggatgttccatctacagtagctaagattgaagatgttgcagctgttataagcaaggatgttgcagagacaaaaaaacttcttcagcttgcagctgctcaacggatgaacactgacatacgaagagcaatcttttgtattataatgagtgctgaagactatgtagatgcttttgaaaagctcttgaggctgggcctttctgggaagcaggaccgagaaattataagggtcattgttgactgttgtctgcatgagaagatgttcaataagtattacacagtccttgcttccaagctatgcaaccatgagaaaaaccacaagttcagcttgcagtactgcatctgggaccattttaaggagctagataatatggagtcaagtagatccatgaaccttgcgaagctagttgcggagatgctgttgaacttcacgctctccctcgcaactttgaaggttgttaacctggccaacccggtggagatgactccggcaagggtctcgcatttccggatgctgtttgagaccttgctacagaaagacgatgcacgcgtgtggaatgtcttcactcgtgtcgctggccttccagagctcgaggtattgagggatggcattgtgatgttcatcaagcagcacgtgatcgccgaggactcagggaaggacttggctagcaaattcaagattgcgaagaaggcgctcgacaatactgccggagttctgatgtaactctgcccttgtcgaacattctgggcatctccaagtaaaacaaagttattagaacattctgctggagtcctctgttctcgttttgccttgttattagaatgcttctccaagagacctttcatgggttttgaatgcttacccaaaaaaaaggctttgatggtcatacattgtaccatttcttagaagtactctctgtttattgtttagctgcacat

SEQ ID NO: 100220 - DNA, 1187 bp, Zea Mays
ctgtttctgagtgaagctgggaatatgctttcatctaaatgggcaggctgtggaatgaagctgcggggagatgatccatgtgctatgaaagattttgtccttagtattcagaactctgtgaatgatcttaaattgcactctggtgttggagcagacgggaagactgatatacgtagcagaagaatggaatttatgcttgaaaccatatgtgacattaagaacaataagaaaaggcctaaagaggatccttcacaccatactcgaataaaaaagtggcttcaaaagcttaaggcagaagatgtcctcttgcgtgggttaacatggagcaggcttttggaccctgataagaaagggcagtggtggttgtctggggatgttccatctacagtagctaagattgaagatgttgcagctgttataagcaaggatgttgcagagacaaaaaaacttcttcagcttgcagctgctcaacggatgaacactgacatacgaagagcaatcttttgtattataatgagtgctgaagactatgtagatgcttttgaaaagctcttgaggctgggcctttctgggaagcaggaccgagaaattataagggtcattgttgactgttgtctgcatgagaagatgttcaataagtattacacagtccttgcttccaagctatgcaaccatgagaaaaaccacaagttcagcttgcagtactgcatctgggaccattttaaggagctagataatatggagtcaagtagatccatgaaccttgcgaagctagttgcggagatgctgttgaacttcacgctctccctcgcaactttgaaggttgttaacctggccaacccggtggagatgactccggcaagggtctcgcatttccggatgctgtttgagaccttgctacagaaagacgatgcacgcgtgtggaatgtcttcactcgtgtcgctggccttccagagctcgaggtattgagggatggcattgtgatgttcatcaagcagcacgtgatcgccgaggactcagggaaggacttggctagcaaattcaagattgcgaagaaggcgctcgacaatactgccggagttctgatgtaactctgcccttgtcgaacattctgggcatctccaagtaaaacaaagttattagaacattctgctggagtcctctgttctcgttttgccttgttatt

SEQ ID NO: 100221 - DNA, 537 bp, Zea Mays
atatacactgcaggcatggttgacctatttctggaggcgggcgaaaaatcacaacatagaagaagatatagctgatgagaagctacagttttggatagaacaaatcaattacccagttactacgagcgaagtagtagaagtcgagagaggactccacgagctgaagaaactgggaatcgagtctcagctgtgggaggcgacgaggagagctctggatgatgatttgagcaaccacgggagtccaactggatctgaagcttagcagatgcataatgtggagcgaggctctattgccgattttgtgccgtcagaggccctagagccagccagccctcctagtcctttcctttcgcttgcttggtatcttcatgtaacatattgaacttttcctctttttttttcttcttcttttgggttatctatttttatgctagtttatccgtgaaagcaaaaggggtttaaatcgtggaggagtcgtgatgctctgctctctccatctacagcaacaaaaatattatgcattgcttgattttgcaa

SEQ ID NO: 100222 - DNA, 1802 bp, Zea Mays
gaagatccctgcccccctgaccacaaccatttcgagtatcgagagacgagaccgttacaccacccccgccttcggagcggacgaaccagcgaaccgcgcgcccccgcccatctctctctctctccctcctcctccccccaccgaatccgtccaccgaatcccctcacactcccatggatcgcttggcgcggccggcgagcccgggcggcggcgggctgggctacgcgtcgcggcggggcctctacgcgcaggcttcgtcgcatcacctggccggcggcagcgcgcagacgtcgcccggcggatccccgaaggagctgtccccagtccaccgccacgcgcgggcgggatccctcggcggcgctggggcggcctccaccgcaggccgccgcgcgggggtcggcgccggggccggcgctcgcgcgcagaacagcgccgctcgcgccgccgcgcagcgcctcgctcgggtcatgggcggcgcgggcggggacgccggaagcgggagcgacgacgacgacgactacgagctatctggtccacccatcgagctctccaacaccccgcgccgcacctccacccgatccccttccccctcggtaggccgtcaccttgcggatcagacgcaggtgggccggccgccgtcgctgaccaaccgttacacggctgggaagtcggtccccatgatcccgtcgatcaagcggccggccaccagtgggccgggggctggagctggttcagagtcgcccatgccgaaccgaagggagcagaggagatcagttgatcttggaagttcattgagagctcgtcgtacatcttcttcacttaatgatgagattaacacacttcaagtggaaaatgaaagcatgtatgacaaacttcagcttgcagaagaaaggtttgatgatggagatgccaaatccatgcacatggagagagaggattctgatgctggcgatgcagcagaaacagagccaattttgattaacaggaaagatgcagcgctagaacaaagaaagattgctatgagaattgcttcgcgaaggtccagcagtgcaagctgtaatgagattgcaacccttaagtcagaagcaaaggttactactaatgtggttacatctctatctcggagagtgaaaagtgctagatcagaattgagatctcttcaggcaacagctaacagaatgatcctgtcacaggaagagctggaggaggttgtgctaaagagatgttggctggcccgctactggacattatgttctaaacttgggatacattctgatattgctgaagaaaaaaaagaatactggtcctcatttgcaccgcttgcgcttgaagcagtcctatcaattgggcaaaaggcaagagatggaactttatcagataatgctgacatggagagcagaagcaaaatgtctgatgtaaatgatatatctaccgatggcaatattgagaccatgctttcagttgagaaagggttgcgtgaattggcttcactcaaggtagaggatgcaatcatgcttactttggctgaaaatcggcatgtcaaacctctctcaggccaagcttctgagggtcggagcccttccgagtcattagttaagtgcggaagagcgagaagatgtacgcttcaagcaggtctccggtggacatgcccaaaccatctcaattggtgttgaattaccttttcttcaattggcgctactcctaaccgatcgcgtatgacatcgtttctcactcggtccaatcttgtgtgcccacatatccaatgtaacatacacatctctgcgacacttagttgttggata

SEQ ID NO: 100223 - DNA, 2180 bp, Zea Mays
gctttcagcctcatggccagcgcgggactccaccactcctcctccccctctccgcggatcacccaccgaacccacgcgaaaccggcgtccagatcttctcccccgcggttcagatccccggacgcagccggcgccttctgacttgggttggcacagccgtacaggttgctttgcgctgcggtggatctcctggcgtggcgacatgggcctgggtttgggagctcttctcaaatccggcgggctctcggtctcggatcacgacgccatcgtctcgattaacatcttcatcgcgctgctctgcagctgcattgtcatcggccacttgctggaagggaaccgatgggtgaacgagtccatcaccgcgcttgtcatgggcctcatcaccggaggcgtcatcctgctggttactaatgggacaaactcacgcattcttgtgttcagcgaggacctgtttttcatatatttacttccgccgataatcttcaatgccgggtttcaagtaaagaaaaagcaattcttccgcaactttataacaattattttgtttggtgctattgggactctgatttcctttgtaataatctctcttggtgctatggggttgttcaagaaacttgatgttggtccactcgagcttggggactatcttgcaattggtgctattttctcggcaacagattctgtttgcaccttacaggtgcttaaccaggatgaaacacccctactctatagtctagtttttggtgaaggtgttgttaatgatgccacatctgttgtgctcttcaatgcaattgaaaaccttgatattgataattttgatgctattgttctgttgaatttcgtcggaaaatttctctacttgttcttcaccagcaccatacttggagtagctaccgggttgcttagtgcatacattatcaagaagctctgctttgccagacattcaactgatagagaagtttctatcatgatactcatggcatacctttcatacatgatatcaatgctgttggacctgagtggaattcttactgtcttcttctgtggaatagtaatgtcacattacacttggcataatgtgacagaaagttctagggttaccaccaagcatacttttgcaactttatcattcattgcagaaattttccttttcctctatgttgggatggatgcattggacattgagaagtggaaattagctagtagcagtcctaagaaaccaattgctttaagtgcaattattttgggcttggttatggttggaagagcggcatttgtattccctttgtcgttcttatccaacctaagcaaaaaggaggcccgtccaaagatctccttcaagcaacaagtaatcatatggtgggctggtctcatgagaggagcagtgtcaattgcgcttgcctataacaagtttacagcatctggtcacactgaagtgcgagtcaatgctatcatgatcaccagcacagttattgttgttctattcagcacaatggttttcggcctgctgacgaagccgcttctcagtctcctcatcccaccaaggactggactgaacacgtcgtctctgctctcaagccagtctatgctggacccactccttactagcatgatggggtctgactttgatgtagggcagatcaactcccctcaatacaacctccagttcattctcaccgcgccagctcgctccgtccatcgcctttggcgcaagtttgacgatcggttcatgcgcccggtgttcggggggcgaggtttcgtcccctttgtgcctggttcgccggtggagaggagtgtccctgaatctcacctgggcactgtgacggaggctgagcgcagttgaaatgaggcaagagggatgccgacaattttctgtagatcttcagacagataccactcatactcctattttattttcagaatccactggtgcgaattgttctttgtagtaccttgtgcatatagttttatatagagctgctacacaagctgctgtaaatttctgggaggcactcccaactgtagattactgcaattcatctgtaaatttcaatcttgttcaagaagaatgatcatatattggcatgttttttcttagcagttgtataattgtgagcctgacacaacaaatcccttttaccccaagaatgttaaatgtagaaaagacaagattgtcaaaa

SEQ ID NO: 100224 - DNA, 2885 bp, Zea Mays
cgcacgtgaggcgccctcctccccaaccgaaaagtctacagaggataaggagctcgccgctcttccagtcccacagctaggggagggaaacaaacacccaaatcaaacccgcgcgtcgccagccgcagcaccaatggcgtgcgtcgccgcgctcttcgcctccccggcgctcctccccttcccctccaccacctcgtccatggcctcctgctcgtgccgcctccgccccgccgtcgtcgcccgcgcgccgcgccagcagccgcggggccggcgcgcgctccggcgcttcgatgaggtggaaggggtgtcgaagaaacggcgcggcatcggaggcggtggcggcgtcggcgctggcgggtcgcagccgtcgtcctcgcgcagggatagggggctttccgtcgatttcaaggagccgcaggttgctgagtttgatgatcttgaagaggacaaattccttaatgctgtcgtcaaggtctattgcactcatatcgcacccgattatggtcttccttggcagaagcaaaggcaacattcaagtagtgggagtgcttttatgattggggatggtaaactcttgacaaatgcgcattgcgttgagcacgacacccaggtcaaagtaaagagaaggggagatgacaaaaaatatattgccaaggttttagctaggggtgttgaatgcgatcttgcgttgctatctgttgagaatgaagagttctggagaggaacagaggcacttcattttggtcgtttgccatgccttcaggattcagtaactgttgtgggatatcctcttggtggagacactatatctgtaacaaaaggcgttgtgtcgcgcattgaggtcactccatatgcacatggaacatcagatcttcttggcattcaaattgacgcagccataaatcctggaaacagtgggggaccagcctttaatgatcaaggggagtgcattggtgtggcatttcaggtgtacaggtcagatgaagctgaaaatattggatatgttattccaactacagttgtatcccatttcttaaatgactatcagaaaaatggaaagtacacaggatttccatgtttgggtgtcttacttcagaaattggaaaatccggcattgcgtgaaagcttaaaagtaccttcaagcgagggtgttcttgttcgtcgggtggaacctactgctccagcaagcagtgttttgcgaaagggagatgtaattgttagctttgatggtatcgcagtaggatgtgaagcaacagtaccatttcggtccacagaacggattgctttccgctatctcacaagccaaaagtatgcaggcgatattgcccagctaggaatcattcgtgatggcaattccatgaaagtccagactattttgcagccaagaaaacatttagtgccgtttcatgttgaggggggacaaccttcttatctgattgttgctggccttgtcttcacacctttaacagaaccatttatagaggaggaatgcgaagatacactagggctgaaattgttagcaaaagcacgttactctctagcaacctttgagggggaggaaattgttattgtgtcgcaggttttggcgcacgaggtcaacattgggtatgagcacatgggcaatcaacaagtcatgaaactaaacggaaccacaataaagaatatccatcaccttgctcatcttgtggacacctgtaaagacaagttcctgacgttcgaattcgaagacgacttccttgttgttttgcatcgagaagaagcggatgctgcatcatcggacattctcaaggaacatgccataccgtccatacggtcatctgatctatcagaaccatatgcagaagcaaacaataacgagatacagaaaacaagcgaggattttggtgaaagtcctgtcacaaactttgagatggggatcgattgtctcttgtgggcatgatcgttctcttttaatggatgagctactgaggatgaagtttcagctaaatctgcagtagtgaaatgcaagcatctgccggcgaacaacggtggtcgtaggaatactctcccaatgtgtagtgcatgcaatgcaagtaccttgcggcaaagccgagtcatgttgtatgttagcatagacagaattgagagatatgctgtacgctaggagccataggatgatttgttcattttcaatctttaggcagtcaggaatttaagggattgtacaatttgtccaccagcgatcctgtaaagctcggacatgcaaatatgcaatagaccgtccagaaattttgttggtttatgtttgtgctgtatttctctcgtactggtattccagaacaaagaatctgtaggatgccagattcttggatacaaaatgaggtaattgaaatcaatcaacatggatcccacaaagtgcggtcgtgatgttgtgaggtccaaaaggctataaatcatgttcagcgtttccaaagctagaaagtgtgcatagcggatttgcattagtaaagccttctccgccatcaccacgctgagcgacgacctcctccaggacatcttcctcctgccgagatcgtgggctagacgtcatcggtgtggctgctggcctcgtgttcattcggcagtggaatcatctatctgttctccattgatcttgaaactatgaatcgcccggaggcgctgatctaccctttcacaattgcgtggccacccaccctctttcctaaatcctgctggacaaggagcttgatatgtaagtggccagtggaatatgacggtaaactccagcataagatggcagaggcgatgatagaaaaaaaaagagagaggaagaatctcagttattctgatgaagtattggggatgatgatgatcagttgctatagtttgtggctgttactagattg

SEQ ID NO: 100225 - DNA, 1927 bp, Zea Mays
atgtttttattttgctttggtttgtcactcttttttctcttactattttgatttaaagttttgagctactagcagttgaggatgaactaatttttatattttttgataaagtgctgatatcgatttaccattaatttttctatggatgaggtatgccagttattttgttaagctaatgctgcttctcgtgcaggtcaaagtaaagagaaggggagatgacaaaaaatatattgccaaggttttagctaggggtgttgaatgcgatcttgcgttgctatctgttgagaatgaagagttctggagaggaacagaggcacttcattttggtcgtttgccatgccttcaggattcagtaactgttgtgggatatcctcttggtggagacactatatctgtaacaaaaggcgttgtgtcgcgcattgaggtcactccatatgcacatggaacatcagatcttcttggcattcaaattgacgcagccataaatcctggaaacagtgggggaccagcctttaatgatcaaggggagtgcattggtgtggcatttcaggtgtacaggtcagatgaagctgaaaatattggatatgttattccaactacagttgtatcccatttcttaaatgactatcagaaaaatggaaagtacacaggatttccatgtttgggtgtcttacttcagaaattggaaaatccggcattgcgtgaaagcttaaaagtaccttcaagcgagggtgttcttgttcgtcgggtggaacctactgctccagcaagcagtgttttgcgaaagggagatgtaattgttagctttgatggtatcgcagtaggatgtgaagcaacagtaccatttcggtccacagaacggattgctttccgctatctcacaagccaaaagtatgcaggcgatattgcccagctaggaatcattcgtgatggcaattccatgaaagtccagactattttgcagccaagaaaacatttagtgccgtttcatgttgaggggggacaaccttcttatctgattgttgctggccttgtcttcacacctttaacagaaccatttatagaggaggaatgcgaagatacactagggctgaaattgttagcaaaagcacgttactctctagcaacctttgagggggaggaaattgttattgtgtcgcaggttttggcgcacgaggtcaacattgggtatgagcacatgggcaatcaacaagtcatgaaactaaacggaaccacaataaagaatatccatcaccttgctcatcttgtggacacctgtaaagacaagttcctgacgttcgaattcgaagacgacttccttgttgttttgcatcgagaagaagcggatgctgcatcatcggacattctcaaggaacatgccataccgtccatacggtcatctgatctatcagaaccatatgcagaagcaaacaataacgagatacagaaaacaagcgaggattttggtgaaagtcctgtcacaaactttgagatggggatcgattgtctcttgtgggcatgatcgttctcttttaatggatgagctactgaggatgaagtttcagctaaatctgcagtagtgaaatgcaagcatctgccggcgaacaacggtggtcgtaggaatactctcccaatgtgtagtgcatgcaatgcaagtaccttgcggcaaagccgagtcatgttgtatgttagcatagacagaattgagagatatgctgtacgctaggagccataggatgatttgttcattttcaatctttaggcagtcaggaatttaagggattgtacaatttgtccaccagcgatcctgtaaagctcggacatgcaaatatgcaatagaccgtccagaaattttgttggtttatgtttgtgctgtatttctctcgtactggtattccagaacaaagaatctgtaggatgccagatt

SEQ ID NO: 100226 - DNA, 938 bp, Zea Mays
ccctgctaccccgattgtccctgccctgttctcgctctctatggcgtgagcatcggccgacagatctagcctcgggaggcctcgcaagacctagcacccacgacgcaccgtggccccatgctccgtagcccccctgctctgccagtttgagtgaatgtctggcggcgacaccacccctgctctcgtcgtccatcctgcctccatccaaccccctagcatgtcgtgtgcgagcagccccttcaatgcaggacatggatggcccaggtacgggtctgtgctgctcacccgctgcctcgagtgcgaatgtccagagccactagtgagcctcatatcgaaaaggtcaaagaatgacaactttggtagggaattcattaagtgtgaaagcaagccgcgtctagggaaggttcagaaaaaatgcaaatttttcatgtggatggatgattacattaagatggtcgaagggacagggtttactagcggccttgggagatgatggcgtctaattttggggacgaacgagtgacgacaattaaggcagatgttagtgcgaactgggacatgtttactgcagaactgaagaagatgaataacaacttgagcgacttgaagaagatgtttggagttttgtatgcttccatgatttttattgccttgcttttctttgttacgaactatggttgcaagtgttaaatatgtatatgtatgatggacctccttgtgatgccattctagatgaccgggaagttgtgtattccttttaatgtgtatcatgaacaaaattgtcttggttacagtcttccagatgaatggcaacatgtgtattggcagagttttgttttgagttgttcccctttaatagaaaactgaatttggtcttggtactaaaaacagagctctatgcattgaatgactctgccaagttgttgttcacatagtcc

SEQ ID NO: 100227 - DNA, 1129 bp, Zea Mays
ctctccaagactccaatcccccaaccaccagaaccagcgccagctctaacgtcacctctgatttctctctcctctctattgctagctgctttattataagtagcagctgcagcaggcaggagctgcacacacccatccaattccagctgctgatcttgatcctgcaccccgagccgtacacaagagctagtcggtagaacttgcaggagcggagcagaactaagtgcagagaacaggacatatggctacgccggcggtgaaggtttacgggtgggctatctcgccgttcgtatcgcgggctctgctggccctggaggaggccggcgtcgactacgagctcgtccccatgagccgccaggacggcgaccaccgccgcccggagcacctcgccaggaaccctttcgggaaggtgccggtgctcgaggatggcgacctcacgctcttcgaatcacgtgcgatcgcgaggcatgttctccggaagcacaagccggagctgctgggcggcggcaggctggagcagacggcgatggtggacgtgtggctggaggtggaggcccaccagctgagcccgccggcgatcgccatcgtggtggagtgcgtgttcgcgccgttcctgggccgcgagcgcaaccaggcggtggtggacgagaacgtggagaagctcaagaaggtgctggaggtgtacgaggcgcggctggccacgtgcacgtacctcgccggcgacttcctcagcctcgccgacctcagccccttcaccatcatgcactgcctcatggccaccgagtacgccgctctcgtccatgcgctcccgcacgtcagcgcctggtggcagggcctcgccgcgcgcccggcggccaacaaggtggcgcagttcatgccggtcggcgccggagcgcccaaggaacaggagtgacgatgaagcgatcgaagcgacttgtgttgttgtgcttgattagttaattggaaaccttctcactcatctagtccatcatggtgcctgcttttctttatactatttgtcttaattttgctgctttctccacggaataatagtagagatttggaaatgtaatgtattttatcaaaatatattggattttcaagcaatatagtatggttttcgctgcaa

SEQ ID NO: 100228 - DNA, 1976 bp, Zea Mays
tagctttagtcataacttcaaacacttcatgccaacaagatcatggaattttttttttttttttgcctaagacaactagaatgagaaaagaactaactcatcatacatattaggatggcatcataaagaaaaaatgacacatatatgatactatatcacaaaggccttcagtttctagaccaagtgcagatcgatctgtgggtatgcatgtctaatattttactaggttggatatgcatgggcgttcattcagaatcagtttcacacagtttatcgcacttctgtttacaaaacatggatttcattgctctgtactggctacatgcgtaaggatcaacttgtctaatctaggtgtatcctccttgacaagcaaacttaacaatttgataaaaaaaatgcagcttttatatgtgaacccataacttaatatggacaggaaactgatgtgcaacaacaaaaactaaaataggaaggaaacacaagttccaaatgtataataattgtcaccatagtgcaaaagaaccaaatatactgcagagaaaacttcctagtcatgtaagtgtatggacatatagaaataaaacatctcaagactccaataacaggctcatgctaactagtcatggctttaaaccttcatgatacaaactagtcacaactttaaacatttcatgccaacaagatcatggatggtgttttttttcctagagaaaagctagaatgagaaaagacctaactcagcatacatatcaggatagtatcgtatagacacgtatatgatactatatcacacagccgttcaatttctagaacaaatgcagattgatctgtgaatatgcatgtctcatattttactaggttagatggactgaatcccgtgaaacaaacaatttattcaacaagtttctgcatgaatatcatcccaaattcaataatcactctcgttgataaaaaaaatgcaaccaacagttaaacagaagtgaaatagaaactatttgaatcagatccactccgttattcacatcaaaataattgttgcttgatctataaaagcagtaggaacattgtttacccatcaatttcaagtacacagtaacaagaacaacagtacagctagaattgagcatgtgagtgttgttgatacctcgttgagctctctctgccgcggctttctgctcggcagcaagagccagctcaggatccaccccgaaagcttgggcgtaggtgttgtctatcggcgaaaacaccgcgcggcggtacgccaagaacagcgcggccatctccatcccaggcacggtgcgcgcggctttttccgccgcgtctcgctgagtcacggcggcgtccagcaggtagttgagcgccttccgcggcacgaatcgctgccgtgcggcccggatctggtcgagttggtagtcagcgtcggtgtcgaatgccgggacgtcgaccaggaagaagttgccgtcgctggggtggggacggaaggcgtcaggaatgtcgcaagggcagagcagcgccagcgcgctgcggcgggctacctcgtcgacggcctcggccacggcggcggcaaagctgctgcgggagctgccgccctgggccgccttctcggtgaagtggtcctcgaaggggacgagctcgctggggtcaaaccacccatagctcgagtcaccgaagaaggcgacgaggacgagcccgtcgcggtggccgcggtgtacctcctcgtcgtcggtgaggctgacgctgtagatatggccaggccaccacggatgggacttcaccttggcccagaccatgtcgccgaaccgggggccgccgttcgcccatgcgatgccgcgtccggcagcaggaaccatggcgcctccagcggcggggtcggacatcctgtggaggggaaccgaaaacctagatttggatgcagggtcgattggtctgggcttgggtttgggttccggaggagggtggcctgggatcggtggaag

SEQ ID NO: 100229 - DNA, 2153 bp, Zea Mays
catttgatggcaactagcacgcaatactctctccatcggggactttcccctaatgctctgaagtgatgatacctcgtttacaaaatgttaggattttacttaagcaacagtctaattcaatcagttactctgaatgctcagattaatatatctattctaacatactgtatatacatgcctataaaccaaaaaaataaaagctactaagcaccacaacagagtaatgtgggcgcagtgtcttccttcaccatgtacatgtggactcaaccagcttacctcaatgcctcctgcggtcctgctcatgatgaacaggcaaaggatgcatccagaacagaagatattgtgtccagggaagaaataccccaatgtcatcaatcatcacatctcaacgagtcaccaacatatataatcagtcgcatgggcgttcattcagaatcagtttcaggcagtttattgcagttttgtttacaaaacatggatttcattgctctgtactgactacatgcataagaaccaacttgtctaatctaggtgtgcatcctccttgacaagcaaaattaacaattcgaccaaacatgcagcttatatatgtgaacccataatttaatatgaacagaaaactgatgtgcaacaacataaactaaaatacaaaggaaccacgaattccgaacatatgataattgttgtcctaatgcagaagaactaaatatactagagaaaaaaaccttcctagtcattgtatggacatatagaaataaaacatctcaagactccaataacaggctcatgctaactagtcatggctttaaaccttcatgatacaaactagtcacaactttaaacatttcatgccaacaagatcatggatggtgttttttttcctagagaaaagctagaatgagaaaagacctaactcagcatacatatcaggatagtatcgtatagacacgtatatgatactatatcacacagccgttcaatttctagaacaaatgcagattgatctgtgaatatgcatgtctcatattttactaggttagatggactgaatcccgtgaaacaaacaatttattcaacaagtttctgcatgaatatcatcccaaattcaataatcactctcgttgataaaaaaaatgcaaccaacagttaaacagaagtgaaatagaaactatttgaatcagatccactccgttattcacatcaaaataattgttgcttgatctataaaagcagtaggaacattgtttacccatcaatttcaagtacacagtaacaagaacaacagtacagctagaattgagcatgtgagtgttgttgatacctcgttgagctctctctgccgcggctttctgctcggcagcaagagccagctcaggatccaccccgaaagcttgggcgtaggtgttgtctatcggcgaaaacaccgcgcggcggtacgccaagaacagcgcggccatctccatcccaggcacggtgcgcgcggctttttccgccgcgtctcgctgagtcacggcggcgtccagcaggtagttgagcgccttccgcggcacgaatcgctgccgtgcggcccggatctggtcgagttggtagtcagcgtcggtgtcgaatgccgggacgtcgaccaggaagaagttgccgtcgctggggtggggacggaaggcgtcaggaatgtcgcaagggcagagcagcgccagcgcgctgcggcgggctacctcgtcgacggcctcggccacggcggcggcaaagctgctgcgggagctgccgccctgggccgccttctcggtgaagtggtcctcgaaggggacgagctcgctggggtcaaaccacccatagctcgagtcaccgaagaaggcgacgaggacgagcccgtcgcggtggccgcggtgtacctcctcgtcgtcggtgaggctgacgctgtagatatggccaggccaccacggatgggacttcaccttggcccagaccatgtcgccgaaccgggggccgccgttcgcccatgcgatgccgcgtccggcagcaggaaccatggcgcctccagcggcggggtcggacatcctgtggaggggaaccgaaaacctagatttggatgcagggtcgattggtctgggcttgggtttgggttccggaggagggtggcctgggatcggtggaag

SEQ ID NO: 100230 - DNA, 765 bp, Zea Mays
aaaatgttaggattttacttaagcaacagtctaattcaatcagttactctgaatgctcagattaatatatctattctaacatactgtatatacatgcctataaaccaaaaaaataaaagctactaagcaccacaacagagtaatgtgggcgcagtgtcttccttcaccatgtacatgtggactcaaccagcttacctcaatgcctcctgcggtcctgctcatgatgaacaggcaaaggatgcatccagaacagaagatattgtgtccagggaagaaataccccaatgtcatcaatcatcacatctcaacgagtcaccaacatatataatcagtcgcatgggcgttcattcagaatcagtttcaggcagtttattgcagttttgtttacaaaacatggatttcattgctctgtactgactacatgcataagaaccaacttgtctaatctaggtgtgcatcctccttgacaagcaaaattaacaattcgaccaaacatgcagcttatatatgtgaacccataatttaatatgaacagaaaactgatgtgcaacaacataaactaaaatacaaaggaaccacgaattccgaacatatgataattgttgtcctaatgcagaagaactaaatatactagagaaaaaaaccttcctagtcattgtatggacatatagaaataaaacatctcaagactccaataacaggctcatgctaactagtcatggctttaaaccttcatgatacaaactagtcacaactttaaacatt

SEQ ID NO: 100231 - DNA, 1295 bp, Zea Mays
ggattcatgccttctccatcctcaagtcatcagctagctagccttccctacagcaactgcatacatacaacacttccatctgcccgctcgtcttcgatcaattcccaagtcaaataataatataacagcaatggtggttcccgtgatcgacttctccaagctggacggcgctgagagggctgaaaccctggcgcagatcgccaatggctgcgaggagtggggattcttccagctcgtgaaccacggcatcccgctggagctgctcgagcgcgtcaagaaggtgtgctccgactgctaccgcctccgggaggccgggttcaaggcgtcggagccggtgcgcacgctggaggcgctcgtcgacgcggagcggcgcggtgaggtggtggcgccggtggacgacctggactgggaggacatcttctacatccacgacggatgccagtggccgtccgacccgccggcgttcaaggagaccatgcgcgagtaccgcgccgagctgaggaagctcgccgagcgagtcatggaggccatggacgagaacctcggcctcgccaggggcaccatcaaggacgccttctccggcggcggccggcacgatcccttcttcggcaccaaggtcagccactacccgccgtgcccacgcccggacctcatcacgggcctgcgcgcgcacaccgacgccggcggcgtcatcctcctgttccaggacgacaaggtcggtggcctggaggtgctcaaggacggcgagtggaccgacgtacagccgctcgagggcgccatcgtcgtcaacaccggcgaccagatcgaggtgctcagcaacgggctgtaccgcagcgcttggcaccgcgtgctgcccatgcgcgacggcaatcgccgctccatcgcatccttctacaacccagccaacgaagccaccatctcgccggcggcggtgcaggccagcggcggtgacgcgtatcccaagtacttgttcggcgattacatggacgtgtacgtcaagcagaagttccaggccaaggagcctaggttcgaagccgtcaagacgggggcgccaaagtcatctccagcggcataaataaacagggaaaacaattattgaatgcattattaaaaggtagtaataagtttgttaagtattaactagctagttgccctctttgctatatatatatatatatatatatatatatatatatatataaaataggtgagtgtccgtgcgttgcaacagaaatatataataccacgacaagttatatatgtgtgttatactgttattagaaaatatttcgtaa

SEQ ID NO: 100232 - DNA, 1333 bp, Zea Mays
cgaccacaaacacatgatcagctgcatgcaactaagctttcactgaagcaagcaaacaaacacctaaagatctgctatttgagtatttcttgtttctcttcagcttcatcagccatggtggttcccgtgatcgacttctccaagctggacggcgctgagaggaccgagactctggcgcagatcgccaatggctgcgaggaatggggattcttccagcttgtgaaccatggcatcccgctggagcttcttgagcgcgtcaagaaggtgtgctccgactgctaccgcctccgagaggccgggttcaaggcgtcggagccagtgcgcacgttggaggcgctcgtcgacgcggagcggcgcggcgaggaggtggcgcctgtggatgacctggactgggaggacatattcttcatccacgacggctgccagtggccgtccgacccgtcggcgttcaaggagaccatgcgcgagtaccgcgccgagctgaggaagctcgccgagcgcgtcatggaggccatggacgagaaccttggcctcaccaagggcaccatcaaggatgccttctccgccggcggccggcacgagcccttcttcggcaccaaggtcagccactacccgccgtgcccgcgcccggacctcatcacgggcctgcgcgcgcacaccgacgctggcggagtcatcctgctgttccaggatgacagagtcggtggcctggaggtgctcaaggacggccagtggatcgacgtgcagccgctcgcgggcgccatcgtcatcaacaccggcgatcagatcgaggtgctcagcaacgggcggtaccgcagcgcctggcaccgcgtgctgcccatgcgcgacggcaaccgccgctccatcgcctccttctacaacccggccaacgaggccaccatctcgccggcggcggtgcagggcagcggcggtggtgagacgtaccccaagtacgtgttcggtgattacatggacgtgtatgtcaagcagaagttccaagccaaggagcccagattcgaagccgtcaaggccgcggcgcccaagtcatctccggcggcctaaaacttgcactagacaacttctttatctagtgctaaaacgtttgcggagagttaaaatgtcgggcactctgataaagacaaaatttaccgagtattcgacaaagaactcttctccaatagtgttgccgcttaaggacacaaactcaatacaggatggtaaaattatttgggttgctattttgtttcatcgtgttgagcgtgaaaatgtaatcctaatattcttgttcctcgtgttcaatgacatatattggattattttacctcttttgtcc

SEQ ID NO: 100233 - DNA, 1932 bp, Zea Mays
gtcagaagctttagaaccatcattgaaatcctcccaactcgttctgatctgtctgttgagtctaataaataaataaataaagaaagaaagaaatcctagagagagagggagggggagggatcacggcggcgggagcacgcacgggtcgcccggcgcggggtctgccttggatgcgtggaggaacctccgctgcttgtcgtctgcgaggcagagcagggatgcctcgcatgcctcctgcgcgtggggcggcgggctcaagccgtggtcctggtctatgaggaggcgcgcatactcggtgagcaggtgcagcatgtagtcgtagacggcgtgcatgcggaggtcctgcacgagcctctgcccgcgcctgccgacgcgctcggcctcgtccgggttggcgttgccccagtcgacggcgtcccggatggactcgcacatgcccagggcggcgaccggccagtagttcacccggggctccagcccgcggctgaagaagtcctggtagcgcggctcgatgagcagcgccatggagccgcaggagaggatgtacttgaggctgaccgaccacgcgaagccctcggcgtagatcttgtagcggtgcgtgcactgcgccgagagcctcgagtgctggtagccggacctggcctcgtcgtcccagttctggcgcatgatctcggcgcgccacagggccgtgtcgttgcagcccagcagcgcctcccgcagcggcgacgccacgtccgggttgcccttccagtacgccgtcggcaccctgtccgcccatctcgttgccctggcgcccgccctgatgttcttgaactcgtggttccatggctcgatgttcgtctccggccagccccagaaggaccagtcagggaaggggatgtcgaagtggtccctggtggtgcagtagcggaagagcggcggcggcggcagagcgccgtccccgtgctcggtccggttgatggcggggcggtccatgcagtcgaacatgaggtccacgtcgggcacgcgcccggggtaccgccgcatcagctgcagcaggctccacaccgtgaacagggcgcggctctgcacgcaggcgtagtagaggtccacgtgcagccgccgcccgccgcccgtgatggtgacgcgcatggacgcgcgccgccgcgcctcgtccaggagcgcgcgcgtcacgccccggccctgcccgcgccacggagccaggtcccggtggatggcagcgaagtaggcagggcactgcttttgcttcttcttcttgttaccttgcggctgcggcgacgacgacgacgacgatagcggcggcaggcaggcgatggagggcgcgcaccgcagcgccgcgcgcgccggcggccggcccttgtcgtgcgggaacgggtgccacggcgtcggctccaggttgtggcccagcagcgtccgcgtccgcgacatggcgtcgtcgtacgcctgcgccgacgaaacaaaatcaaacaaaccgcaacaagcacgcggtcaaccgcttaaatcctgtaccgagtggacgacggcgaggacgatcacggccgagaaggccgcgatggcggagaccacgagcgccgacagaggcgggtaccgcatggctcgtccccggcctccggcgccctccgccgccatgtatgtgtgtgtagcccgcctgcggatcgccgcccagaatatggaccactgcacaggggccgcactaaaagtaaaacacgcgcacgaatgtatcaaaccaaccaaaagaataaatccgtgcactttcaaaagtagtacgtgtcctcaatattcggatctgacaaccggcaaccgtctgcgtgcatgctgacctgcatggccatggcccatggacgccgagcactcacccggcggactagcggaggacgaggatgagttaattaccgtgcaatctcacgtactattcgtttgttcctgaatatt

SEQ ID NO: 100234 - DNA, 2702 bp, Zea Mays
tggaggaccctcgccatcctgcccaagcgcaccaccaaacccccagcagcggcgctagggttcgcgcctcggcgcgtcggcaccgtcacctgcggcgatggcggggcaggagcgtaggacaatcgatctggaggagggatgggcgttcatgcagaagggcatcaccaagctgaagaacatcctcgagggcaagcccgagccgcagttcagttccgaggactacatgatgctctacacgacgatatacaacatgtgcacgcagaagccgccgcaggactactcacagcagctctacgacaagtatcgggagtcgttcgaggagtacatcgcctccatggtactaccttcattaagggagaaacatgacgagtttatgctgagggagctagtgcaaaggtggtcaaaccataaagtcatggttcgctggctgtcacgcttcttttattaccttgaccgatacttcatatcaaggaggtcacttacaccacttaaagaagtgggccttacttgcttccgagagttgatctatcaagagattaaaggacaagttaaagatgcagtgatagctctgatagacaaagaacgtgagggtgaacagattgaccgggctctgttgaagaatgttttggatatttttgttgaaattgggttgggtcaaatggagtgttatgagaatgactttgaagatttcttgctcaaggatactacagagtactactctgtcaaagctcaaagctggattcttgaggactcatgcccagattacatgattaaggctgaggagtgtttaaagcgggagaaggagcgagttggtcactatttgcatattagcagcgaacagaagttattggagaaagtgcaaaatgaattgcttgctcagtatgcaaccccgctgttagagaaggagcattctggatgttctgctttgcttcgcgatgacaaggttgaggatctttctaggatgtacagactcttctccaaaatctcccgtggtctggagcctatttcaaacatgttcaaaacgcatgtcacaagtgagggtacagccttggtcaagcaagcagaagattctgctagtaataagaagccagagaagaaggatatggttggcatgcaggaacaggtctttgtgtggaaaatcatcgagctgcatgacaaatatgtagcttatgtgacagaatgtttccagggacatacactcttccataaggcacttaaagaagcctttgaggtcttctgtaacaaaggtgtctctggcagttcgaatgctgagttgttggctaccttctgcgacaatattctgaagaaaggctgcagtgaaaagctcagtgatgaagccattgaagatgcccttgagaaggttgtgagattgctggcatacatcagtgataaagacctgtttgccgagttctataggtgagtgcttgttatcctacatggtattattaatgcttgtctaatttaaaaaaatgcttgtgtcaagtgtaaggaactagtgctctttggaacttggttatgtttttcaatatgtgaaccaacttataggaagaaacttgccagaagattacttttcgacaaaagtgctaatgatgagcatgagagaagtattctgacaaagctcaagcaacagtgcggggggcagtttacttccaaaatggagggcatggttacggaccttactgtcgctagagatcaccaaactaagtttgaagagtttgtagctgggcatccagagttgaatcctggcatagatttggctgttactgttttgacaacgggattctggccaagctacaaaacttttgacataaaccttcctgcggagatggtgaaatgtgtagaggttttcaaggaattctatcaaacaagaacgaagcacaggaagctgacatggatttattccttgggaacctgcaacatcaatgctaagtttgatgctaaacctattgagctcattgttacgacatatcaggctgcattactactactgttcaatggatccgaaaggcttagttattctgaaattgcaacacaattaaacctgtcagatgatgatgtagtgcgtttgctccattcactttcttgtgcaaaatacaagatccttaacaaggaaccagcaaatagatccatctcgcccaatgatgtttttgagttcaattcaaaatttactgacagaatgagaagaattaagattccactgcctcccgttgatgagaagaaaaaggttgttgaagatgttgacaaagacaggaggtatgcaattgatgcatcaattgtgcgcattatgaagagccgcaaagttatgggtcatcaacagctggttgctgaatgtgttgagcagcttagccgcatgtttaagccggacttcaaagccataaagaagaggattgaggatctcatcacaagggactatttggagcgcgacaaggacaacgccaatacgtacaaataccttgcctgattggtggttagtgacaaagtccaaaacagctccgggactatgcgataccactgggatggcaatcttcctgcaatgtcgtggtagatgcgtattctggctccgttgtcacctgttggtttgtggaggcagagtggattggtcagctagctgacggaagtcactgactcactagaagctattaagtggttttgtacttactgagtcaaatatatgtcatacgttgaaaccatgtttcgtaatt

SEQ ID NO: 100235 - DNA, 2703 bp, Zea Mays
tggaggaccctcgccatcctgcccaagcgcaccaccaaacccccagcagcggcgctagggttcgcgcctcggcgcgtcggcaccgtcacctgcggcgatggcggggcaggagcgtaggacaatcgatctggaggagggatgggcgttcatgcagaagggcatcaccaagctgaagaacatcctcgagggcaagcccgagccgcagttcagttccgaggactacatgatgctctacacgacgatatacaacatgtgcacgcagaagccgccgcaggactactcacagcagctctacgacaagtatcgggagtcgttcgaggagtacatcgcctccatggtactaccttcattaagggagaaacatgacgagtttatgctgagggagctagtgcaaaggtggtcaaaccataaagtcatggttcgctggctgtcacgcttcttttattaccttgaccgatacttcatatcaaggaggtcacttacaccacttaaagaagtgggccttacttgcttccgagagttgatctatcaagagattaaaggacaagttaaagatgcagtgatagctctgatagacaaagaacgtgagggtgaacagattgaccgggctctgttgaagaatgttttggatatttttgttgaaattgggttgggtcaaatggagtgttatgagaatgactttgaagatttcttgctcaaggatactacagagtactactctgtcaaagctcaaagctggattcttgaggactcatgcccagattacatgattaaggctgaggagtgtttaaagcgggagaaggagcgagttggtcactatttgcatattagcagcgaacagaagttattggagaaagtgcaaaatgaattgcttgctcagtatgcaaccccgctgttagagaaggagcattctggatgttctgctttgcttcgcgatgacaaggttgaggatctttctaggatgtacagactcttctccaaaatctcccgtggtctggagcctatttcaaacatgttcaaaacgcatgtcacaagtgagggtacagccttggtcaagcaagcagaagattctgctagtaataagaagccagagaagaaggatatggttggcatgcaggaacaggtctttgtgtggaaaatcatcgagctgcatgacaaatatgtagcttatgtgacagaatgtttccagggacatacactcttccataaggcacttaaagaagcctttgaggtcttctgtaacaaaggtgtctctggcagttcgaatgctgagttgttggctaccttctgcgacaatattctgaagaaaggctgcagtgaaaagctcagtgatgaagccattgaagatgcccttgagaaggttgtgagattgctggcatacatcagtgataaagacctgtttgccgagttctatagaagattacttttcgacaaaagtgctaatgatgagcatgagagaagtattctgacaaagctcaagcaacagtgcggggggcagtttacttccaaaatggagggcatggttacggaccttactgtcgctagagatcaccaaactaagtttgaagagtttgtagctgggcatccagagttgaatcctggcatagatttggctgttactgttttgacaacgggattctggccaagctacaaaacttttgacataaaccttcctgcggagatggtgaaatgtgtagaggttttcaaggaattctatcaaacaagaacgaagcacaggaagctgacatggatttattccttgggaacctgcaacatcaatgctaagtttgatgctaaacctattgagctcattgttacgacatatcaggctgcattactactactgttcaatggatccgaaaggcttagttattctgaaattgcaacacaattaaacctgtcagatgatgatgtagtgcgtttgctccattcactttcttgtgcaaaatacaagatccttaacaaggaaccagcaaatagatccatctcgcccaatgatgtttttgagttcaattcaaaatttactgacagaatgagaagaattaagattccactgcctcccgttgatgagaagaaaaaggttgttgaagatgttgacaaagacaggaggtatgcaattgatgcatcaattgtgcgcattatgaagagccgcaaagttatgggtcatcaacagctggttgctgaatgtgttgagcagcttagccgcatgtttaagccggacttcaaagccataaagaagaggattgaggatctcatcacaagggactatttggagcgcgacaaggacaacgccaatacgtacaaataccttgcctgattggtggttagtgacaaagtccaaaacagctccgggactatgcgataccactgggatggcaatcttcctgcaatgtcgtggtgcgtccacttctaccatgatttgcagcacgttttggtgatttgccctgccacagcacgggctgctcacattttgtacattggtcgttaaataggataagcgtgttggcctacattagatataatgatgattgatgatatgaggaataggagaggcattcaagtacttgtatgtgtcttctatgccaatgctttatctatatagctgtatcagtgttccagtcaattgatatgagatgatgcttggagtcgttttgctatatgaagtgacggatacaatgggaatttgcagcatccgtttgtatc

SEQ ID NO: 100236 - DNA, 2806 bp, Zea Mays
cacaagcccaacccttcctgacgctccacgcgctcgtctctctccttccttccatcctccctccctccttccctccctcgctcgcctctggaggaccctcgccatcctgcccaagcgcaccaccaaacccccagcagcggcgctagggttcgcgcctcggcgcgtcggcaccgtcacctgcggcgatggcggggcaggagcgtaggacaatcgatctggaggagggatgggcgttcatgcagaagggcatcaccaagctgaagaacatcctcgagggcaagcccgagccgcagttcagttccgaggactacatgatgctctacacgacgatatacaacatgtgcacgcagaagccgccgcaggactactcacagcagctctacgacaagtatcgggagtcgttcgaggagtacatcgcctccatggtactaccttcattaagggagaaacatgacgagtttatgctgagggagctagtgcaaaggtggtcaaaccataaagtcatggttcgctggctgtcacgcttcttttattaccttgaccgatacttcatatcaaggaggtcacttacaccacttaaagaagtgggccttacttgcttccgagagttgatctatcaagagattaaaggacaagttaaagatgcagtgatagctctgatagacaaagaacgtgagggtgaacagattgaccgggctctgttgaagaatgttttggatatttttgttgaaattgggttgggtcaaatggagtgttatgagaatgactttgaagatttcttgctcaaggatactacagagtactactctgtcaaagctcaaagctggattcttgaggactcatgcccagattacatgattaaggctgaggagtgtttaaagcgggagaaggagcgagttggtcactatttgcatattagcagcgaacagaagttattggagaaagtgcaaaatgaattgcttgctcagtatgcaaccccgctgttagagaaggagcattctggatgttctgctttgcttcgcgatgacaaggttgaggatctttctaggatgtacagactcttctccaaaatctcccgtggtctggagcctatttcaaacatgttcaaaacgcatgtcacaagtgagggtacagccttggtcaagcaagcagaagattctgctagtaataagaagccagagaagaaggatatggttggcatgcaggaacaggtctttgtgtggaaaatcatcgagctgcatgacaaatatgtagcttatgtgacagaatgtttccagggacatacactcttccataaggcacttaaagaagcctttgaggtcttctgtaacaaaggtgtctctggcagttcgaatgctgagttgttggctaccttctgcgacaatattctgaagaaaggctgcagtgaaaagctcagtgatgaagccattgaagatgcccttgagaaggttgtgagattgctggcatacatcagtgataaagacctgtttgccgagttctataggaagaaacttgccagaagattacttttcgacaaaagtgctaatgatgagcatgagagaagtattctgacaaagctcaagcaacagtgcggggggcagtttacttccaaaatggagggcatggttacggaccttactgtcgctagagatcaccaaactaagtttgaagagtttgtagctgggcatccagagttgaatcctggcatagatttggctgttactgttttgacaacgggattctggccaagctacaaaacttttgacataaaccttcctgcggagatggtgaaatgtgtagaggttttcaaggaattctatcaaacaagaacgaagcacaggaagctgacatggatttattccttgggaacctgcaacatcaatgctaagtttgatgctaaacctattgagctcattgttacgacatatcaggctgcattactactactgttcaatggatccgaaaggcttagttattctgaaattgcaacacaattaaacctgtcagatgatgatgtagtgcgtttgctccattcactttcttgtgcaaaatacaagatccttaacaaggaaccagcaaatagatccatctcgcccaatgatgtttttgagttcaattcaaaatttactgacagaatgagaagaattaagattccactgcctcccgttgatgagaagaaaaaggttgttgaagatgttgacaaagacaggaggtatgcaattgatgcatcaattgtgcgcattatgaagagccgcaaagttatgggtcatcaacagctggttgctgaatgtgttgagcagcttagccgcatgtttaagccggacttcaaagccataaagaagaggattgaggatctcatcacaagggactatttggagcgcgacaaggacaacgccaatacgtacaaataccttgcctgattggtggttagtgacaaagtccaaaacagctccgggactatgcgataccactgggatggcaatcttcctgcaatgtcgtggtgcgtccacttctaccatgatttgcagcacgttttggtgatttgccctgccacagcacgggctgctcacattttgtacattggtcgttaaataggataagcgtgttggcctacattagatataatgatgattgatgatatgaggaataggagaggcattcaagtacttgtatgtgtcttctatgccaatgctttatctatatagctgtatcagtgttccagtcaattgatatgagatgatgcttggagtcgttttgctatatgaagtgacggatacaatgggaatttgcagcatccgtttgtatc

SEQ ID NO: 100237 - DNA, 2486 bp, Zea Mays
atgatgaatttagaggacgctgagagcgtgtgtgagaaggtgtgcgtggtcgaagcggatttgactcgattttgtttataacaacatcaggcaggcagctacctcgtgataatcaaagcttaattaatcccgagcgaaaattatgatgcgcacatggctgccccgccggacgagagatgattattacaagtaagcacgaggaaagggaagagaagaagaagagggctcgtctcgtcttgcaggccggaggctgcgtcgctgccccgccggcgccgccgtatgccagttctttgtcagtcccttcggcaggtcttcgtgggtccttctccttcgccggcgacgagcacccaccaagagaaccttcctgcaaggctgcattgatctcgtcttgttgtttctggcccaacacttggtttattgctcaaccttaaccccggacttgttcttctacaggacagcgggtacagcgctagttattgcttcaccttccttatctttgctgcagcaactggaggccgaggcttttacaaggagctggggaagaatgggcagaagctgctatcgaatctgaagctttgcttggcacaccagcactggagagatgtataagaaccaactccaggagcttgctcagaggagctgcttcaatctgccgtcctattcctgcatccgggagggaccagatcatgcaccccggtttaaggctacagttaatttcaacggggagatgttcgagagcccagtgttttgttccactctgcggcaggcggagcatgcggcagctgaggtagcactcaatgagttatcaaagagggggccttcgtcgacgctggctgccaaagttctggatgaaaccgggatatacaagaatcttcttcaagaaactgctcatcgagctggtctaaaactccccatctatactactattagatctgggccaggtcatacgcctgtgttcgcatgcacagtggagttggcaggaaaggcatttactggcaatcctggcaagaccaagaagcaagctcaaaagaatgctgcaatggctgcctggtctgaattgaagaaactgcccagggtaggtgagccgtcatcctcatcttgtccacctgatcaggatgatgaagtgcaggaacaggtcgtagttactcggactcttgcaagcttgaaccaggcaaatagtggcaaggtgccacatcagaaggaaaaacagcaaagcaataaccgcccatcatcacggagatgttatcctaaaccaaatacaccattctaccgaccatttatgcaaaatcaggcttatcctagcgttccaccagatcaagctatgtaccatctgtggcatcggatgcaagtgacagccaacgcctcgctttccagtggtaccagctatgggcaatacaagtttttgcccaccagcagctatgctccccatgtaccctccttcacctcaagggcaattctccaatccggctaaccaggatgctctaggccttcttccatgttttcctgatgcttctcctgccatgctacggcacttctcaccttaccctgtctcctatgtgccaagaagtcctctgccggttactgttcacaatgttcatgagagaaggcatgaccatactgaaacagttgagcttcctgatgctgtggtgttctcccaatgcacgaccctagattcctttaggacatcagaatgtggcggtccaccactcaaggttcaagaaccaaccaaaaatcggaaagaaggctgtattgggtcccctgagaaagaacttgacactcttgccgtctcaagctctaccgcacaagcgtcgtcgcaaaagttggaagcaaatgaaggtaagcaaacagtgcaggcaggtttgaagcagacccatgaacagcagctgatgtcatcctcgtcttgtgttagttcttcagttgtggcacagagctcgcattacgctagctccatccagcatgatgagtctatacatagaaggaatcctcctcatactagttcgcctgcattgcctgatgtgtggtcttcccgctcgcaagctctgcccagatttggatcaccaagttgggtgttccagcagcgaccttggttggctgcacccgtcacagttcgaaccgctgttcctgtctgctcagccaggccaaacgtggtgaattctaccactggaataagacctgctgcccagagccatgatggagagagagatctgaacagcgccgcagcagcgagttctggattcaataaactccaaatttgagctgcggttttggttctgctgagcttttcatctcagttttgtttgcttcttggcttgaggtttattttttagttagatataccagataggctcttaggttttcattttacatttaccagatgtccagttccttctgaagataaatggacgagaactgtaatataaaaaatgcagaggcctttctcatgcgatttgaattcagtttcagtatgcaatcgatgtagttccagc

SEQ ID NO: 100238 - DNA, 2303 bp, Zea Mays
atgatgaatttagaggacgctgagagcgtgtgtgagaaggtgtgcgtggtcgaagcggatttgactcgattttgtttataacaacatcaggcaggcagctacctcgtgataatcaaagcttaattaatcccgagcgaaaattatgatgcgcacatggctgccccgccggacgagagatgattattacaagtaagcacgaggaaagggaagagaagaagaagagggctcgtctcgtcttgcaggccggaggctgcgtcgctgccccgccggcgccgccgtatgccagttctttgtcagtcccttcggcaggtcttcgtgggtccttctccttcgccggcgacgagcacccaccaagcaactggaggccgaggcttttacaaggagctggggaagaatgggcagaagctgctatcgaatctgaagctttgcttggcacaccagcactggagagatgtataagaaccaactccaggagcttgctcagaggagctgcttcaatctgccgtcctattcctgcatccgggagggaccagatcatgcaccccggtttaaggctacagttaatttcaacggggagatgttcgagagcccagtgttttgttccactctgcggcaggcggagcatgcggcagctgaggtagcactcaatgagttatcaaagagggggccttcgtcgacgctggctgccaaagttctggatgaaaccgggatatacaagaatcttcttcaagaaactgctcatcgagctggtctaaaactccccatctatactactattagatctgggccaggtcatacgcctgtgttcgcatgcacagtggagttggcaggaaaggcatttactggcaatcctggcaagaccaagaagcaagctcaaaagaatgctgcaatggctgcctggtctgaattgaagaaactgcccagggtaggtgagccgtcatcctcatcttgtccacctgatcaggatgatgaagtgcaggaacaggtcgtagttactcggactcttgcaagcttgaaccaggcaaatagtggcaaggtgccacatcagaaggaaaaacagcaaagcaataaccgcccatcatcacggagatgttatcctaaaccaaatacaccattctaccgaccatttatgcaaaatcaggcttatcctagcgttccaccagatcaagctatgtaccatctgtggcatcggatgcaagtgacagccaacgcctcgctttccagtggtaccagctatgggcaatacaagtttttgcccaccagcagctatgctccccatgtaccctccttcacctcaagggcaattctccaatccggctaaccaggatgctctaggccttcttccatgttttcctgatgcttctcctgccatgctacggcacttctcaccttaccctgtctcctatgtgccaagaagtcctctgccggttactgttcacaatgttcatgagagaaggcatgaccatactgaaacagttgagcttcctgatgctgtggtgttctcccaatgcacgaccctagattcctttaggacatcagaatgtggcggtccaccactcaaggttcaagaaccaaccaaaaatcggaaagaaggctgtattgggtcccctgagaaagaacttgacactcttgccgtctcaagctctaccgcacaagcgtcgtcgcaaaagttggaagcaaatgaaggtaagcaaacagtgcaggcaggtttgaagcagacccatgaacagcagctgatgtcatcctcgtcttgtgttagttcttcagttgtggcacagagctcgcattacgctagctccatccagcatgatgagtctatacatagaaggaatcctcctcatactagttcgcctgcattgcctgatgtgtggtcttcccgctcgcaagctctgcccagatttggatcaccaagttgggtgttccagcagcgaccttggttggctgcacccgtcacagttcgaaccgctgttcctgtctgctcagccaggccaaacgtggtgaattctaccactggaataagacctgctgcccagagccatgatggagagagagatctgaacagcgccgcagcagcgagttctggattcaataaactccaaatttgagctgcggttttggttctgctgagcttttcatctcagttttgtttgcttcttggcttgaggtttattttttagttagatataccagataggctcttaggttttcattttacatttaccagatgtccagttccttctgaagataaatggacgagaactgtaatataaaaaatgcagaggcctttctcatgcgatttgaat

SEQ ID NO: 100239 - DNA, 899 bp, Zea Mays
atatttttgggtgtcgaggcccttctaaaattaaatgatcgttctttccagagggtatcaaaagctaggagagaatgttaccaaggaaaaacgtgatatgcacgaagcagtcaattgcttgactcctattgcacctggcaaatacggagaccttggtaaaacacttgaaggagacaatctgtggcctgaatacccatcaaatttgaaggtagtgctggaaaactatatcagccttgtcaaagatctgtcaaggaagatcatgcgaggtatagctttggcattgggtgggcctgctgatgcctttgaaaggggaatagcaggagatccttactgggctctcaggctggttagctaccctgtttcaagcagtgatgagaaacgcactgatgatactgggatgatgggatcgcacacagactacggacttgttacactggttaaccaggatgatgacatttgtgcccttgaggtccaaaatcgttccggtgtgtggatacgtgccaacccgattcctgaaacctttctttgcaacatcggtgacatgctccaggtctggtcaaatggaatttaccaacccacagttcatagagtcatcaacagctcccatcaacgccgcgtttctgctgtgtttttctatgagaccgattttgatgctgccgtagagcccgttgagttgtgcgtggagaaaacaggcggcgtcgccaagtatgacaaggtcgtgtatggggagcgtctggttcggaaggccttctgctgctttggccatttatagggctggagaataagttatattgctactgtgaaaacaaagggcatactatatgcattgcacacacaatgatctgttgttaaacctatgtgatatatattgtgaaataaaggaacacttattatatata

SEQ ID NO: 100240 - DNA, 1208 bp, Zea Mays
aacagctagcaggccctatatataagaaaggaaagaacgactcgctccacgttaattagttcctcgatcgattatcaccagcatctcacttcgttcagatatatatagcaagtctaagtcttagtttttgcttttggaacatctctctaatttcacgattgagcgtacgtgcgcacaaacaaacaaacaaacaaacaatatatgggttcttccaatgatgtcacggcgattcctctaatcgaaaggccacggcatttgtgagatgctaatgagggaagtgagggatgtgtcacacaaattctttcagcttccacatgaggaaaagatgaagattaagatgacacgtcaaagtgggtatagagggtatcaaaagctaggagagaatgttaccaaggaaaaacgtgatatgcacgaagcagtcaattgcttgactcctattgcacctggcaaatacggagaccttggtaaaacacttgaaggagacaatctgtggcctgaatacccatcaaatttgaaggtagtgctggaaaactatatcagccttgtcaaagatctgtcaaggaagatcatgcgaggtatagctttggcattgggtgggcctgctgatgcctttgaaaggggaatagcaggagatccttactgggctctcaggctggttagctaccctgtttcaagcagtgatgagaaacgcactgatgatactgggatgatgggatcgcacacagactacggacttgttacactggttaaccaggatgatgacatttgtgcccttgaggtccaaaatcgttccggtgtgtggatacgtgccaacccgattcctgaaacctttctttgcaacatcggtgacatgctccaggtctggtcaaatggaatttaccaacccacagttcatagagtcatcaacagctcccatcaacgccgcgtttctgctgtgtttttctatgagaccgattttgatgctgccgtagagcccgttgagttgtgcgtggagaaaacaggcggcgtcgccaagtatgacaaggtcgtgtatggggagcgtctggttcggaaggccttctgctgctttggccatttatagggctggagaataagttatattgctactgtgaaaacaaagggcatactatatgcattgcacacacaatgatctgttgttaaacctatgtgatatatattgtgaaataaaggaacacttattatatata

SEQ ID NO: 100241 - DNA, 1324 bp, Zea Mays
aacagctagcaggccctatatataagaaaggaaagaacgactcgctccacgttaattagttcctcgatcgattatcaccagcatctcacttcgttcagatatatatagcaagtctaagtcttagtttttgcttttggaacatctctctaatttcacgattgagcgtacgtgcgcacaaacaaacaaacaaacaaacaatatatgggttcttccaatgatgtcacggcgattcctctaatcgatgttgccccacttgtcaaaaagattgatgatccagacatggcaaatgataaggatttgctacgagttgttctaacgttggactatgcttgcaaggaggttggattcttttatgtgaaaggccacggcatttgtgagatgctaatgagggaagtgagggatgtgtcacacaaattctttcagcttccacatgaggaaaagatgaagattaagatgacacgtcaaagtgggtatagagggtatcaaaagctaggagagaatgttaccaaggaaaaacgtgatatgcacgaagcagtcaattgcttgactcctattgcacctggcaaatacggagaccttggtaaaacacttgaaggagacaatctgtggcctgaatacccatcaaatttgaaggtagtgctggaaaactatatcagccttgtcaaagatctgtcaaggaagatcatgcgaggtatagctttggcattgggtgggcctgctgatgcctttgaaaggggaatagcaggagatccttactgggctctcaggctggttagctaccctgtttcaagcagtgatgagaaacgcactgatgatactgggatgatgggatcgcacacagactacggacttgttacactggttaaccaggatgatgacatttgtgcccttgaggtccaaaatcgttccggtgtgtggatacgtgccaacccgattcctgaaacctttctttgcaacatcggtgacatgctccaggtctggtcaaatggaatttaccaacccacagttcatagagtcatcaacagctcccatcaacgccgcgtttctgctgtgtttttctatgagaccgattttgatgctgccgtagagcccgttgagttgtgcgtggagaaaacaggcggcgtcgccaagtatgacaaggtcgtgtatggggagcgtctggttcggaaggccttctgctgctttggccatttatagggctggagaataagttatattgctactgtgaaaacaaagggcatactatatgcattgcacacacaatgatctgttgttaaacctatgtgatatatattgtgaaataaaggaacacttattatatata

SEQ ID NO: 100242 - DNA, 82 bp, Zea Mays
tcactcacaccactcctctcttcttctctgtcgtaatcaacatctaatcctttttgggtttggtttggtttggtcctgctct

SEQ ID NO: 100243 - DNA, 1404 bp, Zea Mays
agaaaagcagcggcattcgcagctgcagcgccatcccttgccttctccacaagcatcaccggccagccaagccttcccctttgatctccacgcgcggccttcgtccatcctctcctccggtcgaggtcggggcgcgatgggcggcagcggcgtccaagaagaagaggccggcacaccgccagccatggttgtgccaccggtggtcgtgaagggcaagcgcagcaagaggcagcgcgtgcacgcgccgccggctgtggtggaggcggcggcggcggcgcctgagtggtcgtcatctgcggcatcggctgccacggcgccgggcggggacgactcggggttagcgacggccacgtcgccgtccgccgcggacgaggctgcgtccgccgggtattgcctcaccaaggaggacgaggacacggcgctctgcctcatgctcctcgcgcacggcgagcccgcagtggctggcaaggacgatggcggcgggacggtagcggtggcgggcaaggaggccagcaggttcaggagccgccgcctggccgccaacgacggcgctgcctccggcgagtacgtgtacgagtgcaagacgtgcaacaagtgcttcccgtccttccaggcgctgggcggccaccgcaccagccacaagaagccacgcctgctgcttccgccggtgccgccgcagccgccccaggaaacggaccacctgctggcccctgcccctgcagctgctgtggaaccaactgatacgtcgccgccgccgccgccgccgacgacgacgacgagagaaggggccgccgatgcaacagtgctcgcgatccctgttgccgtggcgccaaagcaagaaggacaggacgcgggcgccgccgccgttcccatcgcgatcgccatcgccgtggccgcgagcagcagcggcagcggcagcgccaagcaacatcacccgcgggtccacgagtgctccatctgcggcgccgagttcgggtccgggcaggcgcttggcggccacatgcggcggcaccggccgctggtgccggcggcggcggcctctcgggacgacctgcacgcgccgaggaaggagaagagcctcctggagctggacctgaacttgccagctccctgcaacgaggccgatgctccggagctgacgtccccacgcttcgctttcgccgtcgcggatcggcctccggcgccgccgcccttcccgccggccacgccgtccgccctggttgactgccattactagtaaatacaacacaccaatcagccccttcttctgcttggatcatcattatcatcatacataattactactgcatacatacatatacagtgacacacacacatacactacacgccacttcgttccttgctttctagatattcttcttcttctttcttcttctgttcttt

SEQ ID NO: 100244 - DNA, 655 bp, Zea Mays
ccgctccatttccacccgccttcacgcctccactccacttcaatggatgaagcctataaaacgggagcacccccggcggccattgccaagcaccagtccactcatcatcgccatctcttctcttctcttctcttctcttgctcgctgatctatacataccagagaggtagtagctagctagtggtgagcatacaatataatcagcagcaagatagtaatggcgcagcagcagggaagaggcagtggtgctgtggcccttgcggcggtgctcctctgcgtgctccttcatgcccacgtcgcgggagtcggccgtgttcaccgtcggcgaccgtggcggctggagcttcagcaccagcacctggactaatggcaagcgcttcaaggctggggacgtcctagtgttcaagtacgactcgacggcgcacaacgtggtggcggtgaacgcggctggctacaaaggctgctcggcgccgcgaagtgccaaggtgtacacgtccggcaacgaccgcgtcacgctggcccgcggcaccaactacttcatctgcagcatccccggccactgccagtccggcatgaagatcgccgtgccgcgggctacatacatctacctatcgactgcctgattgtcagttcgagtggcttgtatcgactccct

SEQ ID NO: 100245 - DNA, 1233 bp, Zea Mays
ctttctattctacaaccaccgtacctgcttggggctagcttcttgattttgcttgagatgcagtatatacgtgcaagacagatatcagcagattatatatatagcagcgtagaagtcctgtggttgcccgattatctgattctgtgatcgagatcgaggccgatcggccaggtttcttgtgcgtgcgctctgctactgccatggcggtagctcaccttcttctccaactctctgccggagtcaatggagctagcaggaacaggatgctcattccagccattctttcgattcttcagcttattcacctcgcagcgctaggcgtggacggagcggcgtcgttcaggttcaccaacgcttgccagcacccggtgtgggtgggcgcgctccacggcgccagctcgccgccgctcgcaagctcgggcttctacctggcgcggtccgccacgtcccgcctggacgcgccgtcgtcagggacatggtccggcacgttctgggcgcgcacgggctgcgcggtcgattccgcaaccggccgcttctcctgcgccacggccgactgcggcacgggcgacgtcgcctgccagggccgcgggccggcgccgccggtctcgctcgtcgaggtcacgctcgcagcgccggggagcggcgggcaggacttctacgatgttagcctcgtcgacggcttcaacgtgccggtgcgcgtggcgccctcgggcggcggtggcgactgtcgccccgcggcgtgcgcgggcgacgtgaacgcgatgtgccccgcggacctccgcgtcgtcgcctcgtccggcagcggcggcgtcgtggcgtgcaagagcgcgtgcagcgcctacggcagcgcgcgctactgctgcaccggccagtacggcacgccggcgacgtgccgaccgaccaactactcgcaggtgttcaagagcgcatgcccgtcggcgtacagctacgcctacgacgacaccagcagcaccttcacctgttccggcgcttccagctatgacgtcaccttctgccctgggaccgggagctagttgtgaaaatccatcacgggaagggttaataaaagagcgcaccagactagatatttttcttcaaaactttatagggaaagatcaagtagaattgacacacggatgaatgtggttcatatccttcaaaactttatgtttagaattctatgtatgtgttgtttgattctagttaatttgcgtccaggcgtatttctgagcg

SEQ ID NO: 100246 - DNA, 570 bp, Zea Mays
ctttctattctacaaccaccgtacctgcttggggctagcttcttgattttgcttgagatgcagtatatacgtgcaagacagatatcagcagattatatatatagcagcgtagaagtcctgtggttgcccgattatctgattctgtgatcgagatcgaggccgatcggccaggtttcttgtgcgtgcgctctgctactgccatggcggtagctcaccttcttctccaactctctgccggagtcaatggagctagcaggaacaggatgctcattccagccattctttcgattcttcagcttattcacctcgcagcgccggggagcggcgggcaggacttctacgatgttagcctcgtcgacggcttcaacgtgccggtgcgcgtggcgccctcgggcggcggtggcgactgtcgccccgcggcgtgcgcgggcgacgtgaacgcgatgtgccccgcggacctccgcgtcgtcgcctcgtccggcagcggcggcgtcgtggcgtgcaagagcgcgtgcagcgcctacggcagcgcgcgctactgctgcaccggccagtacggcacgccggcga

SEQ ID NO: 100247 - DNA, 835 bp, Zea Mays
aggagcccttcttctccctccactccatcggtaccaatgaacagctcttgcctcttcctcatgtcgccgtccaagaagggcccatgtgcttccacgagcctctggatccagcggtctagggcaccaaggtacttggcgtagaccagcttgacgggcgccgcgagggcggagtcaatgccagcagactcggcggcggcagcccaaccaccgggagtgttgggcacgccggcgtagccccctgcagcgcggacggccaggaagaggcggagaaggtcaacgcatcgtccatttccaagagccacggggataggccgcgcctcgcggccgccggtgtaggcctcgcgcaggaacgtggcgaggacggcgtcgaacgcctccgaggggtcggaggccgcgacggcgtcggggacccggagatcggcgcagaagccgagggactgcagcttgctgaggatggcgaggacgctggcggcggagtccatggaccggtgaccggcggcgaggtcacgacggttggccgcggtggcgcatattctcctttttttttcctttgttttgccttttttttggctgtgggttgagtatagatagaacgtttagtgtggatttatgttttttttcttttaaccttcctgtttttgaatgaaatttgaaggtttgttgtgtccgttcgatgcataggatacagaggatttttatgtgggcctgtgatggctttgtcgccttgatgggagtagtagatgggttatgtgttgagtactaaaaatatcttcaatggtcatatctcatatcttttagaataaaaaattaagtgaccacttaaaatgctaactaa

SEQ ID NO: 100248 - DNA, 403 bp, Zea Mays
tggttggaaaaagaaatcttcacataagtttctcagagacaaacagagtctacaatgaacaacagtactactttcagaacactaacatctacatagatgctcactgctccatctcgctccagagaactacaacaggagcctagagcatggaaccaacatgtatcttattggataaggacccgattaataattcacaaagagaaaaagaaagctacaaaaaagttgaaacaaacgatacactgtcaaatcattgcattctcactttctggatgtgcgtccatgtaagtaagtgctcagtgaccagtattacctgaattccctatcagaacttgagtttgaaattcaattgtggatcagcctacaatccatctgtgcacaatccatctgtgcagtaactaattgc

SEQ ID NO: 100249 - DNA, 315 bp, Zea Mays
atgtctgacgatgaacgtgaaatgtgtgcaaggactatctactgcacaaacattgacaagaaggtcactcaagcagatctaaagttattctttgagtccagatgtggtgaggtaaaagtttgcagaaatggcaccatcaagatcgatctggagaccaacaagatcatggacttcatcaagtttgacgtcggcaacatggtcatggtgaccggcgggaggaacaccgggcgtgtaggagtgatcaagaacagggagaagcacaagggcagcttcgagaccatacacgtgctgcttggagctttttgctatgtctaa

SEQ ID NO: 100250 - DNA, 1823 bp, Zea Mays
ttggttcccagcctagaaacggacgagtgaccaggaataagtgtccactcaatcctggactggattggttactgatctgtttttgatccacgtctgccgaacggggccgaaacgaatgcgaactatgccatcaacatggaactaaactcagacaccctcctcttcctaactactatcatctcagcggctatccttgttgtgtgctcacttagccgccgcaaaccttcaccaggccccaagaagaagcggcctccaggcccatggcgtctccccttgatcggaaacctcctccacctagccacctcgcagccgcacgtcgcgctacgggatctggccaggaagcacggacccgtcatgtacctgcgtctgggccagatcgacgccgtcgtgatctcctcgcccgcggcggcacaggaggtgctccgggacaaggacgtcgccttcgcgtcgcggccgaacctgctcgtggcggacatcatcctctacggaagcatggacatgtcgttcgcgccgtacggcgcttactggaggatgctgcgcaagctctgcatgtccgagctgctcagcacacacaaggtgcggcagctcttggccgtccgtgacagcgagaccatttcgttggtcaggaaggtccgggctgccggcggccagagcggagagccggtcaatctgggcaggctggttttgtcctgctcgatggcgatcaccggcagggcgacgtttgggcagctgtgcggcgacgagctcatgtcggtcgtcgacgtggcggtgctgtacggtggcgggttctgcgccggggacctcttcccgtccctgtcgttcgtggacgtcgtcactgggttgacacgacggctgtggcgagcgcgccggcacctcgacggcatatttgacaagatcatcgccgagtgtgaggcacggcagcgacaggcgaagacgacgaccgggacaacgaacggagatggcgacggccttctcagcgtcttgcttaggatccgagacgagggggagaccggcatcagcatgactagtatcaaagcaatcttatttgacatgctcgccggcgggacggagaccacgtcgtcggccgcggagtggatcatgtcggagctgatgaggaacccggaggcaatggccaaggcgcaagccgaggtccgccgagtgctcgacggcaagagcccgcaagaccacgaagggcaaatggacaagctcagctacacgaggatggtggtgaaggagggcctgaggctgcacccggtgttccctctccttcttcctcgtctctgccgggagacgtgcgacgtcggcggcttcgaggtggcccagggcaccaaggtcatcgtcaacgcgtgggcgttggcgaggagccccgagcattggaagcatccggaggagttctggccggagagattcgccgacgacactagcgtcgccgcggcggcggactacgtagggtctcagtttgagtatatcccgttcgggagcggcaggaggatgtgccctggaaacacctttggcctcgccgcgctggagctcatggttgcgcggctgctctactacttcgactggagcctcccggatggaatgcggcctgacgagctggacatggacaccgtcgttggttcgaccatgcggagaagaaaccacctgcatctggttgcgtcaccgtgcaaggagatcgagagctgatgttggtgttgttctgatttactgaataaaagctgtcacttttgatatattgttatcattttcataaaaaatacacttcctcgatgcaccgatacaaaacggctaaaaggctgcaggaccatatatttttacaggcg

SEQ ID NO: 100251 - DNA, 1728 bp, Zea Mays
atggccatggagaacactgcgccatgcggtgacttcgggaagatcgtggccgatcttgagtctgagaacttggtggctaacgtctctgccgtgaatcaagcctcggcgttgattgctggaggtaaaatccctgaaccccagcttctgtgccgcctgatcgctggtcttgcttccaatctggagaagcctgaccatgactctgccatcaagaggtgtgtttcctttactctaaaggcaatcagggtggccgtcatcaagaaccgcatgaacatggattcctcagctcgtggtgaggctctccatgccatctggtgttgttttatggatcaaggccttcgccgtattcagcgtgattcaaatatggtgaggctgtggacagtccaggatcaattgtctgcagtcaaaatcatatgtactttcttccgtctctcaccggtaaacatcagtgacacaaggtgtgtcacagccttcgcctcactgatgttgtcaccgtacagcactgtggtgtgtgcatgtgcagatgccctgctctctttgccccctgttgttccaggattttcatttgccattgcaagagcctattgccatatgcttgcaacagtgtcaccacaatcaccacttgaggtaagcagcatggttgcgatgcttggtaggctgaagcaagtaagtacgaccatggtccaccacccaggggtttagtgaccttgctgtggatgtcctagcagctttatcaaattgcaatcttgctgttcgaaagaatcttctgaacctgatggtgaggctcctcactccaaggaacatcagtgctgtgctattgctccttgataatgagctgaatagggctgctaacatccatatcgagtaccacaagatgctagaggaggcgatcagagaatgccatgctgcttttccggggtgtattgtagaattcacactagatcccaagtacagtgtgttcattgatagtattctgtacatcatagacatcatgaatcccgaccagtcgttgcgaggcccacttctgaaaggtctactaagggcgctccggcatgtgaagtcaccactggtatgcgccgctgctgtttgggccatctcaatgttctctggatcactggaagaggtcagtgatgccattgttgcactttcatgcttcttcaaggacctgcttgatcgacgtaagattgagaagctgatacttggaggagaagcggagaatcaatacaagctttctactgactattatggtgtcactgccggagatgcaacacagggaaagcaccagcagccatggctgatggagatggaggaactgctgtttgtgcgcatagggctcacacggcaagcaggtgggagctatgccattccttcgagttccaagagcagtgctagttcttcaaacgcgtatcttcctgagccattgggtaatacagacaatctgatcttcctcgtgcattctggagatgccctcttggcagatttcgtggaaatcatgctgtctaacctcaagaagaaggtcaaagagctggagtgatgctgatgagttcatttgatgtaataatttggaggtcaaataactagaaatggagtcgttgaaccttggccaatcgtacctcaatatgcataataatgctgtcttctgtgtgcttattacttctattattactatattatcactgatactttttctattcaacattttgccatctatttgtgtgacttgtgtggtct

SEQ ID NO: 100252 - DNA, 2465 bp, Zea Mays
tgctgtccggtgctcctcgtcgggcgcttcgctgccgccttgcaattgcaacccacggcaaatgctgctcgacgatgagcgaggctagcaggagccacctcctcacctggatcgatggcggccgttcatctcggctaagatccaaatctcggcatcggcggcacccctcgactctccccacgcccctagccatcctaactgcgaccgtggatgaagatctcaaagaatcttggaggtgcagcgggatgacagcgtagggaggcccaatggtgtgatgtagcgagtcctaacggtgctcggatcggggcggatggcccccagtctcggcaggaggcttgtacaacatttgatcgatgagtcagtgggcctaaagaaaataaagcagcccaagatgatctccatcatgggaatccgtggctccggcaagaccgcacttgccacagaggtgcatgagaggcatcttagactatctccagcagcttacccatccccatacccatattcaaactctactctgcgaacagcgcaatctatagtacaaaacagtgcttttgggtaaactatgggtagactgctgcagacggtcttaggacagagaaattcaataactccggacacaatttggataaaatgatgatcaacatggtcaacttttcatctgacagctgcaacctaaaagaagacaaacgtcaaacgcgtgatatagaccacgcgctacacacagtatcaccaagcccaaaacataccaaaaaaagttgaaccaagtggttgagaattccccttttgctctcatggccatggagaacactgcgccatgcggtgacttcgggaagatcgtggccgatcttgagtctgagaacttggtggctaacgtctctgccgtgaatcaagcctcggcgttgattgctggaggtaaaatccctgaaccccagcttctgtgccgcctgatcgctggtcttgcttccaatctggagaagcctgaccatgactctgccatcaagaggtgtgtttcctttactctaaaggcaatcagggtggccgtcatcaagaaccgcatgaacatggattcctcagctcgtggtgaggctctccatgccatctggtgttgttttatggatcaaggccttcgccgtattcagcgtgattcaaatatggtgaggctgtggacagtccaggatcaattgtctgcagtcaaaatcatatgtactttcttccgtctctcaccggtaaacatcagtgacacaaggtgtgtcacagccttcgcctcactgatgttgtcaccgtacagcactgtggtgtgtgcatgtgcagatgccctgctctctttgccccctgttgttccaggattttcatttgccattgcaagagcctattgccatatgcttgcaacagtgtcaccacaatcaccacttgaggtaagcagcatggttgcgatgcttggtaggctgaagcaagtaagtacgaccatggtccaccacccaggggtttagtgaccttgctgtggatgtcctagcagctttatcaaattgcaatcttgctgttcgaaagaatcttctgaacctgatggtgaggctcctcactccaaggaacatcagtgctgtgctattgctccttgataatgagctgaatagggctgctaacatccatatcgagtaccacaagatgctagaggaggcgatcagagaatgccatgctgcttttccggggtgtattgtagaattcacactagatcccaagtacagtgtgttcattgatagtattctgtacatcatagacatcatgaatcccgaccagtcgttgcgaggcccacttctgaaaggtctactaagggcgctccggcatgtgaagtcaccactggtatgcgccgctgctgtttgggccatctcaatgttctctggatcactggaagaggtcagtgatgccattgttgcactttcatgcttcttcaaggacctgcttgatcgacgtaagattgagaagctgatacttggaggagaagcggagaatcaatacaagctttctactgactattatggtgtcactgccggagatgcaacacagggaaagcaccagcagccatggctgatggagatggaggaactgctgtttgtgcgcatagggctcacacggcaagcaggtgggagctatgccattccttcgagttccaagagcagtgctagttcttcaaacgcgtatcttcctgagccattgggtaatacagacaatctgatcttcctcgtgcattctggagatgccctcttggcagatttcgtggaaatcatgctgtctaacctcaagaagaaggtcaaagagctggagtgatgctgatgagttcatttgatgtaataatttggaggtcaaataactagaaatggagtcgttgaaccttggccaatcgtacctcaatatgcataataatgctgtcttctgtgtgcttattacttctattattactatattatcac

SEQ ID NO: 100253 - DNA, 380 bp, Zea Mays
tgctgtccggtgctcctcgtcgggcgcttcgctgccgccttgcaattgcaacccacggcaaatgctgctcgacgatgagcgaggctagcaggagccacctcctcacctggatcgatggcggccgttcatctcggctaagatccaaatctcggcatcggcggcacccctcgactctccccacgcccctagccatcctaactgcgaccgtggatgaagatctcaaagaatcttggaggtgcagcgggatgacagcgtagggaggcccaatggtgtgatgtagcgagtcctaacggtgctcggatcggggcggatggcccccagtctcggcaggaggtgagctcatggagtacctcccatcgctacagacccaatcccagtta

SEQ ID NO: 100254 - DNA, 478 bp, Zea Mays
ctgaaattttcaaatccttggcatgttatcttagaagggaggggtttggtccgtgatataaggattaaggtcgaggaaaaagttagcattcttcttatacatgctcagccataatgcctcatttgaatggtgatgatgcattgctgcttgttgctgacggccgcctgctactgcttgctacttctaccacgacaacaacgattgctgcttgctgctggccatgtgcgtgaggcctggtcatgcataaacaatggtgcatgtcatgaactctttaaccgtagggcatttcattgcattggatggattacttgtcctgtaatgaaacctgtaataatggtgcttctatgcgactgctgcaagacatcacttgtctgctctttcttgtgtaaactgaggacagttatatgttgttgataaaactatatgcatgaacagaagcctgaccgcttcctagcactaatgctatttcacttgtctg

SEQ ID NO: 100255 - DNA, 519 bp, Zea Mays
gtttgggctcactgttcctaggcccaattgttatgatctgctctcaatgtactcagatggtttaaaaggtttctatgaaatatgagttgacatcgaggaaattttctatagtattggtatagttgcatagctgctgctactaagctactcattgaagacttgagctatccatattgtactcctacttgcagcaagcatgaacggatagaccctgtgaagttaagtatatccacttttgaagcatggcaacagagtctgaaatgcaagcaaaatgcattaaagacagacaccctgttggctgcaaggttacctatagtttggttgcctcttgtcttcgttgggaaagctttggagttgatgtaaacacctttcgacatctttgctcccatgatagacggtgggatgtttcttgtaatgttgacagctatcaaactattatgatgcctcttgtaaatcttactgattgttgatcctgtctagtcttctatttttttttgtaaagtatagagtgcgctattg

SEQ ID NO: 100256 - DNA, 2066 bp, Zea Mays
atgggagagagcgtttccagtcgctgcgctgcgcgtcattctcctcccctccttccacccggcaaaaaccccgcgtcggccactctccggaggcgactagggtttcagcccctgggacacgccgccggtcgtggcacctccgccaccggatcccggtacccgagctacgccatcgccgccccgcccccggtcaccgccggtgcgcttccgccgacaccagacgcagctcgtccgccccgtcacgtgcacctctgcgtgggcgcgggattggatagggtttggggtttcggcggctggcgccaaatcccaccgctgctgctcgcgcaggaggtctcgagccctcggggttcccctactccgctccggctggagttctcgatgaaacttgttctacagtgttcttctgttgcatgactcagttgttttgagttatacttcataataacaatgcaaacacgaaaaaagggtgctgcaaaaaatgcagtggggtatcatgccaatcctaagacaagtaggccatccagaagggcaactcaatctacagttgctgaaaagaaagtatctgatctcatcacgtcttcttccaagaagcagagacctgttggtgtcacttccaagaagcattctaaaggaggaaggaagctgctagtttcatgtgatacaactgatgctggaaatgatgcacctcaggtaccccctagcgtcttccctgatctgcaggcccagcattctgatggtgttgcagatgatcgtcccaacgattccatattctctccaacataccatcatcacaaggaaggtggtgtgaataacctatccaaaggcttagaagaacaaacaacacatgttcatggtagtaaggaagctagcctaaaatctggttcaaaccttgcatgcaacactcatgatgggataaatgaccactctggcacactaaagttgcaatcagctgggcaaagcacattgcttgaagtggatgagtacagtgaactgggaaacctttcctcagaagtatcagcaatatatcttgctatgcagcagtctaagttggagtgcattgatgaacagagtcaagattctacctcaacagaaggttatggtgaagctgaggagactgaagagtatgatgattttgacccctactcctttatcaaagatttacctgatttatctatggtggtccccaagtttcgtcctgttctccttccaaagcagacccggagttgtcctacgatgactcttgtacttgatcttgatgagacacttgtacattcaactcttgaacactgtgaggatgctgatttcacatttccagttcattttaacttcagagagcacacaatatatgttcgatgccgcccctatctcaaggaattcttggatagggttgccagcgtgtttgagacaattattttcactgctagtcaaagcatttatgcggagcaacttctcaatgttcttgatcccaaaagaaagttgttccgtcatcgtgtttatcgtgaatcttgtgtctatgtggagggaaactacatgaaggatctgacagtacttggacgtgacttaactcgcgtaatgattgttgacaattctccgcaggcctttgggttccagttggacaatggcattcctatagaaagctggtttgatgatcccaatgacatggagctgctgaaattgctcccgttcttagaaagcttggtcggcgttgaagatgtcaggccttatatagcaaggaagttcaacctaagggagaaggtagccaccgcatcttctcttacaatagacatgcagatgtgatccgtccaatgctgccaggtatttttcaggtgccaaaggtcgccgtgatgataaatgtaggaccggagctgatatagtggttcttgttgaatgtagcatgtcaggatctcctggctccttgcattattgtatgctctaccgaccgcaatgtacaattttcgctgcagttggcagttgtagacttcacttgcattttgttggcccagttgacatgggaagggcctacttgaacattttgtcgatcagttaatatcgtgttgattcatata

SEQ ID NO: 100257 - DNA, 224 bp, Zea Mays
accgcatcttctcttacaatagacatgcagatgtgatccgtccaatgctgccagcatgtcaggatctcctggctccttgcattattgtatgctctaccgaccgcaatgtacaattttcgctgcagttggcagttgtagacttcacttgcattttgttggcccagttgacatgggaagggcctacttgaacattttgtcgatcagttaatatcgtgttgattcat

SEQ ID NO: 100258 - DNA, 1165 bp, Zea Mays
acaagcaagcactgatctaattttgttgtcttagtacaattttcttgcagctatgggctggtatgtgttataacaagataaactccagtgctccacatgttggctaaatctagcagaacagaaggcgatattatttttgcaggctgatgtatttgtacgatgaatatatcactatcatggtatttcagaactcagattcatcatggatgtagatcttggttatttatgtaaactagattgtttgctgtatggtagtaatctagcacttagtagtaccgaaacttccctagaaccatgctttggtccacaatgttggatttatttctctttctcttgtctaggttctattactactgccagtttgatataagttttaaagtatcattcatttcttatattgatgttaatttcatgtttgtcttgctacaatgtagagacacttgtacattcaactcttgaacactgtgaggatgctgatttcacatttccagttcattttaacttcagagagcacacaatatatgttcgatgccgcccctatctcaaggaattcttggatagggttgccagcgtgtttgagacaattattttcactgctagtcaaagcatttatgcggagcaacttctcaatgttcttgatcccaaaagaaagttgttccgtcatcgtgtttatcgtgaatcttgtgtctatgtggagggaaactacatgaaggatctgacagtacttggacgtgacttaactcgcgtaatgattgttgacaattctccgcaggcctttgggttccagttggacaatggcattcctatagaaagctggtttgatgatcccaatgacatggagctgctgaaattgctcccgttcttagaaagcttggtcggcgttgaagatgtcaggccttatatagcaaggaagttcaacctaagggagaaggtatttttcaggtgccaaaggtcgccgtgatgataaatgtaggaccggagctgatatagtggttcttgttgaatgtagcatgtcaggatctcctggctccttgcattattgtatgctctaccgaccgcaatgtacaattttcgctgcagttggcagttgtagacttcacttgcattttgttggcccagttgacatgggaagggcctacttgaacattttgtcgatcagttaata

SEQ ID NO: 100259 - DNA, 1951 bp, Zea Mays
gctgcgcgtcattctcctcccctccttccacccggcaaaaaccccgcgtcggccactctccggaggcgactagggtttcagcccctgggacacgccgccggtcgtggcacctccgccaccggatcccggtacccgagctacgccatcgccgccccgcccccggtcaccgccggtgcgcttccgccgacaccagacgcagctcgtccgccccgtcacgtgcacctctgcgtgggcgcgggattggatagggtttggggtttcggcggctggcgccaaatcccaccgctgctgctcgcgcaggaggtctcgagccctcggggttcccctactccgctccggctggagttctcgatgaaacttgttctacagtgttcttctgttgcatgactcagttgttttgagttatacttcataataacaatgcaaacacgaaaaaagggtgctgcaaaaaatgcagtggggtatcatgccaatcctaagacaagtaggccatccagaagggcaactcaatctacagttgctgaaaagaaagtatctgatctcatcacgtcttcttccaagaagcagagacctgttggtgtcacttccaagaagcattctaaaggaggaaggaagctgctagtttcatgtgatacaactgatgctggaaatgatgcacctcaggtaccccctagcgtcttccctgatctgcaggcccagcattctgatggtgttgcagatgatcgtcccaacgattccatattctctccaacataccatcatcacaaggaaggtggtgtgaataacctatccaaaggcttagaagaacaaacaacacatgttcatggtagtaaggaagctagcctaaaatctggttcaaaccttgcatgcaacactcatgatgggataaatgaccactctggcacactaaagttgcaatcagctgggcaaagcacattgcttgaagtggatgagtacagtgaactgggaaacctttcctcagaagtatcagcaatatatcttgctatgcagcagtctaagttggagtgcattgatgaacagagtcaagattctacctcaacagaaggttatggtgaagctgaggagactgaagagtatgatgattttgacccctactcctttatcaaagatttacctgatttatctatggtggtccccaagtttcgtcctgttctccttccaaagcagacccggagttgtcctacgatgactcttgtacttgatcttgatgagacacttgtacattcaactcttgaacactgtgaggatgctgatttcacatttccagttcattttaacttcagagagcacacaatatatgttcgatgccgcccctatctcaaggaattcttggatagggttgccagcgtgtttgagacaattattttcactgctagtcaaagcatttatgcggagcaacttctcaatgttcttgatcccaaaagaaagttgttccgtcatcgtgtttatcgtgaatcttgtgtctatgtggagggaaactacatgaaggatctgacagtacttggacgtgacttaactcgcgtaatgattgttgacaattctccgcaggcctttgggttccagttggacaatggcattcctatagaaagctggtttgatgatcccaatgacatggagctgctgaaattgctcccgttcttagaaagcttggtcggcgttgaagatgtcaggccttatatagcaaggaagttcaacctaagggagaaggtgccaaaggtcgccgtgatgataaatgtaggaccggagctgatatagtggttcttgttgaatgtagcatgtcaggatctcctggctccttgcattattgtatgctctaccgaccgcaatgtacaattttcgctgcagttggcagttgtagacttcacttgcattttgttggcccagttgacatgggaagggcctacttgaacattttgtcgatcagttaata

SEQ ID NO: 100260 - DNA, 894 bp, Zea Mays
atgggagagagcgtttccagtcgctgcgctgcgcgtcattctcctcccctccttccacccggcaaaaaccccgcgtcggccactctccggaggcgactagggtttcagcccctgggacacgccgccggtcgtggcacctccgccaccggatcccggtacccgagctacgccatcgccgccccgcccccggtcaccgccggtgcgcttccgccgacaccagacgcagctcgtccgccccgtcacgtgcacctctgcgtgggcgcgggattggatagggtttggggtttcggcggctggcgccaaatcccaccgctgctgctcgcgcaggaggtctcgagccctcggggttcccctactccgctccggctggagttctcgatgaaacttgttctacagtgttcttctgttgcatgactcagttgttttgagttatacttcataataacaatgcaaacacgaaaaaagggtgctgcaaaaaatgcagtggggtatcatgccaatcctaagacaagtaggccatccagaagggcaactcaatctacagttgctgaaaagaaagtatctgatctcatcacgtcttcttccaagaagcagagacctgttggtgtcacttccaagaagcattctaaaggaggaaggaagctgctagtttcatgtgatacaactgatgctggaaatgatgcacctcaggtaccccctagcgtcttccctgatctgcaggtacagttcttggctaaatttagtttgaagttacttatcctttctttttgctgtatttctatctgtggtgttaatttcttccaatcaaaactgaaggtgctgtggtgggctgtagtgaacagtacccacgggtactgtagcaccacgggtagtcgggtactgagagaagggatt

SEQ ID NO: 100261 - DNA, 570 bp, Zea Mays
atggcgaatggcctggtggtgctccaaggtgtcggccttggtgaacacctcgccgcactgcgggcacgcgcacagctccctcggcctcgggtaccacctcgacatgggctccacgttgatggcgcggcactcgtagcagccggagaggccccgcagggaggagtggtggctgctgccggcgccggcagacgacgacgaggcgccgcggtgcgcgcgccggcggttcagcggtgccgtgtcgcggtcgcccgacgcggacgcggacgcggcggcggacgacgccgcggaggaggcggcgtcgaccacgtcgcgcatggcgcagagcgaggcgccgcacgtccccgcgccgctgccgcggagccgcgccagcgccgacggagccgctgggtcgtgcacgcgcgccgccgccgtcacgctccggcagctcagcaggctcttcacctgctcccagtcccaggacgccgccgcagtggccttcttcttcgtcgcctggcctcggtgctgctggtactgggcgcggctgttcttgcccgccgcgggggccttggggcttttcttcctgggagatga

SEQ ID NO: 100262 - DNA, 2619 bp, Zea Mays
aggagtgtatcactgagggaagaagtgaagcggaatatagacgccgtcgacaatgggagagagccgcggcagcatcgcctttttcgccacctaccggccaccagtgccgctagacatcttctccgtgcccatcccgccgtcttcgatccgcgacgaggtacacctcacggacggcgtctcctacaactacaactgccgccccatccccaaggacgcgctcaagtccctgctcaagcgccccaagctcgctgccgacggcggcgccaccgacgccgacgtcgacagcggccgcgtctccggccttctcttcgtctccgagcgggacgatggccttgagacgctccgcgtggccctgcatttcaaagactccggcgagcaggcctgcaaggtgttctccctggctgacgtcttcggcgccgccgacttcagcggcgtgcgcctcgaggatagcggctgcgtcggcggcggctacaaggtgggctctcgcaccgtggaccactcgctcatctacgtttccaccaaggagccggtgcaagagcgacgcagcccgtggaccgtcgtgtacaagaccaaccttaggaccggcaagaccgagcgtttgactcccaaaggtcaatttgatctgagcccagctgtgtcgccgtcggggaagaaggtggccatggccacgttccggccggagggctgggagggcgagatcgaggacctgcagactgatatcttcgtgatgaacgtggagaggccgccgatgcggaaacggctgattaggaacggcgggtggccgtcgtgggccagcgaggacgtcatcttcttccacaggaaggtgggcgagacctggggagtcttccgccacgacacgaggacgaacgagacggtgcgggtgacgccggaggccttcgacgcgatgacgccggcagccatcagcgacaccaaggttgcggtagcgaccattcggcagaagtccaagttcagcgacgtccgcgtggaggcgcagtaccgccacatcgagatcttcgacacggcggccgcggcggggcagccgtcggtgcaggtgacccagaagacgaggcccaaggcggaccacttcaaccccttcgtcctggacgacggcgtccgcgtcggctaccaccgcgccaggagcgacctcgtgaaacccggcgacgacgtgctctcgcggaacttcgacaagattgagtcgccggtgaaggacgtgggactgttccgggtgtctggcgtgttcccaaccatctccaaggacgggtcgaagctggcgttcgtggacaacgagttcaaggcggtgtgggtcgccgacagccagggtctgcgcgtggtgtacgagaccaagggccccgacaacattttctcgccgatgtggaaccagaaccccgacaaggacatcctgtacgtgtgcatgggcccctccttcaacgccggcaagccgctggagatctgcgccatccccaacgtgtccagcggcgcgcggcagcgccgacagctcaccaagggcaagttcaacaacgctttcccgtcgagcagccccgacgggaacaggttcgtgttccggtcgaccagggacggcggcgacaagaagcacaagaacctgtacatcgcggagaacgcggaggtgggcgagtatggcgacggcacggtgacgcggctgaccaacggggagtggacggacacgcactgccagtggtcgcccagcggggactggatcgtcttctcgtcaacgcgggacaaacccaaggacgcaccggaactggacaacggcctggatccgggctacttcgcggtgttcatggtgaaggcgagcgacccgacggtggtgatccgggtgatacggagcggcgacgacctcggtgggcacgtgaaccacccggtgttcagcccggacggcaggagcatcgtcgtgacgtccgacctcgccgctgtgtcggccgaccccatctcgctgccgctcttcatccactccgtgcggccctacggcgacatcttcgtggtggacatcgacccggaggatgcgagcaagaacaaggacgtgaagaagttccaccgggtcacgcacagccgctacgagtactcgacgccgacgtggacggtgtttgccacggatgatcccaacgcgcagtggaacatgctggtgaagaaagactcgtacacgccggcgtgcccctacgcgtacccggacggcggcgagagctggcacatgaccgggcacctctgcatccctaggaggtgctgctgattgtgtcattggattttggattgcatcctccttcgtcgtcacgagcagctaccagctactgcgaccttccatcagtaataaaccactagggaattagcagggctcttgttgcacctgatgatgacatcagcggagccctgcctctctggtctctgccatatgggtttgtacggttccattcatgtcactacttttccaccacctagctcattctcgctctcaaggctatatccagcggtcttcgtattctacctccgactctgtatttcaaataccattttataaataatgcagtctaccgtgtaaaacagtgatttacacgaccatatatgttgtactgagcatggcctatgtcacacgatattgactgatct

SEQ ID NO: 100263 - DNA, 139 bp, Zea Mays
ttgcctttccgattcccccctccccgcacagtccattctcatgttcggtaatcattccctgtttcctttctcattcccccctccccacaaagaccattcccattcccacgtatatcccacgcctagctaaaatttaatt

SEQ ID NO: 100264 - DNA, 172 bp, Zea Mays
atgaggctccatgtggcgaggcgatgtctagttagcacggatcggactatgactggaggacctcacctattgatcctcaggctatgtatgcaagttgtggaaaaggtcatggaaggtgcagattctacatatcttatattgttttcattgattgagtacaatacatgtattt

SEQ ID NO: 100265 - DNA, 1800 bp, Zea Mays
ttacatcgcattaattggctcccttgttgatgagcttctcgatggcctgcagcgcctcgacggcggcccggatgtagaaggtgatggggccgaccaatggcgcgagcgggttggcggcgacctcctcttcctcgtccttgtccgccgaaggcagcggcgcagccgggtcctcgtcgaacttcttggcctgctccaggtacttgtccatgcgcggcgtcgagaagaggcgattgctctcgatgtcgcccctcgccgcgaaccgctgcctgtcgtgcgacgtctccgacgacatggcgtagggccggccctgcttctcgtacacgtcctgcgacttcatcagcttcagtagctcctgcagctccgtcctgagggcgtccagcagcgggtcggactgcgccaccacgtcctccagcgcgttctgggcctccgccagcttgtcccgcgcgtcgcccagcttcttgccgtccgccatcgtcctcgcctgctggatcatcgtcgccgtcttcagccgggcctcctccgtctgcacgtccactggcggatcatccgccgggaaagccgtgccgctgcgccgcaccgtcaccgtggcgggcggcgcgtcgaacagctttcctgccgtcttgtacgagtaggtcacctccaggatgtccgcgccacggtcgctgtcgatggcggggaggaggagatcaacgatcacctttcgcacctccttgctgtagaggtcgccgaaggccacggtgaccgagccggcgtctgcgtccggcgtctgcgggtagttcccggcggccaccttctgtagggtggactcatcctcgatgcgcgccaccgtgacggtgaggtcctgcacaaccacggtgagcaggccggcgaggcactgggagaaggccatgctcagcaagttcacgtcgttgacgacggagaaggtccctcccatgctgttcctggccaccgcgttcagcaccgtggggtcgtagtccgcgccgaacccgaaggtgtacaccggcacgttgccgatcttgacgttggcggctggctcgccccggttctgctggccgtcggacatgagcatgacgccaacgacgcgaccggagctgagcttgcggtcggcgaggaccttgagccccgtctggaggccgtcgctgatgttggtgttgccgccgggctggagggcgtcgatgagcttcagcagctgcggctgggagtcctcggtcacctgccgcagcgggcagatcctgttggcggtgtccaggaaggtgacgatggagaggcggtcgatggagctgagcttcttcaccacgaacttcatggcagtcttcatcttctcgatcttctcgccctgcatgctgccgctcacgtccagcacggccaccaggtcaagccccgaccggtcgctggtggagtcgccgccggtcagctcaagcagcaccttctgggtattctcctccagtggagccatgttgttgttcttgctcaccagctgcaccctcccgggcacgatcggcgtcggcctcggccctgcatctcaccattcccatctccattgttaatatttcagccgcatatatggatgtaaacgcattctcttcttgcttctccatcgatatatatcagcaatgcaacgcaaactaaatcgattcaaagcaaaaatgatttggttcaatttttattcgtgttcacgaatgaacctgagtttggagaagggatgatcggttcgtcatcgctgaaggacatggcgaccgagacgaaaaagactagtgctgtagaattgggctacctcgcaaccccgttctatgacttgac

SEQ ID NO: 100266 - DNA, 621 bp, Zea Mays
tcgccgtagcccctgccgttgacaggagagctcatcgtagctgagcagcgcgcgcaccagagatagggacgagcaggaggaggatccacccgtgcctgccagtcgttggagcctgtgcacgccagagacagggaggagaaggagagacacactcaagcagggatggtggagcaggccaccgccggagaagagggctagggagtgcgccgcgccggagaacaatcaggccacgctgctagagatccgcctgcattgcgcacgccttggacccacgcgccgcgtacaccgaggtcggcccgtgctgccgcatgctgagatctacgcgcgtcgcgctcgccggggatccgcctgcacacacctgggattcgccgtgcagcacacgtcggagacccgtccgcgccgcgccgcctgggacacccgcgccgttccccttgggacccgcccgcatcgctgcgtgccggagaagggcccaccctcgttgcacgccggtgaaggttgttgaaactgccgcacgcgaagaagggagaggtggagagcgatggaccagccgctgccagcgaacctggaagcgtgctcgcgtgtgattcgatttgggaagagaattacggatgaaaacgggac

SEQ ID NO: 100267 - DNA, 604 bp, Zea Mays
tcgccgtagcccctgccgttgacaggagagctcatcgtagctgagcagcgcgcgcaccagagatagggacgagcaggaggaggatccacccgtgcctgccagtcgttggagcctgtgcacgccagagacagggaggagaaggagagacacactcaagcagggatggtggagcaggccaccgccggagaagagggctagggagtgcgccgcgccggagaacaatcaggccacgctgctagagatccgcctgcattgcgcacgccttggacccacgcgccgcgtacaccgaggtcggcccgtgctgccgcatgctgagatctacgcgcgtcgcgctcgccggggatccgcctgcacacacctgggattcgccgtgcagcacacgtcggagacccgtccgcgccgcgccgcctgggacacccgcgccgttccccttgggacccgcccgcatcgctgcgtgccggagaagggcccaccctcgttgcacgccggtgaaggttgttgaaactgccgcacgcgaagaagggagaggtggagagcgatggaccagccgctgccagcgaacctggaagcgtgctcgcgtgtgattcgatttgggaagagaatt

SEQ ID NO: 100268 - DNA, 612 bp, Zea Mays
atgggataccctaggtccagcacaacaatactaattcaaaaaagacctagtgctgacggctcccacatgagtgggatattgggaagtataaaccgaggcaagccttcccccatgcaattttggagaggctgcatcgaaatcccaacaatagtaataatctgtaaaaagaataacagtagccagtatccacctgtcttcttccacgcgactgcgctaagggtactcgaggaaactcccaacagggcaagtcagatctgtggcagtttggtgccagtgggctgcccccagccaggcccacgaccaccctcagtccatgtgtcgttgtctcaaaactccagatcaccgcaactcgccaccaccgcacagtcagcgctcgcggaaccacaggagccagcccctgcggtattggcatgccaccaccagctcagccagcagtcgtcccagtcccgtgccaccgtctccaactctgctctggtaccgcgagccactatccaacggagtgagaaattgaggttcgacaagacatctggcattctgggtctcaaaatctcgaacccaaactttaaaaagtgcagacccagtgctagagactcgcacatgagtggggtctag

SEQ ID NO: 100269 - DNA, 980 bp, Zea Mays
atgaagccggcggcgcggcggccgctgctgctgtgcgcgctggcggcggcggcggcgctctccatcctgctggtcgcgccgccgcctctcgccgcgcacctatcatcactgctcctcgccttcccggcgtcgccctacgcgggcgggcccaagctggtggtcctcctcgccggccagtccaatatggcaggccgcggcctcgcgccgtcgctgctcccgccgcagtttcgcccgcacccgcgcgtgctccgcctcgccgcgtcccgccgctgggtcgtcgccgccccgccgctccacgccgacatcgacacccacaaggcgtgcggtctcggtcccgccatgcccttcgcccaccgtctcctccacgctgcctccccggacctcgtcctgggcctcgtgccctgcgccgtcggcggcaccaggatctggatgtgggccaagggggagcctctctacgaggccgccgtcgcccgggggcgcgccgctgttgccgccggcggaggcaccctcggcgccgtgctctggttccagggggagagcgacaccatcgagctcgacgacgccacggcctacggcggcaggatggagcgcctcgtcaacgatttcagggctgatctcggcatgccgaatctgctcgtcatacaggttggtcttgcatcaggagaggggaattacactgatatcgtcagggaggctcagagaaacatcaagcttcctaacgtagttcttgtagacgcgataggattgcccctccgcgacgaccaactacacctctccacagaagcccaactccggctgggtgacatgctcggacaagcctttttgaaatttaactcgtccatggattcgagacaatgacatcgatattataccggtactggacctgttgttgggtgtagagctaaatgacaaataccattcttttggaatgttccattgtaaagtgtagagcattgtacaagaggagtgagttctgtcca

SEQ ID NO: 100270 - DNA, 1530 bp, Zea Mays
atggccatgaaccacgctggccatccaggaccaaatcatgagagtttctcacggcaccacctatcttgctcaccacaaaacagtaagccaaggtgtaatcttagcttcaggccacgagccgaaaggattgaaggtggatggaatgaagatggaaaggggccaagctcatgggattacttctgccacaattttccagagtggatattagacaagagcaatggggatgttgcagcagattcgtaccatatgtaccctgaggatgtcagattgctgaaggaaatagggatggacgcctataggttctccatctcttggtccagaatactgccgaatgggacgctcgaagggggtattaatccagatggcatcaagtactacaaaaatctcatcaatttgttgttagagaacggaatagaaccgtttgtaacccttttccactgggacacacctcaagcactgatggacaagtacggcggttttttagataagagtattgtaaaagactatacagacttcgccaaggtgtgctttgacaacttcggtgacaaagtaaagaactggtttacctttaatgagcccgagactttttgtaccttttcgcacggaactggacaatgcgccccagggcggtgctcccctgggataatcactccaacgggatccacaagttgtgctaacccaattggaaactcgctcactgagccatacattgttggccacaaccttctccgagcccacgccgaggttgttgatctttacaacaagcattacaagatagattacaagggtgagaatggacgcatagggattgtatttgacgtgatgggccgtgtgccattcgaaaaatcggcgtttattgatcaacaggccgaagaaaggtcctgggacatcaacctaggatggttcttggagccggttgtccgtggagactatccattctccatgaggtcgttggtaagggaccgactacccttcttcactaacgaggagcgagagaagctagtgggctcctatgacatgctggggttaaactactacacctcaaggttctccaaacacatcgatatcacgcaacacaacacgctaaggctcaacactgacgatgcatatgccagtcaggaaacgaaagggcctgatggcgagcccattggtcctccgatggggaattggatctacctgtatcctcaaggcctaaaggatctccttaagatcatgaaggagaaatacggaaacccacccatgtacatcactgagaacgggatggctgaagttgaccttggccataacttgaatgaccagaaaagaatagattacctccagagccacttggcagctcttcaggactcagtggagtcgggagcaaatgtgaagggctacttcctttggtctctgctggacaacttcgaatggttctgcggctacacccaaccttacggcatcgtctatgtggaccgcaacgatggctgcaagcgctacatgaagcagtcagccaagtggtacaaaagcttcatcgctgcgaatgataaatga

SEQ ID NO: 100271 - DNA, 414 bp, Zea Mays
atggcgagccgctgccaccgcgcagtctggctggtgcctagtggccagccaatgaatggtcgagcagcccggcggcaagggcccctgcgcgcggtcgcagccagcgttgccggcgtgcctgtcaggccccgcgcccctttccctggccggcagaaccgcctcgccgtgagtggctctgctgttgtcgtccgcctcgccgtgagtggctctgctgttgccgtccgcctcgccgtgagtggctctgctattgccgtcgttcaacagagaagaagtcaaaacaggaaacctgcatgcgcgatacttctcccatgggccccacctgcatgcgcaatacttcttccgtgcatgtgctttttccagccatatgaacccacgaactccttgcatgtggctagaaaagtgctcccatattag

SEQ ID NO: 100272 - DNA, 252 bp, Zea Mays
atggtgagccgctgccatcgcgcagtctggctggtgcctagtggccagccaatgaatggtcgagcagcccggcggcaagggcccctgcgcgcggtcgcagccagcgttgccggcgtgcctgtcaggccccgcgcccctttccctggccggcagaaccgcctcgccgtgagtggctctgctgttgccgtccgcctcgccccatatgaacccacgaactccttgcatgtggctagaaaagtgctcccatattag

SEQ ID NO: 100273 - DNA, 591 bp, Zea Mays
atggcggcagaagcgggattcggatttccgttggcgagatccgtgggggggggaaggatggccgcgccgagcgcggaatccgcgggtggttgtggatctcaacggaatcccgagctctcgccccgtccgttacgcgcgcgagctcggcttcagatacagcgcagaggagtccagcttgcgggcgagtgggaggttgttgcgctagctgaggcaaggaaaccgcgagctcgcggattaggaggcggtggattcgttgattcggttacgaggagaaaactagacatagcaaaaagctccaagcagcacgtggatggtctcaaagctgcccttgtgcttctccctgttcttgatgactcctacacgctcggtgttcctcccgccagtcaccatgaccacgttgctgacgtcaaacttgatgaagtccatgattttgttggtctccagatcgatcttgatggtgtcgatggccttgatgagcgggtcggggtagcgggagataagtcattggttaaaaacttgatgaagaccatagcaaaaagctccaagaagttccatatgccacaaagtctttacaaatatgtaacaatgtag

SEQ ID NO: 100274 - DNA, 120 bp, Zea Mays
tgtgtaaggtggacagtggtttattatacattacacgtacaagcggttcatgattacaaagaagacgtacagactctctccctgttggtgcatgggaggtttattcagcaggtactatac

SEQ ID NO: 100275 - DNA, 646 bp, Zea Mays
gagtgaaaatgatgttgcacaacataatgctcctgcatatcaagaaaatgagtgttgtgaagagaatgctagtcgacaagcagtttccgataatatatatgagaagcctttaagtagagatgatgaacaaggtcttatttttgaagctgctgaaattgctcaattggtacaagaaaatggccaaaaagtgtatgggagtgatagtgaagaagaagatgatgacgatacaattttggagtattgcagcgaagccgaagaaggtgctacaaatgatgttgacagtgatgacgaatagctgatactactgatatttagttgtgaaatgacacttgtaatatttatttggataggctgtagtattttctgccatttaattgtgaatgtaacttgaaatatttatttggatggaccatgttcaattcagatcatggttttatgaataatggtcatgttgagttcagatcttgttattttgctgcttctatcgtgccctcctctgatgcttctatcgtgccctcctctgttggtcttgctatggtagagccctccgaccttgctttggtgctgccctccattgctgcctcgtcaaggttatattcatctaaaatatactttattttttcaagtttctaaaattcacatgatt

SEQ ID NO: 100276 - DNA, 2848 bp, Zea Mays
cgaaaccaagcaacaattgagtgatcgatccatcacctctctctctctttcagcaaatctatccgcgacaactaagcattcgattctccgacaacaacaagcagggtaatggcgtctgcggacgtgcacatggctggcggtgcggagacggagaccttcgcattccaggccgagatcaaccagctgctctccctcatcatcaacaccttctactcgaacaaggagatcttcctcagagagctcatctccaacgcatcggatgcgcttgacaagatccgcttcgagagcctgacggacaagtcgaagctggacgcgcagccggagctcttcatccggctcgtcccggacaaggccagcaagacgctgtccatcatcgactccggcgtgggcatgaccaagtccgacctggtcaacaacctcggcaccatcgcgcggtcgggcaccaaggagttcatggaggcgcttgccgcgggcgccaccgacgtgtcgatgatcggccagttcggcgtcggcttctactccgcctacctcgtcgcggacagggtcatggtcaccaccaagcacaacgacgacgagcagtacgtgtgggagtcccaggccggcgggtccttcaccgtcacgcatgacaccacgggggagcgactcggccggggcaccaagatcacgctcttcctcaaggacgaccagctcgagtacctggaggagcgccgcctcaaggacctcgtcaagaagcactcggagttcatcagctaccccatctacctgtggacggagaagaccaccgagaaggagatcagtgacgacgaggaggaggacaacaagaaggaggaggagggcgacgtcgaggaggtggacgacgaggacaaggacgccaaggataagagcaaaaagaagaagaaggtgaaggaggtgagccacgagtgggtgcagatcaacaagcagaagcccatctggctccgcaagcccgaggagatcacgcgcgaggagtacgcctccttctacaagtctctgaccaacgactgggaggaccacctcgccgtgaagcacttctcggtggaggggcagctggagttcaaggccatcctgttcgtgccccgccgcgcgcccttcgacctgttcgacacgcgcaagaagctcaacaacatcaagctctacgtccgccgcgtcttcatcatggacaactgcgaggagctcatcccggagtggctgggcttcgtgaagggcgtggtggactcggatgacctgccgctcaacatctcccgcgagacgctgcagcagaacaagatcctcaaggtcatccgcaagaacctggtcaagaagtgcatcgagatgttcttcgagatcgcggagaacaaggacgactacgccaagttctacgacgccttctccaagaacatcaagctgggcatccacgaggactcgcagaaccgcgccaagctcgccgacctcctgcgctaccactccaccaagagcggcgacgagacgacgagcctcaaggactacgtgacgcgcatgaaggaggggcagaaggacatctactacatcaccggcgagagcaggaaggccgtggagaactcgccgttcctggagcgtctcaagaagaagggctacgaggtgctgttcatggtggacgccatcgacgagtacgccgtggggcagcttaaggagtacgacggcaagaagctggtgtcggcaaccaaggagggcctgaagctggacgacgaggacgacgaggaggccaagaagcggcgggaggagcgcaagaagcggttcgaggagctgtgcaaggtgatcaaggacatcctgggcgaccgcgtcgagaaggtggtggtgtcggaccgcatcgtcgactcgccgtgctgcctggtgacgggcgagtacgggtggaccgccaacatggaacggatcatgaaggcgcaggcactacgggacagcagcatgagcgcgtacatgtcctccaagaagaccatggagatcaacccggacaacggcatcatggaggagctccggaagcgcgccgaggccgaccgaaacgacaagtccgtcaaggacctcgtgctgctgctcttcgagacggcgctgctcacctcggggttcagcctcgacgaccccaacacgttcgcggccaggatccacaggatgctcaagctcggcctcaacatcgacgaggacgctgctgccgacgaggacgccgacatgcccgcgcttgacgagggcgccgccgaggagagcaagatggaggaggtcgactgaggtgtccttctttcctatatatgcaagttctcagcgatgagggacgacggtcaatggcgatgcctgtttgtgtgtgtctgcgtgtgggtccaaaggggacactgttggtacaggtcacagtagtgtctagtagtaccttgattgccaggaggcaggaccgtgtgtcttcttcgtgtcacatttcgggtctgctctgagtgtcgtggaatcctgtgaaacatataatacatccgatccgagtccttagcttccctcataaaggagaaaaagaaaacaaaacaagttattagtcggtgtatgaataaggatatatacggtggtatatggccacaaaaggtgggagaaaagcacccgtgaagctcaacagatgcccaagttgacgtggccacaagcactgaagtttattaggattaatatttattttgattaaatcaatttctattttctagagtaggttagttttatgcttggtcacataaactataatgagagtttgtttagatttttataaagtcaattcctatttttgagaaaacctggttgtagatggattataaaaacattatgataagaactcacggttatcgttttctcc

SEQ ID NO: 100277 - DNA, 117 bp, Zea Mays
gtaaattcaattaaaagaacaaaatctaatagttatagcaaatacttttataattgtgccaaaatggaacatgtaagtctaaatagtgtaggaacataccacaaaaattttggttgg

SEQ ID NO: 100278 - DNA, 1102 bp, Zea Mays
atggacgcgcggtggtggatgggtgaggagtggggcgcgtggccagatgaggccgtgaggagcaagggcgcgctggtggcttggaatcgggagtggtggtgtcttggcggctgcgagctcaggagcaggacgccggcaggtgaggagcacggcgcgccgggggctgaggtgtggggagcgctggcgggtgggcagcagggcacgccggcggattggaatcgggagtggaggcgcaccggcggctgcgatctcgggagcggaggcagggatatgtccacgcgccctttgcggtcgctgacgaaggataagaccccttgtgttggattgagatcaatcaccaaagaagggcgtgaacaagggaagagatttggtgtggaacagtatgagatgcgaaccttctcaaaggaccgagagaagcttgagaatctgaaacttggggaaggcgtaaagggtgtgtatgtctcagttgatgtggactgccttgacccagcgtttgctcctggggtctctcacatcgaacctggaggcctctccttccgcaatgtcctcaacatcctccagaatttgcagggtgacgttgtcgccgctgatgtggtggagttcaacccacagcgtgacacggtagatgggatgacagccatggtcgccgcgaagctggttcgggagctcactgctaagatctccaagtgaaacggtcaggattgcaccactcttcttgaagcaaagcgaaagggtgggttttgatgtcccggtggttattggtcatggtttctatgtatcgagcaccaaattgttcgacatgtgacaggtttatatgttaattaggttgcaataacaccataatggtttatttatgctggattctgaaatctaatctgccggattctagattaagggctagtttgggaacctcaatttcccaagggttttctattttcccatgggaaaatgaactaatttcccttgggaaaatagaaatcccttggagaattggggttcccaaactagccctaaaggatccgattgtcagggatttctcgaacttggatttgattagtgagctggaatgactaaattatggttgatgcagtacataccatta

SEQ ID NO: 100279 - DNA, 1374 bp, Zea Mays
ggtgtagcaacataaaagcactttacgataatgtgtttgatatattggccgtggaaaaagtgaaaataaaaatagataaaaccctttacctcctccccgctcagagaccatcgcggagagaaaccccaaacccccaaatcttgtcgactccaacgatgccgccgccgccgacgagcgccccgcattctctcgctgctgacgatttccacacctcggacacggctgccgccgcggccggggctgtggtgccatgcgcggcgtcccagccggggaccaacggcggcaagaagcctgcgttcgcgttcgggcgggtgtggtcggaggcggacgaagttcgcatcctcgagggcctcgcggcgtacgccgcggcccacggcgcagaaccgcgccggtcccagctccacgccgcgctcggcggctgcggcctggacaagtccgagttcaccgtcacggagatctacgagaaggtgcggcggctccggaccaagtacgcgaaccggcgctccgccgggggcgtgccggtgcctgcagctgcaggtggggctggtgacggcgatgaggcgcgcaagtacgagctgtcgaggtcgatttggggcgacctgccgctcaagaaagtaggcgccagccacgccaccaacgccagtggtaatggcaatggcaatgccaatgccaatgcggctccgggcacacgggcacgcagagggatcgaggagctgcagggcctgtaccccagccttgcctcggcagttgaggggatcacggacaacgagtcgctgcggccagtgctcaagagggccttccaacttatcagcgacgaacgagcacgtcagttggatgccaaagtgaagaagcagagggatatggaggcgcagatggcggtgaaagtgactgcactgaggaacgaggtacttgacacccttaccggatccatggattgcttcatcaatgatgttaagtatgaggggtaaggtctacatgtctttttgtgagaaatgaactccggaccggaggaattaatcatgttttaaggctagtttggaaaccatattatcccatgggtttttcattttcccaaaggaaattagttcattttcccttgggaaaataagaatcccttgggaaaattgagttcccaaactagcccttattgtatatatagacactctagtgggaggtggttggtgacaattttgtttttggtgttgtcaaccctttagtttcagtgttcccatgataaaacactggtatggctttcctagaagaacatgttctacaatatttggctaaaacttcttgtacttgtagttggatagttatgtaatgcagagagttgtcactaacagatataaacatgaacctgctgcagtttacttg

SEQ ID NO: 100280 - DNA, 816 bp, Zea Mays
cagagctgcctaaaattaaaataaacctaatcatcgtgaccaaggaacagagctttaacaatttgctttgagaaatacagcaaccaacgaatcgaatcaaagcacatgacgactccagcgctggctaatttaaattttatcccaagcaaaaaatcccagctcccctccgcatctccgttcgccatggcatcctcctccgagccctcggcgctgccgacgctcctggtgttccgcgtccgagagctgcggttcctcgcggcgctgcgcgagcggtaccgcgtcctcgacttcttcacgtcgggctcgccgctcgccgccttcctggccgcggcggccggcggcgcggacccgccccgcgcgttggtgaccgtggggggcgactccgtccgcgtggacgccgcgctcctggacgccgtcccgtcgctccgcttcgtccacagcacgggggccgggctggaccacatcgacctcggcgagtgcgcgcgccgcggcgtgggcgtcgccagctccggcacggtctactccaccgacgtcgccgaccacgccgtcggcttgctcgtcgacgtgctccgccgcgtgtccgccgccgaccggttcgtccgccgcgggctctggccgctccacggcgactatcccctcggcagcaagctgggcggcaagcgcgtgggcatcatcggcctgggcaacatcggcacgctgatcgcgaagaggctggcagccttcggctgcgtcatctgctacagctccagaaagcccaaggaatccgtctcctacaggacgtgctggcggcgctcgggaaggacggggtcgtggtaa

SEQ ID NO: 100281 - DNA, 1522 bp, Zea Mays
gcagagattcgaagaagacacaaataaaatctcgccaaattcatgaactctctagtctctactctcttctcctggcaacgatttccaaacgcacgcaaacgctgtcacagtttgtcacggcagcggcaagtcggcaacgctgccgcggcacgtctcctccctctcttttccggttcgggtagtcgggtgtaccgccattcgtgatcgaaccagactcgagagggagaggaggagggagtccgaggggagagacccaattagctgcagggattggtcgggttcggctccgccttcggagagtcccaagagatgggtggcgcggcggcgggtaccaagtggatccaccacatccagcgcctcagcgcggccaaggtgtcggcggaggcggtggagcggggccagagccgcgtcatcgacgcctccctcaccctaattcgcgagcgcgcaaagctcaaggcagagttgctgcgtgctctgggtggcgtgaaagcttcagcgtcgctcttaggggtccctcttggtcacaactcatcctttttacaaggccctgcatttgctcctccacgcatacgggaggccatttggtgtggaagcacaaactctagcacagaggaaggcaaagaattgaatgatcctcgggtgctaactgatgttggagatgtccccattcacgagatccgtgactgtggtgtcgaagatgacagattaatgcatgtaattagtgagtctgtcaaaacagtgatggaggaggagcctcttcgaccgttggtgttaggaggcgatcattcaatatcttatccagtggttagagctgtgtctgaaaagcttggaggacctgttgacatacttcatcttgatgcacatccagatatctatgattgttttgaagggaacacttattcgcatgcctcgtcatttgccagaataatggaaggtggttatgccaggagactgctacaggttggattgagatcaatcaccaaagaagggcgtgaacaagggaagagatttggtgtggaacagtatgagatgcgaaccttctcaaaggaccgagagaagcttgagaatctgaaacttggggaaggcgtaaagggtgtgtatgtctcagttgatgtggactgccttgacccagcgtttgctcctggggtctctcacatcgaacctggaggcctctccttccgcaatgtcctcaacatcctccagaatttgcagggtgacgttgtcgccgctgatgtggtggagttcaacccacagcgtgacacggtagatgggatgacagccatggtcgccgcgaagctggttcgggagctcactgctaagatctccaagtgaaacggtcaggattgcaccactcttcttgaagcaaagcgaaagggtgggttttgatgtcccggtggttattggtcatggtttctatgtatcgagcaccaaattgttcgacatgtgacaggtttatatgttaattaggttgcaataacaccataatggtttatttaaaaaaattctaaaaaaatacaaaaaa

SEQ ID NO: 100282 - DNA, 873 bp, Zea Mays
gtgcagagattcgaagaagacacaaataaaatctcgccaaattcatgaactctctagtctctactctcttctcctggcaacgatttccaaacgcacgcaaacgctgtcacagtttgtcacggcagcggcaagtcggcaacgctgccgcggcacgtctcctccctctcttttccggttcgggtagtcgggtgtaccgccattcgtgatcgaaccagactcgagagggagaggaggagggagtccgaggggagagacccaattagctgcagggattggtcgggttcggctccgccttcggagagtcccaagagatgggtggcgcggcggcgggtaccaagtggatccaccacatccagcgcctcagcgcggccaaggtgtcggcggaggcggtggagcggggccagagccgcgtcatcgacgcctccctcaccctaattcgcgagcgcgcaaagctcaaggcagagttgctgcgtgctctgggtggcgtgaaagcttcagcgtcgctcttaggggtccctcttggtcacaactcatcctttttacaaggccctgcatttgctcctccacgcatacgggaggccatttggtgtggaagcacaaactctagcacagaggaaggcaaagaattgaatgatcctcgggtgctaactgatgttggagatgtccccattcacgagatccgtgactgtggtgtcgaagatgacagattaatgcatgtaattagtgagtctgtcaaaacagtgatggaggaggagcctcttcgaccgttggtgttaggaggcgatcattcaatatcttatccagtgggaacacttattcgcatgcctcgtcatttgccagaataatggaaggtggttatgccaggagactgct

SEQ ID NO: 100283 - DNA, 493 bp, Zea Mays
gtcgtttctcacggtgaacaagtattccccagtgtgaaaaaaatgtgcatgcaagaactggatcgcaaccggagacatagcaatcgttgaaggtctgataggtcacctcagaaggctcaaagaaaatctagggtttattacaaatagagttaccacacttcaggctagcctggacagttggcaattagagcagataaacaagagcttgtactacctttcatttctctccatgatattccttcctatctccattgtcaatggagttttagggatgaatgttggtggcgtgccatggaaagagcaaaacaagaatcctagaaaccgggatggcttcatgaatgtcatgctgatatgtactgtgatcttgctacttctattaatgtgcttcttatttccttcattatattctcatgggacgacatggagaacacggcgtgaactggcctagagcagttctcagaacaagaagcatctaaaactcttcaaaggtcac

SEQ ID NO: 100284 - DNA, 95 bp, Zea Mays
gtttgaggtgacctacctcgacgacgacacatgcgtcacccacccacccgctcatagctctttgcagctgaccacagttacaggcgatggtctac

SEQ ID NO: 100285 - DNA, 224 bp, Zea Mays
ctacaacaaccaaccagggttcagctccttttttttcagaaacactccacatggttcacattcatttttgggcatatatacaagatgtcaatgtgctgagggaacacatacatccatacataataaactccgtggatgctgatcgaaatgcgtagtagcttttccgaaaatccatgcgcgtggaagagacaaatcccaaggttccctggaagaccctagcctcg

SEQ ID NO: 100286 - DNA, 360 bp, Zea Mays
atggcctgcttcttccggctaccgccgccggccccgtattgcctgctcatcgtcatcatcatatgctcgccgctgctctccacctgctcccacgccaagccttgcacccaatgttgcgacgacgacgacgacgaccaggatcttgcggtgctcaacatgagcttcgtctccaactctggcgccgccggacgacacttggtcttcgtcctcgctccgcaaactatgcagcagccatcattattcgtctccccaaggataccaccaaagctatccgtagagccctctagtcccacatggacgactataacctacagcgtggctgtgctggccatgtgcagatatattttgtttgctatatag

SEQ ID NO: 100287 - DNA, 1502 bp, Zea Mays
gagagagacccacccaacatcgatgatgatcggtcatcatcaaccgcgccatcagagatttgtgctaaaaccaatgatgagcttactaataacacgcgggatctcagagatgggagtgaaagcaaattcggggccgtcaggagcaatcatatatgcatcactcacgcctacatgatgcggtgcctctgtgtttataaattccatcgcatccctctgcaggtgcagagcagctccattccattgcccctagctcaccacacactcgagtgacgagcacacccaccgacgatcgccatggccggcggcagcagccttaagaacatggtcgtcgccttcctcgtcccgctcccttccatcctcttctacctctccttcgtccgcgccggcggggacaccggcgccagcccgctcgcctcgtggtgcgcagcgcaccctctggtcctggccaacgtcctcttcttcctcaacgtggacgtcctcttctggctcgtcggcctcctcctctccaaccactggctcatcgacctgtactggaccgtcatccctgtgatgctgctgcactactaccgcggccacccggcatccgtggcggacgcggcgaggtctgcggtggccgtagcgctcacgtgggcgtggagcgccaggctcacgcacaactacctcaggcgggagggatgggagttgggcaagcgggaggactggaggttcaacgagatgcgtgcccagtacggcaacacctggtggtggatgtcgttcttcgccgtctacctctcccagcaggtgttcctcatcggcatctgcctgccgatgtacgccatccactccagcaaccagccatggggcgtctgggacctggtggccgcagccacctgcgttgccggaatcctcatcgctcacttcgctgacacccagctgcacaggttcgtgaccaggaacgagaagctcaagcggctgggcgagccaaccgtcccgaccctcgaggacgggctgtggcggtactcgcgccaccccaactacttcggcgagcagctctggtggtggggcttgtacctcttcgcgtggaacctgggccagcggtggatgttcttggggcctctcgtcaacagcctctgcctcggctacgtcacggtgctggtcgagcgccgcatgctgaagcaggagcaccgtgctgaggcgtacaagctataccagaagaggacttcggtgtggatcccttggttcaggaaggccgtccctgaatcgaagctgaaggagacctaaggccacactgtcgtttagttgtttgggccataccccttgtccaggttgttcaccatgttgttgtttgttccacaacgtccatgtttagaacctgttgtttcatccgctatatgtgtaattcactgtatgtgcatgaagtgcagcttgtatcatatgcatgatgacctgtttaaggtgcaagttaaaagtaatgtatctacattcgtttgcctggtctgaactctgattttttattgctactt

SEQ ID NO: 100288 - DNA, 764 bp, Zea Mays
atcgagcaccactgcactgcacatctcgatcgatcactttgcgatacatcctctaccaagctcatcacgaacaaataagaagcagatattaagcagctagctagctagctagcaatggcgtccaacgacaacgtcgccgtggccagcgaggtgagcaacgccgtgaccaagctcaactaccacctggccaccgccctcaccggcagcggcagcggcagtgagaacgccgccaccaccgtcgtcacgctggcggggaagaacagcggcgccaccatggaggcggcggccgcgggcgacgtggaggacctcgtcgtcgtcggcagcgcggacgcggaggagcacgacgaaggccatggccaggacgacgaggaggtggtggtggaggagaacgtggtcatcaccgcctacgccaacagcaactaccaggccgtcaacaactcggtgctcgtcgccggcagctgcgccgtcgacgaccccggcgtgcacgtcgtggtggtggagcacgtcgacgagatacgcgactacgacgaggacatcgacggccaagagttctaagcactgtattgttattactgcattactgcaagctatatggatggattgaagggcatatatatatatatatacctgcatgacaaataatatatatatctatgtactatatatactacatatacattacatctacattttcttggatcggctttgtactggtactactgtaagttgttaattattttgatgcatgctgctacttgaataaa

SEQ ID NO: 100289 - DNA, 2308 bp, Zea Mays
agatatcgcccactactcaggactaaagcagtagtgtactcgtacaattgagccgcaagaaaagcatcgcatccatcgtcttctccatcagtccatcccgattcccgagtaccattcgattctatattccgccattgttgatcggctcgctcgccttccttggttcatcactagtaacggcaggaaaggagccgagccattccaatccaagattgattcagtgctggccatggagaaggagactccgccgccgctgcatacggaccaggagactagtgtttcatccgagcaacaacgtccacggccgcatctctccatcgacatcccggcagcatcaagcctgccggcagatcacctgctcccgatggctacggcgacgcaggccggcaccagcatcaccccgccttccaccaggagggggcaacagacaagcagcaacatcctcagcacgcccgctccttcctccagctctagcaagccaagcagcaggccgcctctgcgctcgccgtccttcatgctgaggcagacggtgaagagcctgctgccgttggggagcttcaagtcgtcggccgtcaagagctacgaggcctccatctccaagctgttcggcgccagcgccaccaaggtgatggccaggacgccgtcgctgccgctggaccatgctctgtcgtcgtcgccacatccaccaccagttcagcagaaatcagccgcgctccaccacatgtgccgctcgcagtcgctccccacgaccaccaacatgaagaaggcgaagctgctgaacgcggccaacgccaagagctttaagcggatggactcgctcggcggcacgttccgcgtcgtgccttccacgcccagaacccccgccaccgccgtccccgacgacatagcccctgctccaccaggcggcccaggggtcgacggcggcgaggacataccggaggaggaggccgtgtgccggatctgcatggcggagctgtcggagggcagcgacaccctcatcaagctggagtgcgcgtgcaagggcgagctggcgctggcgcacacggactgcgccgtcaagtggttcagcatcaagggcacccggacctgcgaggtgtgcaagcaggacgtgcagaacctcccggtgaccctgctgcgggttcagagcgtgcagcggcgggacctcctgaatcgcggcggcgccagcaacacgcccagatacgaccggtacagaatgtggcacgggacgcctatccttgtgatcataagcatcctggcctacttctgcttcttggaagaactactggtggcccatgacggcattgttgcgctggctatatcgctgcccttctcatgtatcctgggcctcttctcgtccttgaccaccacaagcatggtggcaagaagatacgtatggatctacgccgcggctcagttcctcttggtcgtcttcttcacccatctcttctacagatacgtaagcaccaaacgcgtacgcacggagctagctcttctcaactgaacatgctcatatgctgaccgaccagcgcgcgcgcggcgggtctttgcgtacatattgcattgcagctccatttgcaggccgtgatctccatcatcctggcgaccttcgccggcttcggcgtgggcatgaccggcaactccatcgccatcgagatactgcggtggagggcgaggcgggtggcgcctcctacccagcaggcccgccgtcgtcgtcaccgcaggccgcgtgcacctcaacatcaggctcctgatctgccggcgtctggttctgctgatcagacttccagccagccttcagctgcagacatgggaatgggaattggagcgggacagcaccacgtcatggccaccgccgccggcgatgttgagaacccacccgtccctcaggcatagaacgtcgttactgtggagcaggagcagtttgtagtttgtagtttacctgagagggaccttgttacactagtatatatacatgatagtacagatggagtctgaatcttgtttctctacgcatgccttgtgaaagagatcatcatttggcgctgtattttactgtatgtacattctcccaaaagccgtttcttacgtaaaggagtttgagaaaaaaaaatggcagctcctagctcctccacataaattgaatacaaattgttacaaaacaatacttttccctttccaaagctctaagggctggaaactcacattcccttgggtttggagagaattgatggcttattcggttcggggtggattgaagatgatttgagaggattaaatctctttttagtcaaaaatgaatacaaagtga

SEQ ID NO: 100290 - DNA, 2272 bp, Zea Mays
ccacagcagcccagcagcactgactcctctatttatgatggctgcctgcaccaagagaagagggagatcgaatcagatatcgcccactactcaggactaaagcagtagtgtactcgtacaattgagccgcaagaaaagcatcgcatccatcgtcttctccatcagtccatcccgattcccgagtaccattcgattctatattccgccattgttgatcggctcgctcgccttccttggttcatcactagtaacggcaggaaaggagccgagccattccaatccaagattgattcagtgctggccatggagaaggagactccgccgccgctgcatacggaccaggagactagtgtttcatccgagcaacaacgtccacggccgcatctctccatcgacatcccggcagcatcaagcctgccggcagatcacctgctcccgatggctacggcgacgcaggccggcaccagcatcaccccgccttccaccaggagggggcaacagacaagcagcaacatcctcagcacgcccgctccttcctccagctctagcaagccaagcagcaggccgcctctgcgctcgccgtccttcatgctgaggcagacggtgaagagcctgctgccgttggggagcttcaagtcgtcggccgtcaagagctacgaggcctccatctccaagctgttcggcgccagcgccaccaaggtgatggccaggacgccgtcgctgccgctggaccatgctctgtcgtcgtcgccacatccaccaccagttcagcagaaatcagccgcgctccaccacatgtgccgctcgcagtcgctccccacgaccaccaacatgaagaaggcgaagctgctgaacgcggccaacgccaagagctttaagcggatggactcgctcggcggcacgttccgcgtcgtgccttccacgcccagaacccccgccaccgccgtccccgacgacatagcccctgctccaccaggcggcccaggggtcgacggcggcgaggacataccggaggaggaggccgtgtgccggatctgcatggcggagctgtcggagggcagcgacaccctcatcaagctggagtgcgcgtgcaagggcgagctggcgctggcgcacacggactgcgccgtcaagtggttcagcatcaagggcacccggacctgcgaggtgtgcaagcaggacgtgcagaacctcccggtgaccctgctgcgggttcagagcgtgcagcggcgggacctcctgaatcgcggcggcgccagcaacacgcccagatacgaccggtacagaatgtggcacgggacgcctatccttgtgatcataagcatcctggcctacttctgcttcttggaagaactactggtggcccatgacggcattgttgcgctggctatatcgctgcccttctcatgtatcctgggcctcttctcgtccttgaccaccacaagcatggtggcaagaagatacgtatggatctacgccgcggctcagttcctcttggtcgtcttcttcacccatctcttctacagatacctccatttgcaggccgtgatctccatcatcctggcgaccttcgccggcttcggcgtgggcatgaccggcaactccatcgccatcgagatactgcggtggagggcgaggcgggtggcgcctcctacccagcaggcccgccgtcgtcgtcaccgcaggccgcgtgcacctcaacatcaggctcctgatctgccggcgtctggttctgctgatcagacttccagccagccttcagctgcagacatgggaatgggaattggagcgggacagcaccacgtcatggccaccgccgccggcgatgttgagaacccacccgtccctcaggcatagaacgtcgttactgtggagcaggagcagtttgtagtttgtagtttacctgagagggaccttgttacactagtatatatacatgatagtacagatggagtctgaatcttgtttctctacgcatgccttgtgaaagagatcatcatttggcgctgtattttactgtatgtacattctcccaaaagccgtttcttacgtaaaggagtttgagaaaaaaaaatggcagctcctagctcctccacataaattgaatacaaattgttacaaaacaatacttttccctttccaaagctctaagggctggaaactcacattcccttgggtttggagagaattgatggcttattcggttcggggtggattgaagatgatttgagaggattaaatctctttttagtcaaaaatgaatacaaagtga

SEQ ID NO: 100291 - DNA, 2305 bp, Zea Mays
atggcgctgcagggaatctcatatgcaatagcaaagaaaaagaagggaatgacagttggttttgtgacttttcagagtgttgaacaactaacaaatgctgttcagatccttaagaagaacccttctggtggaaaggaaataaagatagtagatgccaatcgtaggtctcatcaaaaagcacatgatggagcacttgtatccaatactggaaccacaacagaaaatggtagcagtcctactacacctgcagaggaaacatctgtgcttgaatcggtgtcatcaagtaaaaaaggtgcccgtgatgcagttactccccttgccaatatgacttacattgatcagctagaacacaaaaatcaatctatggcacagatactgaagaaacttactcgcaatgctaggaaagcttgcccacctgccattccccatcctgattgggtttttaaatcaaaggaaatcggtggtcttccttgcaagtttgaaggcattttggagtccccagttgttaatggataccgtaacaagtgtgagttctctgtaggatattccttagagggcaaaaagacagtaggatttatgctcggaaatttcagggaaggtgtgactgctgttgaggaacctgtgaattgtccaaatgtctcagaaatttcctgcaaatacgctcagatgttccaagattttcttcaaccatcaagtttccctttgtggagcaggattgacaactctgggttttggcgccaactcacagtccgtgaaggaagatgtccagctgaagctgttgtttcacagaatgcagaatcacaaatatcagaagtcatgcttattgtgcaggtgtgttcaacaggtgttgatgaagctcttatgaaagaagagtttgacaagctgtctgctatcctgatacaaggagcagcaacatgctcacctcccttgccactgacaactattgtagtgcaagatcataaagggatatcaaatgctgcacctactgattgcccactgatcccactattggtaccaaagggagatcagttggatggcacaacagaagataaaataagaatccatgatcacataagcaacttaaagttctctctatcaccaacagcttttttccaggttaatactcttgctgcggaaaggttgtacacccttgctggtgattgggctaatctcaattcagacacattactttttgatgtgtgttgtgggactggaactattggcctgaccttagcacagcatgttggaatggttgttgggattgaaatgaatgaatcggcagtttcaaatgcttgcagaaatgcccttgtcaatggcataaaaaattgtcgttttgtctgtggtaaggctgaagatgtgatggggccccttctcacagaatatcttggttcaccacagcagcaggctgcagcttctaaaagtaattctgaaatcgatgatgcaagcaaaaatgaggatacaattggctgtgcaagttatgatggtgaaaatatagatagctcaaagcagagaaatgacaatgctgaaggtcagcagcctatgggtgcgtcagttgatcatcctacctgtgcaagcgaggtggatgaaaacaatgtggcttctggtgaacagaattgtggggaagcatcattggttaatgataaacccattgagacagcatcagataatagtttggagcaaggcaaggcatgcaaggatggttcttccagtccaaacaacaatgtccttgctgctaatgcatgccagtttaagaatgtcgttgctattgtagactctccacgtgttggccttcgccctactgtacgtttcctgcaaccctgacagtctagtcgccaacgcgatcgagctttgcacaccaacatccgagaaacaagagaagaacaagggcaaccgagggtggcggtctatgagcagcgcggggcttgctcggcagaggacgaagtcgatgcccaactctgagccttttatccccaagagggcaatggctgtcgatctgttccctcacacgccgcattgcgagatggttatgctctttgagagatgaaggaagtgtgtgtctaccaatgcctcagattcttgacctgtgtcgaggaccctatcagtttttcctcatcaccttggcccatccatatgttgtaacttagtgacatctattcgattgagaggccaggacagttggtggtgggatttgccttcttttgatataggatcggctactcttaatcacctgtacgtatttattgtttttgttaaatggatgtaatagtaggattaatttcaaagaaaaaaaaagagaaaatgattc

SEQ ID NO: 100292 - DNA, 733 bp, Zea Mays
gttgtccacagttgtccctcaaaattggagggacgagagagaacaccagagtgatcaaggcattgaggacgcatccacgtattcgacgtctagtgtacgtttcctgcaaccctgacagtctagtcgccaacgcgatcgagctttgcacaccaacatccgagaaacaagagaagaacaagggcaaccgagggtggcggtctatgagcagcgcggggcttgctcggcagaggacgaagtcgatgcccaactctgagccttttatccccaagagggcaatggctgtcgatctgttccctcacacgccgcattgcgagatggttatgctctttgagagatgaaggaagtgtgtgtctaccaatgcctcagattcttgacctgtgtcgaggaccctatcagtttttcctcatcaccttggcccatccatatgttgtaacttagtgacatctattcgattgagaggccaggacagttggtggtgggatttgccttcttttgatataggatcggctactcttaatcacctgtacgtatttattgtttttgttaaatggatgtaatagtaggattaatttcagcttttatatcgatggtccaacctggagtggcatcctagtcagggaagagaaccgtacatgagtactagagctagtgttggcccagctccaaccgtgacagcagtattgcagcactctgatattttttgtttcgatgttttaagagtggatttggttcc

SEQ ID NO: 100293 - DNA, 2483 bp, Zea Mays
atggcgctgcagggaatctcatatgcaatagcaaagaaaaagaagggaatgacagttggttttgtgacttttcagagtgttgaacaactaacaaatgctgttcagatccttaagaagaacccttctggtggaaaggaaataaagatagtagatgccaatcgtaggtctcatcaaaaagcacatgatggagcacttgtatccaatactggaaccacaacagaaaatggtagcagtcctactacacctgcagaggaaacatctgtgcttgaatcggtgtcatcaagtaaaaaaggtgcccgtgatgcagttactccccttgccaatatgacttacattgatcagctagaacacaaaaatcaatctatggcacagatactgaagaaacttactcgcaatgctaggaaagcttgcccacctgccattccccatcctgattgggtttttaaatcaaaggaaatcggtggtcttccttgcaagtttgaaggcattttggagtccccagttgttaatggataccgtaacaagtgtgagttctctgtaggatattccttagagggcaaaaagacagtaggatttatgctcggaaatttcagggaaggtgtgactgctgttgaggaacctgtgaattgtccaaatgtctcagaaatttcctgcaaatacgctcagatgttccaagattttcttcaaccatcaagtttccctttgtggagcaggattgacaactctgggttttggcgccaactcacagtccgtgaaggaagatgtccagctgaagctgttgtttcacagaatgcagaatcacaaatatcagaagtcatgcttattgtgcaggtgtgttcaacaggtgttgatgaagctcttatgaaagaagagtttgacaagctgtctgctatcctgatacaaggagcagcaacatgctcacctcccttgccactgacaactattgtagtgcaagatcataaagggatatcaaatgctgcacctactgattgcccactgatcccactattggtaccaaagggagatcagttggatggcacaacagaagataaaataagaatccatgatcacataagcaacttaaagttctctctatcaccaacagcttttttccaggttaatactcttgctgcggaaaggttgtacacccttgctggtgattgggctaatctcaattcagacacattactttttgatgtgtgttgtgggactggaactattggcctgaccttagcacagcatgttggaatggttgttgggattgaaatgaatgaatcggcagtttcaaatgcttgcagaaatgcccttgtcaatggcataaaaaattgtcgttttgtctgtggtaaggctgaagatgtgatggggccccttctcacagaatatcttggttcaccacagcagcaggctgcagcttctaaaagtaattctgaaatcgatgatgcaagcaaaaatgaggatacaattggctgtgcaagttatgatggtgaaaatatagatagctcaaagcagagaaatgacaatgctgaaggtcagcagcctatgggtgcgtcagttgatcatcctacctgtgcaagcgaggtggatgaaaacaatgtggcttctggtgaacagaattgtggggaagcatcattggttaatgataaacccattgagacagcatcagataatagtttggagcaaggcaaggcatgcaaggatggttcttccagtccaaacaacaatgtccttgctgctaatgcatgccagtttaagaatgtcgttgctattgtagactctccacgtgttggccttcgccctactgtgatcaaggcattgaggacgcatccacgtattcgacgtctagtgtacgtttcctgcaaccctgacagtctagtcgccaacgcgatcgagctttgcacaccaacatccgagaaacaagagaagaacaagggcaaccgagggtggcggtctatgagcagcgcggggcttgctcggcagaggacgaagtcgatgcccaactctgagccttttatccccaagagggcaatggctgtcgatctgttccctcacacgccgcattgcgagatggttatgctctttgagagatgaaggaagtgtgtgtctaccaatgcctcagattcttgacctgtgtcgaggaccctatcagtttttcctcatcaccttggcccatccatatgttgtaacttagtgacatctattcgattgagaggccaggacagttggtggtgggatttgccttcttttgatataggatcggctactcttaatcacctgtacgtatttattgtttttgttaaatggatgtaatagtaggattaatttcagcttttatatcgatggtccaacctggagtggcatcctagtcagggaagagaaccgtacatgagtactagagctagtgttggcccagctccaaccgtgacagcagtattgcagcactctgatattttttgtttcgatgttttaagagtggatttggttcc

SEQ ID NO: 100294 - DNA, 2662 bp, Zea Mays
atggcgctgcagggaatctcatatgcaatagcaaagaaaaagaagggaatgacagttggttttgtgacttttcagagtgttgaacaactaacaaatgctgttcagatccttaagaagaacccttctggtggaaaggaaataaagatagtagatgccaatcgtaggtctcatcaaaaagcacatgatggagcacttgtatccaatactggaaccacaacagaaaatggtagcagtcctactacacctgcagaggaaacatctgtgcttgaatcggtgtcatcaagtaaaaaaggtgcccgtgatgcagttactccccttgccaatatgacttacattgatcagctagaacacaaaaatcaatctatggcacagatactgaagaaacttactcgcaatgctaggaaagcttgcccacctgccattccccatcctgattgggtttttaaatcaaaggaaatcggtggtcttccttgcaagtttgaaggcattttggagtccccagttgttaatggataccgtaacaagtgtgagttctctgtaggatattccttagagggcaaaaagacagtaggatttatgctcggaaatttcaggttgatttctctctcattttttcactgctcttaattccattaataatgactggtacaacgtaattctagggaaggtgtgactgctgttgaggaacctgtgaattgtccaaatgtctcagaaatttcctgcaaatacgctcagatgttccaagattttcttcaaccatcaagtttccctttgtggagcaggattgacaactctgggttttggcgccaactcacagtccgtgaaggaagatgtccagctgaagctgttgtttcacagaatgcagaatcacaaatatcagaagtcatgcttattgtgcaggatgatccatcgtcacctcattcctcacaagccaataactaatactagtatgaggaatggagtcattccatcaaatttgaggaatgatctcatgatgcaacacctcatctggtgtgttcaacaggtgttgatgaagctcttatgaaagaagagtttgacaagctgtctgctatcctgatacaaggagcagcaacatgctcacctcccttgccactgacaactattgtagtgcaagatcataaagggatatcaaatgctgcacctactgattgcccactgatcccactattggtaccaaagggagatcagttggatggcacaacagaagataaaataagaatccatgatcacataagcaacttaaagttctctctatcaccaacagcttttttccaggttaatactcttgctgcggaaaggttgtacacccttgctggtgattgggctaatctcaattcagacacattactttttgatgtgtgttgtgggactggaactattggcctgaccttagcacagcatgttggaatggttgttgggattgaaatgaatgaatcggcagtttcaaatgcttgcagaaatgcccttgtcaatggcataaaaaattgtcgttttgtctgtggtaaggctgaagatgtgatggggccccttctcacagaatatcttggttcaccacagcagcaggctgcagcttctaaaagtaattctgaaatcgatgatgcaagcaaaaatgaggatacaattggctgtgcaagttatgatggtgaaaatatagatagctcaaagcagagaaatgacaatgctgaaggtcagcagcctatgggtgcgtcagttgatcatcctacctgtgcaagcgaggtggatgaaaacaatgtggcttctggtgaacagaattgtggggaagcatcattggttaatgataaacccattgagacagcatcagataatagtttggagcaaggcaaggcatgcaaggatggttcttccagtccaaacaacaatgtccttgctgctaatgcatgccagtttaagaatgtcgttgctattgtagactctccacgtgttggccttcgccctactgtgatcaaggcattgaggacgcatccacgtattcgacgtctagtgtacgtttcctgcaaccctgacagtctagtcgccaacgcgatcgagctttgcacaccaacatccgagaaacaagagaagaacaagggcaaccgagggtggcggtctatgagcagcgcggggcttgctcggcagaggacgaagtcgatgcccaactctgagccttttatccccaagagggcaatggctgtcgatctgttccctcacacgccgcattgcgagatggttatgctctttgagagatgaaggaagtgtgtgtctaccaatgcctcagattcttgacctgtgtcgaggaccctatcagtttttcctcatcaccttggcccatccatatgttgtaacttagtgacatctattcgattgagaggccaggacagttggtggtgggatttgccttcttttgatataggatcggctactcttaatcacctgtacgtatttattgtttttgttaaatggatgtaatagtaggattaatttcagcttttatatcgatggtccaacctggagtggcatcctagtcagggaagagaaccgtacatgagtactagagctagtgttggcccagctccaaccgtgacagcagtattgcagcactctgatattttttgtttcgatgttttaagagtggatttggttc

SEQ ID NO: 100295 - DNA, 562 bp, Zea Mays
cgagaattcctttcgttgcgcgttgcaagtgcaagtgcaacccgccgatccgcgcacacagccgaccgccgccgccatggaggacgtcctgacaccgccgccgcagccggaactcgtcggagagaagcgtaagagggatgagacttcgctggatgcgtccattgaagacgctccagccgcccccgcctccaccggcggcgccgaggatgcggccggcagcgacgtcgcccggcacccgatgtggaagacgagcctgtgctcctactttcgccgtcgcggcgccggcgccgaagagtgcagccacggggagtcctgccgttacgcgcacaccgaggaggagctccgcccgcgtcccgacggcacctgggaccccacctctgaccgcgccaagaagctgcgcaaggtcgccgcggaggcccaggaggaggccgaggaggaggtcacggtggatgagcagtcacttgaaaagtgcctcgtcgggctccccatggggtggacggctgataggctcaagcccttcctccaggaccaggcaagtagtactagtgctgaattccttctt

SEQ ID NO: 100296 - DNA, 333 bp, Zea Mays
atggggtgtctgagtggttcatctgaaatcaagtttatatctacaaacagagctattcatcttgaacctattaaggatagctggtactccaatgtactttatcttgggaatgaggatgaagttccaattctaactatgacgtgccccgcatcagatattgagaggtataaatctggtgagctgcgtttagcaccttcatctctaatcttggacaagcatactaatatgcctcacggatttaaatttgttacattttttgatccatctgttatagacaaggttttggaggaagatcacgtcatggatggcagaatagtagggcttttaatttag

SEQ ID NO: 100297 - DNA, 1969 bp, Zea Mays
gctcttggtccacggcgacctcctctggccgagcaaaggaagcagacctgttcccacttcctcgcatctaaacccacgtcaccaaccccgaccgaacctcctcctctctctctctctgctccacctccgttcgtccgactccgaccgcagcccaactcctgctgacttcaacatccattcccccgccattcgcgccaggattactccatctctacttctactacttgttgctgatccctcctccccctcccaccaccaccctccgccgccggaccctcatcagccaacaacaataatggcgtcgatccgccggccgcactcgcccgccaagcagcacctgctgcgccaccaccaccccttcgccacgtcctccccgccctcctcgccgctccgccactcctcgacatcctcctccccacgcacccaccaccacctccaccacccgcaccccttcctcttcttcacgcgccgcccgctcccgcgcttcgccgccttcttcctcctcggctccttcctcggcctcctccacttcctctcccacctcccccaccagaccccgcacctccgcccggcgtcctccagccccgccgtcatcccacgccaccagctccccatcgaccgccttaacaaccaccaccaccaccaccacgacgacgacgacgacgaaagcaacagcaagctgctcgtcgtcgtcacgcccacgcgcgcgcgcgccgcgcaggcgtactacctcagccggctgggccacacgctgcgcctcgtccacccgcccctgctctggctcgtcgtcgaggccggcgaccccacgcccgaggccgccgccgcgctgcgggggaccaccgtcatgcaccgctacgtcggctgctgcgacaagctcaacgcatccgcctccgcctccgacgacgcgctccgcttccgcccgcaccagatgaacgccgcgctcgagctcctcgagaaccaccgcatcgacgccattgtctatttcgccgacgaggagggcgtctactccctcgacctcttcaaacgtctgcgccaagtcaggaggttcggcacatggcctgtgccagtgatctccgagaacagaaaggatggtgttggtgtggtgctggaaggccctgtgtgcaaacagaaccaagtcgtgggatggcacacaagcgagcatgccagcaagctccgtagattccatgttgcaatgtcgggtttcgcattcaacagcaccatgctctgggaccccaggctccgctcccatttggcatggaattcaatccggcatccagacacagcgaaacaaggcctccaagcaacaaccacgttcgtggagcagctagtggaggatgagagccagatggaaggcatacccgctgactgctcccaaataatgaactggcatgtgccggctggatctgagaatctcgcctatcccagaggatggcgagttgcggcgaatctggatgtgatcattcctcttaaatagtattcaacagctatgttcatcaaagcaactgactcctttgacaggcatatactatagaaattaagccatgaagttttggcttatatagcgcagaggaatcccaggttgactacattggagaagcagctcttcagaaggggaggaggctttcaggttctgcgcaacctcatgcagaatttctgttgttatagtccaacttttgggaaatattttgtaggatgaaaattatatgaagccagtcatcttgctgcaaagccgtgcattgtatatgttcatgttgtttgtattctttcttcttctttttagttcgcaggccaaaaggcaatatgtaggattttttttttaaaaaaaacttatgtttagctacacattgtttcaggagttttagtaaaagcatgtcaccttatcttcaagtgctgcagatcttcttgttcatgtgatgctcctttacaagtgctaaatttcttggttcttgttcatgtgatcgattgtaag

SEQ ID NO: 100298 - DNA, 1421 bp, Zea Mays
cgcgtccgctcctcctccttccgaagggcgagttcgcatcgcagcgtcgcccgcagcagcagcggaccgcggaccacgccacctcatccagcggcattgagcgagggagcgattcgatcagaatcgacatggacggcggcgagcacgaagcggaggagtcctcctctaagcgccgggagcgcctgctcgccctccgctccgccgcaaacgtgtcgccggcgggggctcctccgccgacggccgcggggagcctcctcccggatcctgacctcccggacgacgaggccgcatccgtgtgcccgcccccgccccagcgtttcgactactacaccaaccccgccgccgccttcacatcctcctcaggaggcgccacaaatcccacctggtcccacaagcgcaagagccctcccgcctgctacgccccgcctccgccggcttacgggaactactgcagcaactaccaccctccacaccagcagcctacatcttcatggcaagttcactctccatccccgatgccacaagatgcaccaaggagcagtccatggcaacgtcctatgcagttccaggatccaatgtcaggataccaaggaggtcctcccagcgcaccacctccttgggtgtcacattctggtcctcgaggccgaggttcttattcaaatccaccaaactttgggttcagacacccgaatcccagccgaggtggcagcacaatgaactatggaccaagaggtggcccatattcatcttatggacgtggcagggggcccaactactttggcagcccaggttcaagggggagaggggggaggggtggctggcaaggccagagttacatgaacaagtcaatgcttgatgacccttgggtggacctgcaacctggtgttggcaacatactaatacctagaggtgagtatgactccaacaagtcctggctcccagaatcgctgcgaaaaaagaaggaaacgccgcctgctcatggacaaattaaaccggcgccaggattgagcctatcagaataccttgacctgtctttcaatgaggtttctgataaagagaagtaggcctttatgtatgcatatctacgacgacagattgatgtaggtctttgcgatcatttgcaatagatatgttccctctgaaatcatgtgcaccttttatcttcgctcctcccattgccctgtactgtgctgccatggcaattttactagtatttatgcgttatagcgatcttgttgtaatgacttgaatttaaggaactgaataacttatgatctcttaatagatagaggaagcaaagttgtgctgcatgtctggtgtcgtggagctggatgataagttgcactctttggaagcacaagcacctcttcattagaacttaataggctttgtttttttttaaaagaagcagacctttggag

SEQ ID NO: 100299 - DNA, 1589 bp, Zea Mays
cgcgactccccgtccgctcccctcttccaccacgtgctcgcgtccgctcctcctccttccgaagggcgagttcgcatcgcagcgtcgcccgcagcagcagcggaccgcggaccacgccacctcatccagcggcattgagcgagggagcgattcgatcagaatcgacatggacggcggcgagcacgaagcggaggagtcctcctctaagcgccgggagcgcctgctcgccctccgctccgccgcaaacgtgtcgccggcgggggctcctccgccgacggccgcggggagcctcctcccggatcctgacctcccggacgacgaggccgcatccgtgtgcccgcccccgccccagcgtttcgactactacaccaaccccgccgccgccttcacatcctcctcaggaggcgccacaaatcccacctggtcccacaagcgcaagagccctcccgcctgctacgccccgcctccgccggcttacgggaactactgcagcaactaccaccctccacaccagcagcctacatcttcatggcaagttcactctccatccccgatgccacaagatgcaccaaggagcagtccatggcaacgtcctatgcagttccaggatccaatgtcaggataccaaggaggtcctcccagcgcaccacctccttgggtgtcacattctggtcctcgaggccgaggttcttattcaaatccaccaaactttgggttcagacacccgaatcccagccgaggtggcagcacaatgaactatggaccaagaggtggcccatattcatcttatggacgtggcagggggcccaactactttggcagcccaggttcaagggggagaggggggaggggtggctggcaaggccagagttacatgaacaagtcaatgcttgatgacccttgggtggacctgcaacctggtgttggcaacatactaatacctagaggtgagtatgactccaacaagtcctggctcccagaatcgctgcgaaaaaagaaggaaacgccgcctgctcatggacaaattaaaccggcgccaggattgagcctatcagaataccttgacctgtctttcaatgaggtttctgataaagagaagtaggcctttatgtatgcatatctacgacgacagattgatgtagggcctatttggtttgtggctaaatgtgccccactttgcctaaggttagtcgttcgaattgaataactaaccttaggcagaaaagttaggcaaagtgtggcaactgaggtagtgaaccaaacatgcctgtagtctttgcgatcatttgcaatagatatgttccctctgaaatcatgtgcaccttttatcttcgctcctcccattgccctgtactgtgctgccatggcaattttactagtatttatgcgttatagcgatcttgttgtaatgacttgaatttaaggaactgaataacttatgatctcttaatagatagaggaagcaaagttgtgctgcatgtctggtgtcgtggagctggatgataagttgcactctttggaagcacaagcacctcttcattagaacttaataggctttgtttttttttaaaagaagcagacctttggag

SEQ ID NO: 100300 - DNA, 1361 bp, Zea Mays
atgcagattcccaagtggagttgcggcggctggttatcatttatcatcaccttcgcctcacaccttccggccgcccattccgatccgatccccggccggccacctaccaccggtcagccccatcaatctctgaggcagcgtcagccatcacgcctccctcatcgatctccccgccgccgccgctgctaataccagataatggaggccggcgccgccgctgctgccactgccatctaccctctgcaccgatgcaaaaccatacacctggtgaggcatgcccaaggtgtccacaacgtggaaggcgacacggatcacagcgcctacatgaaacccgacttcttcgacgcgagcatcactcccttgggctggaaccaggttgacctcctgcgagagcatgtgaaggaatctgggcttgcagaaaagattgagctggttatttgttctcctttgtcgaggaccatgcagactgcagtgggagtttttggtggcgaaagctgcagtaatggtgtgagtgtgcctccactgatggtggagaatgctggacgtccggcagtttcaagtttgaactgcccaccatttcttgctgttgaggcctgcagggagcgcttgggtgtccatccttgtgacaagaggaggagcatcacagagtaccgtgctctcttccctgccattgatttttcgctgatagagagtgacgaagatgttctctgggtaccagatgtcagagaaacctttgagtcactcgcagaaaggggtatgaagttcattgactggctatggacaagagaagagagagagatagccatcgtcacccatagcggtttattaagccataccttgcgcatgtacagcaaagagtgccatccaacagtagcacaagaagtgagcaagtactttgcaaactgcgagctccggtccttggtactggttgacaggagtatgcttggttcagatggccccagttacaacaactaccctggcaaaatgaaaatcccagccggacttgatctgcccagcgatgacaagaagcaacctcttcagaaccagagcggctgagcaggcctgtcttggggcttgtttggtgttcaccaccactgattccttttcttttgtcatcctattttgaaacttccctagctgcagtcagtccattttttgtgaactattctgagagtactattctgaactttcccatttgtggttgttgagcaccatttgtggtactgaacacggccggacggtccaacctgcggacggttcgtctatagacgtggacggtccgtgattagattagatcaggcgtaattaacctcttttccgtacatatttatctatctaaactcgcggattctgttggagaa

SEQ ID NO: 100301 - DNA, 1418 bp, Zea Mays
agctacgaaccgaaaggcctggtctccctccaccctcctctgtcagggtcctccgaatccttcctcggccgccgcgccaaatcccgtctcgttgctccggtccgctgcgcatcctcaggaatggaacttggcgccaccactgccctctaccctctgcaccgctgcaaaaccatttacctggtcaggcatgcccagggcattcacaatgtcgcgggggagaaggacttcggcgcgtacatgtcacatgaactgttcgatgctcagctcactcctttgggttggaaccaagtcgatggtctgcgggagcatgtgaagaaaagtgggcttgcagaaaagattgaattagttatttcttcccctttactgaggactatgcaaactgcagttggtgtctttggtggtgaaaagtatactgatggtgtaaatgcacctccactaatggtcgaaaatgccagacacagtggccgtccggcagtttcaagtttgaactgccccccatttattgcagtcgaaacctgcagagagcacttgggtgtccatccctgtgacaagaggaggagcataacagaataccggcctctctttcctgcgattgatttttcattgatagagaatgatgaagatgttctttgggaaccagatgtgagagaaccaaatgaggctgtcgcattgaggggtatgaagttcatggactggttgtggacaagagaagagaaagagatagctattgtcagtcacagtggtttcttgtttcacaccttaagcatgtacagcaaggagtgccatccaaccataagcgacgaagttagcaagcactttgcaaactgcgagctacggtcgatggtgttggttgacagaagcatgcttgggtcatattcctcaagattcaactatgctggcaagaatccaaccggactagatgtgccaagtgatattgcagataagaagcaggttgacgaagctcagaagaactaaagcaacctcgaaagcataccatatatgacttggattatcaagaaattctgacctttgcgaagcttgtttgctttgaagaggacaagctaagagggcatctacagatagagtttacgcataccattttgttagtcgagttgaactacgcagcaatgtattagcatgtctgctcttttgtctcagcctacattgaggttcagggcattggactaggatcatctatttatgataataataaccggatcacctacattcaccaggtgatgcatggcaaagttctcttggtttccgagctgttctagtctaggggtggctgtacaacgtccacggctccacgcaattccgtctcatggatggtgataaaaccaatcgatgtatggttttggtttctgcagattacatttgatggttgggttcgctgtattatggcttgcgtattttta

SEQ ID NO: 100302 - DNA, 1398 bp, Zea Mays
accctcctccacagattcaccagtggtgtgatgtcactgattctgatgataggattcatcgtcgtctcatccgtccgccccttgggatgatctctagcagaatggaacttggcgccaccactgccctctaccctctgcaccgctgcaaaaccatttacctggtcaggcatgcccagggcattcacaatgtcgcgggggagaaggacttcggcgcgtacatgtcacatgaactgttcgatgctcagctcactcctttgggttggaaccaagtcgatggtctgcgggagcatgtgaagaaaagtgggcttgcagaaaagattgaattagttatttcttcccctttactgaggactatgcaaactgcagttggtgtctttggtggtgaaaagtatactgatggtgtaaatgcacctccactaatggtcgaaaatgccagacacagtggccgtccggcagtttcaagtttgaactgccccccatttattgcagtcgaaacctgcagagagcacttgggtgtccatccctgtgacaagaggaggagcataacagaataccggcctctctttcctgcgattgatttttcattgatagagaatgatgaagatgttctttgggaaccagatgtgagagaaccaaatgaggctgtcgcattgaggggtatgaagttcatggactggttgtggacaagagaagagaaagagatagctattgtcagtcacagtggtttcttgtttcacaccttaagcatgtacagcaaggagtgccatccaaccataagcgacgaagttagcaagcactttgcaaactgcgagctacggtcgatggtgttggttgacagaagcatgcttgggtcatattcctcaagattcaactatgctggcaagaatccaaccggactagatgtgccaagtgatattgcagataagaagcaggttgacgaagctcagaagaactaaagcaacctcgaaagcataccatatatgacttggattatcaagaaattctgacctttgcgaagcttgtttgctttgaagaggacaagctaagagggcatctacagatagagtttacgcataccattttgttagtcgagttgaactacgcagcaatgtattagcatgtctgctcttttgtctcagcctacattgaggttcagggcattggactaggatcatctatttatgataataataaccggatcacctacattcaccaggtgatgcatggcaaagttctcttggtttccgagctgttctagtctaggggtggctgtacaacgtccacggctccacgcaattccgtctcatggatggtgataaaaccaatcgatgtatggttttggtttctgcagattacatttgatggttgggttcgctgtattatggcttgcgtattttt

SEQ ID NO: 100303 - DNA, 1481 bp, Zea Mays
gcaatgtcttcccacccaccctcctccacagattcaccagtggtgtgatgtcactgattctgatgataggattcatcgtcgtctcatccgtccgccccttgggatgatctctagcagtgcatccctttctctgctctccggttattaaccttccataccactcttctctgcctcacactcctctcatgccccaatccacgcgcaggaatggaacttggcgccaccactgccctctaccctctgcaccgctgcaaaaccatttacctggtcaggcatgcccagggcattcacaatgtcgcgggggagaaggacttcggcgcgtacatgtcacatgaactgttcgatgctcagctcactcctttgggttggaaccaagtcgatggtctgcgggagcatgtgaagaaaagtgggcttgcagaaaagattgaattagttatttcttcccctttactgaggactatgcaaactgcagttggtgtctttggtggtgaaaagtatactgatggtgtaaatgcacctccactaatggtcgaaaatgccagacacagtggccgtccggcagtttcaagtttgaactgccccccatttattgcagtcgaaacctgcagagagcacttgggtgtccatccctgtgacaagaggaggagcataacagaataccggcctctctttcctgcgattgatttttcattgatagagaatgatgaagatgttctttgggaaccagatgtgagagaaccaaatgaggctgtcgcattgaggggtatgaagttcatggactggttgtggacaagagaagagaaagagatagctattgtcagtcacagtggtttcttgtttcacaccttaagcatgtacagcaaggagtgccatccaaccataagcgacgaagttagcaagcactttgcaaactgcgagctacggtcgatggtgttggttgacagaagcatgcttgggtcatattcctcaagattcaactatgctggcaagaatccaaccggactagatgtgccaagtgatattgcagataagaagcaggttgacgaagctcagaagaactaaagcaacctcgaaagcataccatatatgacttggattatcaagaaattctgacctttgcgaagcttgtttgctttgaagaggacaagctaagagggcatctacagatagagtttacgcataccattttgttagtcgagttgaactacgcagcaatgtattagcatgtctgctcttttgtctcagcctacattgaggttcagggcattggactaggatcatctatttatgataataataaccggatcacctacattcaccaggtgatgcatggcaaagttctcttggtttccgagctgttctagtctaggggtggctgtacaacgtccacggctccacgcaattccgtctcatggatggtgataaaaccaatcgatgtatggttttggtttctgcagattacatttgatggttgggttcgc

SEQ ID NO: 100304 - DNA, 1361 bp, Zea Mays
gcaatgtcttcccacccaccctcctccacagattcaccagtggtgtgatgtcactgattctgatgataggattcatcgtcgtctcatccgtccgccccttgggatgatctctagcagtgcatccctttctctgctctccggttattaaccttccataccactcttctctgcctcacactcctctcatgccccaatccacgcgcaggaatggaacttggcgccaccactgccctctaccctctgcaccgctgcaaaaccatttacctggtcaggcatgcccagggcattcacaatgtcgcgggggagaaggacttcggcgcgtacatgtcacatgaactgttcgatgctcagctcactcctttgggttggaaccaagtcgatggtctgcgggagcatgtgaagaaaagtgggcttgcagaaaagattgaattagttatttcttcccctttactgaggactatgcaaactgcagttggtgtctttggtggtgaaaagtatactgatggtgtaaatgcacctccactaatggtcgaaaatgccagacacagtggccgtccggcagtttcaagtttgaactgccccccatttattgcagtcgaaacctgcagagagcacttgggtgtccatccctgtgacaagaggaggagcataacagaataccggcctctctttcctgcgattgatttttcattgatagagaatgatgaagatgttctttgggaaccagatgtgagagaaccaaatgaggctgtcgcattgaggggtatgaagttcatggactgctttgcaaactgcgagctacggtcgatggtgttggttgacagaagcatgcttgggtcatattcctcaagattcaactatgctggcaagaatccaaccggactagatgtgccaagtgatattgcagataagaagcaggttgacgaagctcagaagaactaaagcaacctcgaaagcataccatatatgacttggattatcaagaaattctgacctttgcgaagcttgtttgctttgaagaggacaagctaagagggcatctacagatagagtttacgcataccattttgttagtcgagttgaactacgcagcaatgtattagcatgtctgctcttttgtctcagcctacattgaggttcagggcattggactaggatcatctatttatgataataataaccggatcacctacattcaccaggtgatgcatggcaaagttctcttggtttccgagctgttctagtctaggggtggctgtacaacgtccacggctccacgcaattccgtctcatggatggtgataaaaccaatcgatgtatggttttggtttctgcagattacatttgatggttgggttcgc

SEQ ID NO: 100305 - DNA, 112 bp, Zea Mays
acgccatccagcaggtgtgcctgcatatgcaccctccgcgggagccccatctcaccgcgctcaagcgcattctgcgctacctccgtggctccctcgactacggcctcctcct

SEQ ID NO: 100306 - DNA, 1684 bp, Zea Mays
gtagccatggaagagcagcagctccgcgcccgcccaaacatgatggtcctgtcgtcgctcgccaagaataacccagagggccgtcctggcgctcatcgcgttcgtcaccgtcgtcgccctgcgccacttgatctcttcatggcggcagcacggccggctgcccccggggccgacgagccttccggtgatcggacacctgcacctgctccgcccgccggtgcaccgcaccttgcaggagctggcgtcccggatcggtcccctgatgcacatccgccttggctccacaaactgcgtggtggccagcagcccagaggtggccagcgagctcatccgcggccacgagggcagcatctcggcgcggccgtttacggcagtggcccgcaagttctcctacgactccgccggcttcgtcttcgagccctacaacacgcactggcgcttcatgaagcgcctctgcatgtcggagctactcggcccacgcaccgtcgagcagctgcgccccgtccgccgcgctgtcaccgtgtccctggtctccgacctgctggcgtcgtcggcgcgcggggagacggtggacatcacccgccatctcatccgcctcacaaacacctccatcatccggatggtggccagcaccgtgtccggcagcgtcaccgacgaggcgcacgagctggccaaggccgtaattgaggtcgtgggcgccttcaacgtcgacgactacatcgccgtggtccgtggctgggatttccagggcctcggcagaaaagccgccgacgtccaccgccgcttcgacgcgctgctggaggacatcctgaggcacaaggaggaggcgagggcagcgcgaaggctcgacgacggacatggcaagcaggccacgcacagcaaggacctgctcgacatcctcatggacaaggcggaggacccggcggcggaggtcaagctcacccgggaaaacatcaaggcgttcgtcatcgacgtggtgacgtctggttcagacacgtcggcggccatggcagagtggatgctggcggagctgatgaaccacccggagacgctgcgcaaggtggtagaggagatcgacgctgtggtcggcggcggcaggatcgccagcgaggcggacctgccgcagctgccgtacctgatggcggtatacaaggagacgctgcgtctgcacccggcggggcccatcgcgcaccggcagtcgacggaggagatggtggtacacggtttcaccgtgccgccgcagtcgacggtgcttatccacgtgtgggccatcggacgcgacccggcctactgggaggagcccctgttattccggccggaacggttcatgccaggcggcgctgccgagagcctggagccccgcgggaagcacttccaatacattcccttcggcagcggccgtcggggatgtcccggcatgggcctcgcgatgcagtcagtgccggccgtggtagcggcactcgtgcagtgcttttattgggccaccgtcgacggcggggtggacaagatcgacatgtcggagtcggacgggctggtgtgtgctcgtaagaagccacttctgctccgacccacatctcgcctcacccccttcccgcccgtcgtatagcgtgcatatgcgtgtcttccacgtgtcctgtatccatatttaaaatctactctacgaaatgtttatggtttggatgac

SEQ ID NO: 100307 - DNA, 92 bp, Zea Mays
gatccagtcaaaaagcacacagcaagcgcctcctcttcacatgacatgaccgcaaaacgtgcaaacgcaaacacaaccttttgaccagctta

SEQ ID NO: 100308 - DNA, 2584 bp, Zea Mays
catctcttgccattccttatccctccaaaaaagaaaacaaaaccgtactgccacaacaccttttctagggttcaggacctctgtagcattattgtactacaccttttcgtagcagctgctggcctgctgcacagcgggatgcaaaatccccctgccttttcttttctcctttcgtaggaggaggagaaggtggagcctagagcacaaaaagatggatccaatcagatcacagcagcgtttgcttgtccaaatgcagattttgatctcagtgctccaaatcaatgatcctactgctgcttttagcgcgcaaaaagcacgatccttttttttactcgtgctcttttcttcctttctttgtaaagcactctatcttgttttgtttgttcatcattctcctgtctttgcagaatggcgtccgtgctgatgagttggtttggtttctctctcttttccgtacgtgcagccccggtgcggtgtgtgctcgcgtggcgtcaagagcggcggcagctcggcggtgttcacggccgagtgctcccacgccttccacttcccctgcatcgcagcccacgcgcgctcctcctccgccaacggcgtcctgtcctgccccgtctgcgcctcgccgtggcgccaggcgcccttcctcgcctccctccgcctccactgctccttccacgacgacaagcaccgaggaggcggcgacggccgcaagacgtcgccgctcgccaagctttacgacgacgacgagccgctgctggcgcccaaggccacggccaacggcggcggcttcaaccccatcccggaggccgacgaggacgacgaggagcagggcgccgcgtccgagttcaggggcttcttcccgtgcccgaggagtaggaccacctcgggcctggctgtcactgtggcgcccgaggtcgcgctcgtgtcgtcgggccgccgccacggcaagtacgtggtggccgtcaaggtcaaggcgcccgggctgcgttcatcgtcgacggccccgcggcgcgcgtccatcgacctggtcaccgtgctggacgtcagccagggaatgatgggcgagaagctgcagatgctgaagcgagggatgcgcctcgtcgtcgcctccctcggccccaccgaccgcctctccatcgtcgcgttctccggcgccgccaagcgtctgctgccgctgcgccggatgaccaggacggggcagcggtccgcgcggcagatcgtcgaccgccttgtcgtctgcgccgccgcggcgaccacggccacggccacgcaggggcagcaaagcgcgtgcgtgggtgacgcactgcgcaaggcccaccaaggtgcttgaggaccggcgggaccgcaacccggtggccaccgtcatgctgctctccgatacccagcagcagcagtcggcagcaccggaaaactcgtcaaggaagcagtttgggcggccagctgtggccccagcaacgcgcttcactcacgtggagatccccatcggccccggcgacccacctcctcttgtgtccgagtgcgaggaggagcctccccgtggagcacgcgttcgccaagtgccttggcgggctggtgagcgtggtgatgcaagaggtgcagctggagctggcgttcctgacgggggagattacggcggtgtactcgtgcggggccgggcagcaggccgtggcagtctccggtggtgcgggggtgagcgtgcggctgggcgagatgtacgcggaggaggagcgcgagctgctggtggaggtgcgcgcgccgctgggcagccaccccgcactcgctgtcggtgcggtgcacgtaccgcgacccggcatcgcaggaggcggtgcgcggcgcggagcagcctctgctgctgcccgcgctggagggcgagcgggcgtcgtcgtcgtcgcggcggctgcacgacctgttcgtggcgacgcgcgccgtggcggagtcgcggcggctggcggagctgcaggacctggggactgcgatccacctgctgtcgtcggcgcgggcgctggtactgcagtcgccaccgacgcagcagcagcaggagctggtgggcagcctggacacggagctgagcgacatgcggtggcggcgcgccaacagccagcatcaggaggtagtgacgccgacgtcgaggagcggcaggaggaggggagacggggacacgacgacgcccgtggggaccccgcgcggggaggtgctgacgccgacgtcggcgtggcgcgcggcggagcagctggccaaggtggccatcatgcgtaagtccatgaaccgggtcagcgacctgcacggcttcgagaacgcgcgcttctgaggcgtcagacgacctcgtgtctgtctgtaattgagtcgtattgtgtttatgccattttttttcgttttcgtgttggctagtgaaacgatatgagtaccccaacaggagaagaggccgcgaacggtggctagtagaagatgggaagatgaacagaagcagccggagctgctgctgatgttatatgtggattagtagtatcaattaattatgaggacgattaatgaacccagataggatgaagaagataattggtgttatattagctgctgttgtgcttca

SEQ ID NO: 100309 - DNA, 2761 bp, Zea Mays
gcacacacagagagagagagagaggaggctggctccgaccccccgcgattcccttgccatgccattcccatgtggttgatgctccgacctcccatcctcctcctcctcctgcgtacgagtattattaacagcatcagtgcgtagcagttaagagcgagcgagcgagatcagcgccaccagttgcagttgcaggtcgccacctccctcccttcttccaccttcggctccgcttctcggcctgaccaaccaagaacgaggagaagggatggggacggggtggcggagggcgctgtgcacgtccgtccagcgggacgacgaccccgaccgcgacgccagtaccaagaagcgccggccgcagcaggacgcgccgagcccgcgcggcacagccaccgccaccggcttcttctccgccgtcaagagcgcggccaccggcagcagcagcaacccatccacgccggtcctccgctgccgcaccaggccgctgcagcagccggcggaccccgcccccgtgacgccaccctccgcgccggcgcccgccaggaaccaccgggtgccgctgatgcaggcgctgtcggcgccggcctcgcccagatccccctccagattcgcgctgctcaaggcgtcgctgctcccgtccaagccccggtgcggtgtgtgctcgcgtggcgtcaagagcggcggcagctcggcggtgttcacggccgagtgctcccacgccttccacttcccctgcatcgcagcccacgcgcgctcctcctccgccaacggcgtcctgtcctgccccgtctgcgcctcgccgtggcgccaggcgcccttcctcgcctccctccgcctccactgctccttccacgacgacaagcaccgaggaggcggcgacggccgcaagacgtcgccgctcgccaagctttacgacgacgacgagccgctgctggcgcccaaggccacggccaacggcggcggcttcaaccccatcccggaggccgacgaggacgacgaggagcagggcgccgcgtccgagttcaggggcttcttcccgtgcccgaggagtaggaccacctcgggcctggctgtcactgtggcgcccgaggtcgcgctcgtgtcgtcgggccgccgccacggcaagtacgtggtggccgtcaaggtcaaggcgcccgggctgcgttcatcgtcgacggccccgcggcgcgcgtccatcgacctggtcaccgtgctggacgtcagccagggaatgatgggcgagaagctgcagatgctgaagcgagggatgcgcctcgtcgtcgcctccctcggccccaccgaccgcctctccatcgtcgcgttctccggcgccgccaagcgtctgctgccgctgcgccggatgaccaggacggggcagcggtccgcgcggcagatcgtcgaccgccttgtcgtctgcgccgccgcggcgaccacggccacggccacgcaggggcagcaaagcgcgtgcgtgggtgacgcactgcgcaaggcccaccaaggtgcttgaggaccggcgggaccgcaacccggtggccaccgtcatgctgctctccgatacccagcagcagcagtcggcagcaccggaaaactcgtcaaggaagcagtttgggcggccagctgtggccccagcaacgcgcttcactcacgtggagatccccatcggccccggcgacccacctcctcttgtgtccgagtgcgaggaggagcctccccgtggagcacgcgttcgccaagtgccttggcgggctggtgagcgtggtgatgcaagaggtgcagctggagctggcgttcctgacgggggagattacggcggtgtactcgtgcggggccgggcagcaggccgtggcagtctccggtggtgcgggggtgagcgtgcggctgggcgagatgtacgcggaggaggagcgcgagctgctggtggaggtgcgcgcgccgctgggcagccaccccgcactcgctgtcggtgcggtgcacgtaccgcgacccggcatcgcaggaggcggtgcgcggcgcggagcagcctctgctgctgcccgcgctggagggcgagcgggcgtcgtcgtcgtcgcggcggctgcacgacctgttcgtggcgacgcgcgccgtggcggagtcgcggcggctggcggagctgcaggacctggggactgcgatccacctgctgtcgtcggcgcgggcgctggtactgcagtcgccaccgacgcagcagcagcaggagctggtgggcagcctggacacggagctgagcgacatgcggtggcggcgcgccaacagccagcatcaggaggtagtgacgccgacgtcgaggagcggcaggaggaggggagacggggacacgacgacgcccgtggggaccccgcgcggggaggtgctgacgccgacgtcggcgtggcgcgcggcggagcagctggccaaggtggccatcatgcgtaagtccatgaaccgggtcagcgacctgcacggcttcgagaacgcgcgcttctgaggcgtcagacgacctcgtgtctgtctgtaattgagtcgtattgtgtttatgccattttttttcgttttcgtgttggctagtgaaacgatatgagtaccccaacaggagaagaggccgcgaacggtggctagtagaagatgggaagatgaacagaagcagccggagctgctgctgatgttatatgtggattagtagtatcaattaattatgaggacgattaatgaacccagataggatgaagaagataattggtgttatattagctgctgttgtgcttca

SEQ ID NO: 100310 - DNA, 179 bp, Zea Mays
ttttatcacaggttcaacaatattcaacattaaatggcaacatcatgccttcaaatcacacaaaacatagcattgattctacaaaactgtggacaaaatcatgccttcaaatctaattgttcaatacacaatacttaatatttgaaaatataagacttctaagctgttggagcttaagg

SEQ ID NO: 100311 - DNA, 3525 bp, Zea Mays
atggcaaagaaattactcttttttgctttcccatccctgtcctgtatcatgctcctgccggggctcctagatcggtggcaacccaattattatttcccgggtaaattggttcgcggccgtcaagaatcgcagaggcatccggatccaaccacaaggaccaatcttgtttgccagaactgtatcacattccaattttagggcaacatttgggtctaagaaacattaattaattaaggtcgaacacgaggtgagaagtaccttcaggggaggaatctattagtctctgtgcatccttgaggcagctgtggttatccctattggatgaggtaccaatggccggttaatttggtcatccattgagctgtgcatgcaagcaaataccataggattacaagatgagatggccgagaagcaaattcagatggctcttcagcgcatgcctcatttgtctgctgctgcagctggctggtgcgatcaggactagcttgttctggccaccagcttgccagctgccgtctcctgcaatcccaagcggggatgaatcggtggaacaactgtggcacagttgtgctctggacttgaaaattcctcaagatgttagaaacaggtcccattacagccttctgttcaacaccatcagcaattcgtatagagaaaatgataataagttctatcctcaaaagattggcattgaggaagcaatcaccgcaaccttatcacctgcaaaagatgccaacacttttctggactgcttaaagaagcataatttccctttctctgatcatggactgcagaagcagcgggaggaaaccagaagcttacttcccaactctaacagcatcagtaaccttccttttgtaatgaaaagaagacgtctacatgaagaagattcaaccattgctccaacccgacctaaagcaaaagaggcaataagaagcgttttgtcttctgaaggagaggctcacctgctagttgctactgtgaaaaagtctggtaaaccagagcccaaacacaagagcaaggacaacagtggcactattattgctgctttgtcagtggcttgtgtagcattggtggctcttatatgtctgtgctactgtgcttgtcgtggaagcgaagacccagaatcatcatatgatggcaatccactgctgagtctgaatatgagtgatttatcaggttcttcgcgtaaatcatgctctaccccaattgatgtcaacaggttgggggcattatcaaccagttcatcagagagccagcgtaaagaatttaaattacctcctgtaccggcagcagttagagaaatgtcaatgaagtcggagtttgagcgacgcagcaatgtgcaggcgatgaagttaagctctcatgaaataaccaccattgctggacgtccgtcagcctctactaattctgaggaagtgaaagctgcagttccttctagtaatgccactggcaacatatgtaaacctgcagctggtccagcaccaccaccaccgccaccacctctaggtcatcctctcccaaaggctcctcatgcaccacttgcaccagcaccagcaccaccagtaccacctcctccaaagatgcctacagctgctagttcgagcaatccacccccaccaggacccccaacgcctcctgctcctaggcctgcagccggacccggacctccaccaccgccaagtagagctggacccggacccggacctccacccccaccaagtagaggtggagctggacctccaccaccagcaatgcctggtggtccaaaagcgcgtggtccgccaccgttgaagaaagcagggaatgttgcaggtcctcctgtggcagacaataaaacaaagctgaagccattcttctgggataaagttactgcaaatccggatcaagcaatggtgtgggatcaaattaaagcaggatccttccagtttaatgaggagatgatcgagagcctttttggttgtcatgctactgacaagaaaaatgctgacggcaaaaaggatttagcagcaaaggatacccctcaatttgttaggatactcgatgctaaaaaggcacagaacttagcgatatcactgaaggcactgagtgtttcagctgacgaagtacgtaatgcagttatggaagggcatgaactccctattgatctgatacaaaccttgataaggtggactccaagcagcgacgaggagctaaggcttcggctatacaccggggagctcactcaacttggtcctgcagagcaattcttgaggaccatcattgacataccttacctctatcagcgcctggatgtgttgcttttcatgtccagtttgccggaagaagctgcaaatgcagaacaatcatttaaaaccctggaggtggcctgccatgagcttcggaacagccgtctattcaagaagctgctagaggctgtactcaagactgggaaccggatgaacgatggcacctttcgaggtggggcccaggcgttcaagctggacaccctcctgaagctctcagacgtgaagggggtcgacggcaagacgacgctgcttcactttgttgtccaggagatcattcggtcagagggcgtgcgtgcggttcgggccgccaaagagcagagcaacagcagcatatccagcgtgacttctgacgatctcaccgaggatgtcagcgacgacacggagcactacaagcagctaggcctgggcgtcgtttccagcctgggagacgacctccagaacgtgcggaaggcggcaatcctggacgccgatgcgctgaccatctcggtggcgagcctggggcacaagctggtgaaggcgaacgagttcttgaacacgggcatgaagagcttagacgaggacagtgggttccatcgcaagcttggcgagttcatcgagcagtcccaggtgcgcgtgacccagcttctggaggaggaaaagaagctacgggcgctggtacgcacaactgtagactacttccatgggagcacggggaaagatgagggcctgcggctgttcgtcgttgtccgcgacttcctggggatcctggacaaggtgtgcagagaggtgaaagaggcggctgccaaggctgctgctaataacaagaaaccatctgcggcaggatcaggatcgaagggaaggcaaccgtcgcagtcttcttcgtcgttccgtgatcctcggcagcagctggtgcccgcaattaaagatcggaggagtgcagcggcacgcagctctagttcctcttctgattctgactgacagcaaagaatttgtgctggccacacaccagactgatttaatggtggtgggtatgcaggtagaagagatagtagtggcttgactcgcttacagcagaatgaaaagaattaggaaacactgcgccctgatagattgatttagtacgcgcgtgatctcacgctctcagctttcgcctccgtaaatattattattttatacaaaatgtacatcctagatatatgtacaaagatcgttcaaggcttaatgaataaatattattttatacaaataccttactgtt

SEQ ID NO: 100312 - DNA, 3201 bp, Zea Mays
accatcacttgttctctcttctctctctctcgtcgtgtgcctgggtcgaccagcgacctggctagctagctctccagctgcgcgcgccatggccaacccaacagctaccaagcatgctttcaagcgtattttgacgagcctgcttaagcctggcggtggtgaatacggcaagttcttcagccttccggcgctaaatgatccaaggatcgataagcttccctactctatacgtgttctcctggaatcagctatccgccattgtgataacttccaagttacagagagtgatgttgagaaaatcattgattgggagaacacatctccaaagctggctgagatacctttcaagccagcgagatgcattctaatggacaacactggagtcccagcagttgtagaccttgcagctatgcgtgatatgatgccaaagttgggatgtgatccctacaagattaatccattgattcccgtggatgctgttattgaccacgcagtgcgagtggatgtagcagggacctatgatgcattggatagaaacgaggagctggagttccaacgcaacaaagaaaggtttgcttttcttaaatgggcatccaatgctttccacaacatgcaggttttccctcctggttcgggcactgtacaccaggtaaatcttgagtatcttgcccgagttgtcttcaacgaagatggcattctttacttcgacagcgtggttggcacagactcacacaccactatgattaatagtcttggagttgctgggtggggagtaggcggtattgaagcagtcgttgcaatgcttggccagccaatgggcatggttttgcctggtgtggttggattcaaattgagtgggaagttacgggatggtgtcactactactgacattgttcttaccatgacccaaatgctaaggaagcacggtgctattggcaaattcgttgaattctatggtgttggtgtgggcgagctatctttgcctgctagggccacaattgccaacatgtctccagaatatggagctaccatgggcttcttccctgtagaccaagtagcattggactatctcaaactgacaggccgaagcgatgaaactgtgtcgatgattgaagcatacctgcgagctaacaaaatgtttgtggacaagcatgagcctgagacggaacgcgttttctcttcacatctggagctggaccttagtgaggtggagccttgcgtttcaggccccaaaaggcctcatgatcgtgtccctttgaaggaaatgaagtcagactggcatgcttgcctggacaacgaagttggcttcaagggctatgcggtgccaaaggaacagcaaggcaaagttgtgaaattcgacttccatggaaggccagctgaaatcaagcatggcagtgttgttcttgcagcaatatgtagctccacaaacacatcaaatcccagcgtcatgattggtgctggccttgtggcaaagaaagcctgcgaattaggccttgaggtgaagccatgggtaaagacaagccttacccctggatctgtggttgctaccgagtacttgaaacatagtggccttcaagattatctgaaccagcaagggttccatgtcgctgcgcatggttgcgccacttgtgtgggcaactccggtgacctggatggatctgtatcagctgctatcacagaaaatgatatggttgctgctgcggtgctgtcggccaaccgaaacttcgaggggcgtgtgaaccctctcactcgggctaactaccttgcctcgccgcctctggttgttgcctatgctcttgccggcactgttgacattgactttgagaaagagcccattggagttggaaagggtggtaaggaagttttcttgagggacatatggccttcaaaccaagagatcgatgaggttgtggagtccagcgtgcagactcacctgttcaagaaagtgtacgactcaattatggaacgtaaccctaggtggaaccagctgccggttccaaaggaggcactgtacccatgggaagacaggtccacctacatccgcaagcctacgtacctggagggcatgtccatgacgccgcctgcagccccgcccacggtgacggaggcctactgcctgctcaaccttggggacagcatcaccacggaccacatctcctactcggggaagatccccgagggcacacctgcggccaagtatctgctcgagtatggcgtggagcccaagaacttcagctcctatggtggccgccgcgggaacaacgaggtggtgatgaggggagcgtttgccaatatgaggatcgtgaataagcttcttgatggcaaggctggtccctggacgatccatgttcctaccggggagaagctctatgtttacgacgcggcaatgaagtacaagtcggaaggtcatgacatggtcatcattgctggctccgagtacggcagtggcagctctcgtgactctgctgccaagggaccaatgctactgggtgtcaagtcggtgattgcaaagagcttcgagcggatccaccggagcaacttggtggggatggggatcattcctctctgctttaaagcaggagaggatgccgattcactcggcctcaccggacgtgagcgctacaccatccacctccctaccagcaccgccgagctcagtccaggccaggacgtgaccgtcacaacccacgacggcagatccttcacttgcactcttcgcttggacacacagcttgaggtcacatacttcaaccatggaggcatccttccctacatggtccgcaacctggcagcacagatgaaataagttaaaaagcaagctagcttattggcgcggtgggaataaattaaaaaggtactcagtgccccacgtatttgacgtatgtctgtaaataagtggcacattcgagcgctcttcgctctgccattgaggtggatcgaagctgccacatattttctccgcaggacatcggcacgaattttgtcttagcaaaccagttaattttgtactctttagattctttaattggttccatgctctctttggtacttttcatgtcagtttgctttgcaaacattatcagcgtgcccttgtagatttcgtaatggttatatgtatatgccctattgaaattgtcattttgctttgcaaaaaaatatcagcgtgccgttgtagattttcaaatgtatatgtctgccgtc

SEQ ID NO: 100313 - DNA, 643 bp, Zea Mays
tgtttttttttgaattgatcatttgttggtagcttatggtctactcgatcttgcacatatatatacagatatggttgctgctgcggtgctgtcggccaaccgaaacttcgaggggcgtgtgaaccctctcactcgggctaactaccttgcctcgccgcctctggttgttgcctatgctcttgccggcactgtaagtacattgttatttcttcttccacttggagttctattgctttgtggctggctgacacacacactacgtacggcaacggcaatcgcacaggttgacattgactttgagaaagagcccattggagttggaaagggtggtaaggaagttttcttgagggacatatggccttcaaaccaagagatcgatgaggttgtggagtccagcgtgcagactcacctggagggcatgtccatgacgccgcctgcagccccgcccacggtgacggaggcctactgcctgctcaaccttggggacagcatcaccacggaccacatctcctactcggggaagatccccgagggcacacctgcggccaagtatctgctcgagtatggcgtggagcccaagaacttcagctcctatggtggccgccgcgggaacaacgaggtggtgatgaggggagcgtttgcc

SEQ ID NO: 100314 - DNA, 647 bp, Zea Mays
ggaatccgactgagatgcagaaagataatcttgtggagggacaagcttattctgttatgggattggtaccttcgaactattgcaccgaaatcatgtacttgcatgctagaggatcatctacaacatggaagcccttagcatcagctcagactacagattttaaaccattctttacccctcgtagagcaattgaactcttgaaatttggtgaggtgccgatttcaagtgaatttgatattgcaggtcttattttatatgttggcaatacttatttatgtaacaacaagaaaaagcagtggctttttttaacagatggatctaaatttgtctctgggcaagggtgtgaagagcaagattgtcttctagctgttagcttttcgtccgcaaccactgatgaagactctacattatttagttacactctctctggaaatacagttggttttagtaatctggtcaaacgacagaaagacgagacgaggcaagtatgggtagctgaggcaacagagagctcaagctacactctttccaacgagattcctagaaaatctcacctaaaagaagctgcagttttggctgagagatgggcttctagatcttatcataaaattcaagagctaaaagaaagggttttatgtatagttggc

SEQ ID NO: 100315 - DNA, 675 bp, Zea Mays
atggaggagagcacctcctcggcctggcgcgcgacccagcggctgaggaggcgcgactcccgcctctgcctgcgcaccgccgacgactcgacctcgccgtattcacgcagaggacgccctggatggtggatccgatgcattccatggcctgccctatggcgtcaaggcgacatgttgcgccgaggtggaggccgggttgaacgccgtgtaccggcgagagatgccgaggggctgtacctcgccagcgatttggacaagcggctattgatctacttccccttcatgcaagtggtcaagctacatttcgtgctattcaaaggccccaaggatgacgctaaaatgcatatttatgtaataaatgtcagcaatggcaatgactatctaccaatggacatcgtggagctatcttccgatcatttgatagaggacaatggttctgatgaggttgtattcaaggccatggggagggctatcaataagactatcatggttgtggaattgatcaagaggaggattgttggcctccatcagaataccaccactggatctactgatattactgatatgtgggagccattggaagaaggcctacttctgcttgagacaacaagacatgtctctatgatcactataactctttcaaagaaggagctggacacatcatctatcggttga

SEQ ID NO: 100316 - DNA, 605 bp, Zea Mays
acacaacattgtttcagtattttgttggctcagtgagatagacagaagttgctcttggcttgatacatgaatactacaaaagtaatgctacgggtcttggtgttttctttagtctttactatgctttcgacacatcaagctttgggaaataaggaaaattgtgacaaggataaagatttcattaagcgccaatgcgaaaggtgcattggagttggccgtaaattccctacgaccaaactatgttgcaatgctataaaaagagctgatatggcttgcgtttgtcgtagcataacactagaagagcagctcacaataagcgtcatgaaggttgtggatgttgcaaaggaatgtggcaacccggtgccacctgggaataaatgtggaacttggactgttccaccacaactgctagcaagggtgcatccgtaagggttcaacaaagcgagcaacaaagggcacatggataagagttcaataatggaagcaatcacaggaaaatcttgagataaatgaatgaatgtatgctcaactggcttttggaaaattagatcaatataatatgaggtgtgatttatttatatggccataaatctactcttaataaa

SEQ ID NO: 100317 - DNA, 613 bp, Zea Mays
acacaacattgtttcagtattttgttggctcagtgagatagacaaaagttgctcttggcatgatacatgaatactacaaaagtaatgctacgggtcttggtgttttctttactctttactatgctttcgacacatcaagctttggggaataaggaaaattgtgacaaggataaagatttcattaagcgtcaatgcgaaaagtgcattggagttggtcgtaaattccctacgacacaactatgttgcaatgctataaaaagagctgatatggcttgcgtctgtcgtagcataacactagaagagcagctcacaataagtgtcgtgaaggttgtggatgttgcaaaggaatgtggcaacccggtgccgcctggaaataaatgtggaacttggactgttccaccacaactgctgggatgggtgcatccgtaagggttcaacaaagcgagcaacaaagggcgcatggataggagttcaacaatgaaagcaatcataggaaaatcttgagataaatgaatgaatgtatgctctactggcttttggaaaattagatcaaaataatatgagatgtgatttatttatatggccaaaataaagtgataaaaaaacaaaaaaa

SEQ ID NO: 100318 - DNA, 2223 bp, Zea Mays
agccaacaccctaggaagcattcctgcatctaaaaatctctcatggtgaactcatgtgcacctgcagcatttcttcactcttctgcatcctggcaagctttacttgtcttttttatttctgtgactgcagttggtgccgcagatgctggaggccaaggtcagtgtcctcatttctcctgtggtgatcttcatccttccactatctggcaagctttacttgtatattttttttatttatttatttctgtgactgtagatgctggtggccaaggtccgtgtcctcatttctcctgtggtgatcttggcaacatatccaaacctttccgtaggccaggcgacccagaagagtgcggtgtaaaagcatacgagctggtctgtagcaacggcaaggctacaattcgcatcaacacggggacatattttgtcaccagcatcaactataccaatcgttccttctgggttgtggacgccaatttggatatgcacagcagctgccctcttcctcgttgggatcagtttccttacacttctgagggattgttctggagaagtggtaaacatacccatatcgatttgcccactgatgatgcctctttgtgggcatgctttgttaattgttcgagagcagttaggattacgaataacttggggtacaagcccgttacttgcctgagtgggagcagttcctttgtttatatatatgtacagtatggggcttgcacagtcggatctcttgaacctttttgtggatacttggccgagatttcctttggtaccaatccgaagggtactaatgcaagttatgcagatatcatacaagtggtaaagaagggattttctgttggattcccaaaggacgaatatgattatagctaccataatacttcttggatattcaagacatgcctaaataattttaccaggtacttccacgagcaattgtctagcggaggcatcgttggtataactcgtgctttcttttggagtgatgtatttcttctcaagtgcgcagagagttacaatgccacaactgttattttagatttcgatgtgatatccgtagtgactggtgttaaaatcacaacgttacttgtactgttcaggtttgtgttcacagcactagcagtacagatgttccttgcccacaagtactggaaaacaacgatagcaattgacgctgtcgagaaattcctccacatgcaacaaatgcttggtcctactaggtttgcctacactgacatcactgcgatcactggccatttcagagacaagttgggtcaaggaggatacggctccgtatacaagggtgcactactctcaggcaatatgcatgttgccgtcaagatgctgggcaactcgaactgcaatggggacgagttcatcagtgaggtctccaccatcggtaggattcaccacatcaatgtggttcgccttgtgggcttctgtgcagaggaaatgagaagggcactggtctatgagtacatgcccaatggttctcttgacaagtacatattctcggccgaaagaagtttttcttgggatatgctcaacgagattgctttgggcattgcaaggggaatcaactacctgcatctagggtgcgacatgcagatccttcactttgacatcaagccacacaacattcttttggacagcaattttgtcccaaaagtttctgactttggccttgccaagttgtacccgagagacaagagctttgtgccagcaagcgccatgcggggaactattgggtacatagctcctgaaatgatatctcgtagctttggtgccatatcaagcaaatctgatgtttatagttttggtatgctactgctcgagatggcaggagggcgaaggaacgcagaccaaaatgcagccaactcaagccgagcatactacccagcctgggtttatgaccgcctagcggaacaagacgctggcgagatttctgttgcggcagacatgcatgagttggagaggaaactgtgcatcgttgggctacgttgcattcaaatgaagccgcaggatcgtccgaccatgagcgaggttatagagatgctcgagtgtggcactcatggcctgggcctgcaaatgccttctaggccattcttctgtgatgatgatgatcctaatatgcctgcagcagattcttaccatttctcatcggagcttactgcaatatctgaggaagatggttgaagaaataatacatgtctttatgca

SEQ ID NO: 100319 - DNA, 90 bp, Zea Mays
gtcagagcttctggtagctttgctttcagcttggcaacgatgacccgtggcagtgtgtcatgttcgtgttcagccgcgttgtgtggggtg

SEQ ID NO: 100320 - DNA, 1331 bp, Zea Mays
caaaccactttttcaagctcgttagatagacagtcgagctcggctcgttgaatgagcgagcccagccaagccgaacttggctcgggggctacatgaacaagcacgcatgctcgtccagcaggctagcacagccacttgagatctagaaaatccagatcaacatcacgtacgtcactggtgacgaatggtaggtaaccgaccaaagcacactactgtctgtacccacacatgtggagcacctttatttatgtttatatacacgaagtcgaagccgcagcagctagctagctagcatggccgggaaagagcttacgctgctggggttatgggcgagcccgttcgtgctccgggcgcgcatcgcgctcagcctcaaaggcctcacctacgcttactccgaggagaacctcgacgacaagagcgagcttctcctcagctccaaccccgtgctcaagaaggtgcccgtgctcatccaccacggcaagcccgtctgcgagtcccagatcatcgtgcagtacgtcgacgaggctttccccgccgccgcacctaatttccttccatccgacccctacgaccgcgccattgctcgcttctgggcctcctacgtcgacgacaagttctacagcgcgtggatacccgtgttcaggggcaggacggcggaggagatggcggaggcggcgaggcaggccgtcgcggcgctggagacgctggagcaggcgttcagggagtgctccaaggggaaggccttcttcggaggggacagcgtggggctcgtcgacgtcgtgctcggcggccttgttgggtggctgtacgccaccgaggccatctgcggggtgaaggccctcgacgccggcaggacgccgctgctggcggcgtgggcggagcggttctgcgcgctggagggtgtcaaggggctgatcccggacgtggacaggcttctggagtataccaaggccaggcgggccgtatttggcctgccgccgctccgtccttaggcatagtggacatgtttcttttctttttttaaaaaaaaaaattatatgttctatgtttgtttgaaataaagtactgttatggtgttacacatgtattccaacgtcaactctacgtgctgctatttggtactactctcgttaattgatggtgtgttacataattggaaccaagtctggtttcggttagaaaagtttggccttatacacaacggccgagctccgtaaaaataatgctccggccactctataaatataatgatatacaatttgttttttaattttttgcactatagagacagtaacatttaaaacaattcagtggaactgtgccagataggg

SEQ ID NO: 100321 - DNA, 1323 bp, Zea Mays
caaaccactttttcaagctcgttagatagacagtcgagctcggctcgttgaatgagcgagcccagccaagccgaacttggctcgggggctacatgaacaagcacgcatgctcgtccagcaggctagcacagccacttgagatctagaaaatccagatcaacatcacgtacgtcactggtgacgaatggtaggtaaccgaccaaagcacactactgtctgtacccacacatgtggagcacctttatttatgtttatatacacgaagtcgaagccgcagcagctagctagctagcatggccgggaaagagcttacgctgctggggttatgggcgagcccgttcgtgctccgggcgcgcatcgcgctcagcctcaaaggcctcacctacgcttactccgaggagaacctcgacgacaagagcgagcttctcctcagctccaaccccgtgctcaagaaggtgcccgtgctcatccaccacggcaagcccgtctgcgagtcccagatcatcgtgcagtacgtcgacgaggctttccccgccgccgcacctaatttccttccatccgacccctacgaccgcgccattgctcgcttctgggcctcctacgtcgacgacaagcgcgtggatacccgtgttcaggggcaggacggcggaggagatggcggaggcggcgaggcaggccgtcgcggcgctggagacgctggagcaggcgttcagggagtgctccaaggggaaggccttcttcggaggggacagcgtggggctcgtcgacgtcgtgctcggcggccttgttgggtggctgtacgccaccgaggccatctgcggggtgaaggccctcgacgccggcaggacgccgctgctggcggcgtgggcggagcggttctgcgcgctggagggtgtcaaggggctgatcccggacgtggacaggcttctggagtataccaaggccaggcgggccgtatttggcctgccgccgctccgtccttaggcatagtggacatgtttcttttctttttttaaaaaaaaaaattatatgttctatgtttgtttgaaataaagtactgttatggtgttacacatgtattccaacgtcaactctacgtgctgctatttggtactactctcgttaattgatggtgtgttacataattggaaccaagtctggtttcggttagaaaagtttggccttatacacaacggccgagctccgtaaaaataatgctccggccactctataaatataatgatatacaatttgttttttaattttttgcactatagagacagtaacatttaaaacaattcagtggaactgtgccagataggg

SEQ ID NO: 100322 - DNA, 1302 bp, Zea Mays
caaaccactttttcaagctcgttagatagacagtcgagctcggctcgttgaatgagcgagcccagccaagccgaacttggctcgggggctacatgaacaagcacgcatgctcgtccagcaggctagcacagccacttgagatctagaaaatccagatcaacatcacgtacgtcactggtgacgaatggtaggtaaccgaccaaagcacactactgtctgtacccacacatgtggagcacctttatttatgtttatatacacgaagtcgaagccgcagcagctagctagctagcatggccgggaaagagcttacgctgctggggttatgggcgagcccgttcgtgctccgggcgcgcatcgcgctcagcctcaaaggcctcacctacgcttactccgaggagaacctcgacgacaagagcgagcttctcctcagctccaaccccgtgctcaagaaggtgcccgtgctcatccaccacggcaagcccgtctgcgagtcccagatcatcgtgcagtacgtcgacgaggctttccccgccgccgcacctaatttccttccatccgacccctacgaccgcgccattgctcgcttctgggcctcctacgtcgacgacaaggggcaggacggcggaggagatggcggaggcggcgaggcaggccgtcgcggcgctggagacgctggagcaggcgttcagggagtgctccaaggggaaggccttcttcggaggggacagcgtggggctcgtcgacgtcgtgctcggcggccttgttgggtggctgtacgccaccgaggccatctgcggggtgaaggccctcgacgccggcaggacgccgctgctggcggcgtgggcggagcggttctgcgcgctggagggtgtcaaggggctgatcccggacgtggacaggcttctggagtataccaaggccaggcgggccgtatttggcctgccgccgctccgtccttaggcatagtggacatgtttcttttctttttttaaaaaaaaaaattatatgttctatgtttgtttgaaataaagtactgttatggtgttacacatgtattccaacgtcaactctacgtgctgctatttggtactactctcgttaattgatggtgtgttacataattggaaccaagtctggtttcggttagaaaagtttggccttatacacaacggccgagctccgtaaaaataatgctccggccactctataaatataatgatatacaatttgttttttaattttttgcactatagagacagtaacatttaaaacaattcagtggaactgtgccagataggg

SEQ ID NO: 100323 - DNA, 1406 bp, Zea Mays
caaaccactttttcaagctcgttagatagacagtcgagctcggctcgttgaatgagcgagcccagccaagccgaacttggctcgggggctacatgaacaagcacgcatgctcgtccagcaggctagcacagccacttgagatctagaaaatccagatcaacatcacgtacgtcactggtgacgaatggtaggtaaccgaccaaagcacactactgtctgtacccacacatgtggagcacctttatttatgtttatatacacgaagtcgaagccgcagcagctagctagctagcatggccgggaaagagcttacgctgctggggttatgggcgagcccgttcgtgctccgggcgcgcatcgcgctcagcctcaaaggcctcacctacgcttactccgaggagaacctcgacgacaagagcgagcttctcctcagctccaaccccgtgctcaagaaggtgcccgtgctcatccaccacggcaagcccgtctgcgagtcccagatcatcgtgcagtacgtcgacgaggctttccccgccgccgcacctaatttccttccatccgacccctacgaccgcgccattgctcgcttctgggcctcctacgtcgacgacaaggtatctaccattttttttttgttttctagtgtacatacggtcagtttcaccgatgcatttttttgctgatggcagttctacagcgcgtggatacccgtgttcaggggcaggacggcggaggagatggcggaggcggcgaggcaggccgtcgcggcgctggagacgctggagcaggcgttcagggagtgctccaaggggaaggccttcttcggaggggacagcgtggggctcgtcgacgtcgtgctcggcggccttgttgggtggctgtacgccaccgaggccatctgcggggtgaaggccctcgacgccggcaggacgccgctgctggcggcgtgggcggagcggttctgcgcgctggagggtgtcaaggggctgatcccggacgtggacaggcttctggagtataccaaggccaggcgggccgtatttggcctgccgccgctccgtccttaggcatagtggacatgtttcttttctttttttaaaaaaaaaaattatatgttctatgtttgtttgaaataaagtactgttatggtgttacacatgtattccaacgtcaactctacgtgctgctatttggtactactctcgttaattgatggtgtgttacataattggaaccaagtctggtttcggttagaaaagtttggccttatacacaacggccgagctccgtaaaaataatgctccggccactctataaatataatgatatacaatttgttttttaattttttgcactatagagacagtaacatttaaaacaattcagtggaactgtgccagataggg

SEQ ID NO: 100324 - DNA, 1092 bp, Zea Mays
atctacccatatgcgataaaataaaatctttcaattacctgcttccggcagcggtacgatggccgctgcgagaatggcgctcgtctcttgcgcccgccgcctcccgtccttaccctctccgctcaccctctcgaggccccgcgccggcgccgtctcatttctggctgcccagccgtcgccggcgacggcaccgagatccggcaggaatcttgctctcttctgttctttatcaccgacgtcgccatcgctaactgaggccgccgtagcactgccgccaccgaaggctgcggtggaagagacgaagccccctgtgccgagcggggacgagaagggggaaccgactgtggaggagctagcgggcctgctggacgtccgggtgggccgagtggtgaaggcgtggaggcacccggaggcggacaccctctacgttgaggaggtggacgtaggtgaggcggagccccggaccatctgcagcggcctcgtcaacttcctccccatcgaagaactccaggacagaaacgtcattgttcttgctaacctcaaaccaaggaacatgcgtggcatcaagtcaaatggcatgctcatggctgcctctgatgcttcccatgagaatgtggagctgctcatcccttcagaaggttcctttcctggtgaaagagtatggttcggttccgaagaagaaaagaaccgtcaatctgaccctgcatcaccaaatcaggtccaaaagaagaagatctgggaagctgttcagcctcatcttagaacaacagataactgcattgcggttcttggtgataaacaaatgcgtacctctgcaggcctagttttctgcaaatcgcttcagggtgcaagagtgtcataaatctttatggccaacatctttcttgtatcatggaatcgtgtgtcatgtatcttccctgcaaataataactaactatatgaggagagcagcagggaaagaattttctttccaactactgagataatcactgtactggaaccattcacatttagttctcacttttcagtgttaaaacaacgtgcttcctgggctgacgcaataatcttgatgccttggggcgagttattaca

SEQ ID NO: 100325 - DNA, 2237 bp, Zea Mays
aaacacacgattcgcctcccaacgctactacccctttccttccaacttccgcccgccggcgccagccgcaaccgaacaatccaagcaacgcgtcaggcgccgccatggccacgtggcgcctccgccgcgccggtgccgccctagctgcctcctccaccctcgccgctgtcctcgccgcctcatcggcttccgccaccgacccgtccgccgccgccctagaagcggcaaggcagcgtgttgcgcggtcgggggccacgccgcccctgcgagacgcgcagcgtgcggcgctggcagggtccacccctgctgagcccctagacgtgctcgtcgttggcggcggcgccaccggatgcggcgtcgcgctcgatgccgccacccgcgggctccgtgtaggccttgtggagcgcgaggatttctcttctggaacctcctcccgatccaccaaactcatccatggcggcgtgcgctacttggagaaggcagtgttcaatcttgattatgggcagctgaaacttgtttttcatgcacttaaggaacgcaaacaagtcatcgagaatgctccccatttgtgccatgctttgccatgcatgactccttgctttaactggtttgaggttgtatactactggtttggtttgaagctttatgatcttgttgctggaagaaggctactacatttgtcccgatattattctgtggatgaatcagttgagcttttcccaacccttgcaaaaaacggacataattgtagcctaaaaggaacagttgtgtactatgatggtcaaatgaatgactcacggctgaatgtggggttggcatgcactgctgcagttgttggtgcagctgttctcaattatgctgaagtggtctctctcattaaggatgaatcgggggagagaatcattggtgcacgcgtccgtgacacactatcaggtagaataaagtaaggagtttgaaaccttcgcaaaggtggttgttaatgcagcaggaccattctgtgactctgtgaggaagatggctgacagtaccgtagcacctatgatctgtcctagtagtggtgtgcacattgtacttcctgattactactcccctgaagggatggggctaattgttccaaaaaccaaggatggcagagttgtatttatgttgccatggttaggaaggaccgttgcgggaacaactgattctaacacagcaataacaatgcttcctgaaccacacgaggatgaaatacagttcatattggatgcaatctctgactatcttaatgttcaggtaaggcgttcagatgttctttctgcctggagtggtatacgtcctttggcgatggatccatcagcaaagaataccgagagtatttctcgagatcatgttgtatttgaagactaccccgggttaataacaattaccggtggaaaatggacaacctataggagtatggctgaagatgctgtaaatgcagcagtcatgtctgggaatttgaaaccagccaatggttgtttgactgataatttgcatattgttggtggatatggatgggatcctgcttcttttacggttcttgctcagaattataagcgaatgaagaagacatatggtggcaaggttattccaggtgcaatggacagtgctgtatcgaaacatttatcgcatgcatatggatctttggctgaacaagtggctactattgcccagaacgaaggcttgggaaagcgccttgctcatggatacccatttttggaagctgaagtagcatactgtgctcgttatgagtactgtgaatctgccgtggattttgttgcaaggagatgccggcttgctttccttgacacagatgctgctggtagagcattgccccgaatcattgaaattttagcttcagagcacaagtgggacaaggcaaggaagaaggcggagctgcagaagggtagagagttcttggaaacattcaagtcatctaagaacgcccaattccatgatgggaagcataatggacgttcatgaccgaatatgcagttttctgaataagtgttgattttacacatgcacaagcaggctccgatacaagagtgagcctgcgaatgcagaaaggtttcgtttccacatttctacgcatggctgtgaaaatcggcgtgctggtttccagcagaataagatgtggtcacggcactatgtaattgtaaataccacatcatattagtcgattttgaaataaactggaaccaagaatttgtact

SEQ ID NO: 100326 - DNA, 2227 bp, Zea Mays
aaacacacgattcgcctcccaacgctactacccctttccttccaacttccgcccgccggcgccagccgcaaccgaacaatccaagcaacgcgtcaggcgccgccatggccacgtggcgcctccgccgcgccggtgccgccctagctgcctcctccaccctcgccgctgtcctcgccgcctcatcggcttccgccaccgacccgtccgccgccgccctagaagcggcaaggcagcgtgttgcgcggtcgggggccacgccgcccctgcgagacgcgcagcgtgcggcgctggcagggtccacccctgctgagcccctagacgtgctcgtcgttggcggcggcgccaccggatgcggcgtcgcgctcgatgccgccacccgcgggctccgtgtaggccttgtggagcgcgaggatttctcttctggaacctcctcccgatccaccaaactcatccatggcggcgtgcgctacttggagaaggcagtgttcaatcttgattatgggcagctgaaacttgtttttcatgcacttaaggaacgcaaacaagtcatcgagaatgctccccatttgtgccatgctttgccatgcatgactccttgctttaactggtttgaggttgtatactactggtttggtttgaagctttatgatcttgttgctggaagaaggctactacatttgtcccgatattattctgtggatgaatcagttgagcttttcccaacccttgcaaaaaacggacataattgtagcctaaaaggaacagttgtgtactatgatggtcaaatgaatgactcacggctgaatgtggggttggcatgcactgctgcagttgttggtgcagctgttctcaattatgctgaagtggtctctctcattaaggatgaatcgggggagagaatcattggtgcacgcgtccgtgacacactatcaggtaaggagtttgaaaccttcgcaaaggtggttgttaatgcagcaggaccattctgtgactctgtgaggaagatggctgacagtaccgtagcacctatgatctgtcctagtagtggtgtgcacattgtacttcctgattactactcccctgaagggatggggctaattgttccaaaaaccaaggatggcagagttgtatttatgttgccatggttaggaaggaccgttgcgggaacaactgattctaacacagcaataacaatgcttcctgaaccacacgaggatgaaatacagttcatattggatgcaatctctgactatcttaatgttcaggtaaggcgttcagatgttctttctgcctggagtggtatacgtcctttggcgatggatccatcagcaaagaataccgagagtatttctcgagatcatgttgtatttgaagactaccccgggttaataacaattaccggtggaaaatggacaacctataggagtatggctgaagatgctgtaaatgcagcagtcatgtctgggaatttgaaaccagccaatggttgtttgactgataatttgcatattgttggtggatatggatgggatcctgcttcttttacggttcttgctcagaattataagcgaatgaagaagacatatggtggcaaggttattccaggtgcaatggacagtgctgtatcgaaacatttatcgcatgcatatggatctttggctgaacaagtggctactattgcccagaacgaaggcttgggaaagcgccttgctcatggatacccatttttggaagctgaagtagcatactgtgctcgttatgagtactgtgaatctgccgtggattttgttgcaaggagatgccggcttgctttccttgacacagatgctgctggtagagcattgccccgaatcattgaaattttagcttcagagcacaagtgggacaaggcaaggaagaaggcggagctgcagaagggtagagagttcttggaaacattcaagtcatctaagaacgcccaattccatgatgggaagcataatggacgttcatgaccgaatatgcagttttctgaataagtgttgattttacacatgcacaagcaggctccgatacaagagtgagcctgcgaatgcagaaaggtttcgtttccacatttctacgcatggctgtgaaaatcggcgtgctggtttccagcagaataagatgtggtcacggcactatgtaattgtaaataccacatcatattagtcgattttgaaataaactggaaccaagaatttgtact

SEQ ID NO: 100327 - DNA, 2270 bp, Zea Mays
aaacacacgattcgcctcccaacgctactacccctttccttccaacttccgcccgccggcgccagccgcaaccgaacaatccaagcaacgcgtcaggcgccgccatggccacgtggcgcctccgccgcgccggtgccgccctagctgcctcctccaccctcgccgctgtcctcgccgcctcatcggcttccgccaccgacccgtccgccgccgccctagaagcggcaaggcagcgtgttgcgcggtcgggggccacgccgcccctgcgagacgcgcagcgtgcggcgctggcagggtccacccctgctgagcccctagacgtgctcgtcgttggcggcggcgccaccggatgcggcgtcgcgctcgatgccgccacccgcgggctccgtgtaggccttgtggagcgcgaggatttctcttctggaacctcctcccgatccaccaaactcatccatggcggcgtgcgctacttggagaaggcagtgttcaatcttgattatgggcagctgaaacttgtttttcatgcacttaaggaacgcaaacaagtcatcgagaatgctccccatttgtgccatgctttgccatgcatgactccttgctttaactggtttgaggttgtatactactggtttggtttgaagctttatgatcttgttgctggaagaaggctactacatttgtcccgatattattctgtggatgaatcagttgagcttttcccaacccttgcaaaaaacggacataattgtagcctaaaaggaacagttgtgtactatgatggtcaaatgaatgactcacggctgaatgtggggttggcatgcactgctgcagttgttggtgcagctgttctcaattatgctgaagtggtctctctcattaaggatgaatcgggggagagaatcattggtgcacgcgtccgtgacacactatcaggtaaggagtttgaaaccttcgcaaaggtggttgttaatgcagcaggaccattctgtgactctgtgaggaagatggctgacagtaccgtagcacctatgatctgtcctagtagtggtgtgcacattgtacttcctgattactactcccctgaagggatggggctaattgttccaaaaaccaaggatggcagagttgtatttatgttgccatggttaggaaggaccgttgcgggaacaactgattctaacacagcaataacaatgcttcctgaaccacacgaggatgaaatacagttcatattggatgcaatctctgactatcttaatgttcaggtaaggcgttcagatgttctttctgcctggagtggtatacgtcctttggcgatggatccatcagcaaagaataccgagagtatttctcgagatcatgttgtatttgaagactaccccgggttaataacaattaccggtggaaaatggacaacctataggagtatggctgaagatgctgtaaatgcagcagtcatgtctgggaatttgaaaccagccaatggttgtttgactgataatttgcatattgttggtggatatggatgggatcctgcttcttttacggttcttgctcagaattataagcgaatgaagaagacatatggtggcaaggttattccaggtgcaatggacagtgctgtatcgaaacatttatcgcatgcatatggatctttggctgaacaagtggctactattgcccagaacgaaggcttgggaaagcgccttgctcatggatacccatttttggaagctgaagtagcatactgtgctcgttatgagtactgtgaatctgccgtggattttgttgcaaggagatgccggcttgctttccttgacacagatgctgctggtagagcattgccccgaatcattgaaattttagcttcagagcacaagtgggacaaggcaaggaagaaggcggagctgcagaagggtagagagttcttggaaacattcaagtcatctaagaacgcccaattccatgatgggaagcataatggacgttcatgaccgaatatgcagttttctgaataagtgttgattttacacatgcacaagcaggctccgatacaagagtgagcctgcgaatgcagaaaggtttcgtttccacatttctacgcatggctgtgaaaatcggcgtgctggtttccagcagaataagatgtggtcacggcactatgtaattgtaaataccacatcatattagtcgattttgaaataaactggaaccaagaatttgtacttttaattgttattcttgcatgttatatagttcgaaagaggagc

SEQ ID NO: 100328 - DNA, 751 bp, Zea Mays
agcgacagggcaaggagccagggccgctccgctccgctccgctcgtgctctgctcctgctctctctctctctcggcgtcgattgggcgaccgccgccgcctcccccaggtcttcgctgggcccgtcgccggcgccgagcacccaccagggcaagttttacttgataatgtggacatcaagacgttgcaattaaagcgacttagagaccagatcggattggtgaatcaggaacctactctttttgcaactacaattcttgagaatattctttttggcaaacctgaggcgacaaaggcagaggttgggtctacgactacttccgcagttttctcctaaacacatttgctctgatgttgtttgtcaccataactggcgctgaaccgcgctggtggcaaggctggaaacaagggtgctgaagctgctcttacttccattgagatggcctctctgttccggcatcacttaggctgacactttgcatattctggtttctatacacgagctcacaagacatgtttctaaacctggcacaatgaataattgtcaccatgaggtcatgaataagcacaactgtcacggcgtgtgctagggcagtggggctgtcgccaaggacatgcagcttgtgaagcagtgctggagccgtccccatcgccgagcagctcgtgagggtaattcaagcacgctaatgcagtctggtcctacaatagcgatccttggtcttcacctacatcttcacctaccgaacatcagg

SEQ ID NO: 100329 - DNA, 619 bp, Zea Mays
agcgacagggcaaggagccagggccgctccgctccgctccgctcgtgctctgctcctgctctctctctctctcggcgtcgattgggcgaccgccgccgcctcccccaggtcttcgctgggcccgtcgccggcgccgagcacccaccagggcaagttttacttgataatgtggacatcaagacgttgcaattaaagcgacttagagaccagatcggattggtgaatcaggaacctactctttttgcaactacaattcttgagaatattctttttggcaaacctgaggcgacaaaggcagaggttgggtctacgactacttccgcagtagattaaaggagccctagctttcggaggacaacccagatgccttcaaagttcaaaatgacggtgatgaaggtggacaagaaacaaaattttggatggttcaaaattttgctataggtcctagcaacgcttatgtgttgctataggggggttattttgtagtgaactcccaggccatatgctagcttactttgaggagtgcccactatttgtgcatgctacaggcgctatcattacatttccatgacctgtaaagtggtgacatctttaaatacagaatggccacattagcgaa

SEQ ID NO: 100330 - DNA, 1986 bp, Zea Mays
gaggatgatgttgttgttggtagtaagaggaaaccaggaccaaaattaaaatctaaagtttggttagagtttgatagaattgagttaaatggggtttggaaagcaaaatgcaaatggtgtaagaagcatctaggaggggacacaagaaatggcacaagtcacttgagtggccatcttgagatttgtccagatagggctgttagaaaaggtataaaacagtcgtctcttaaattgactgcaaatccacatgatgggactgtgattttggagaaatatgtttttgatcaagaaatagctagaaaagagcttgcattaatgactattatccatgagtaccctttgtctatggtggaccatgttggatttcgcaagttttgtgcagcattgcaaccattattcaaagtagtgtctaggaatacacttaggaaggatatccttgatatgtatgaagtgcaaaaacaatccatgttgaagtattttcggaagttgagttctcgagttgctattacttctgatttatggacagcaaaccaccaaaagaaaggctacatggccgtgacagcacactttatagatgatgactggaagctaaagagttttcttattaggttcctatatgttccagctccacatacaactgaggttattgctgatcttcttcatgatgttctccttgactggcatatcgagaggaatttgtctactataactcttgataattgtagcacaaatgatagtgttatgagaaatatggttgggacctccaatgagaacctcagacaaagaatggacactgtgaaaggcaagttgcccctctcatcttgtatgttacaaggtaaattagtccatatgagatgtgcttgccatattttaaaccttgttgtgaaagatggaatgagtgtaatggaacatggaattgatagtattagagagattgttggattttggtctgccacacctaaaagacatgagaaatttgagaaaatggcaatgcaaatgaagggtaaatatgacaaaaagatagctcttgactgcaaaactagatggaactctacttatctaatgcttaacactgctttgctgtacaaagatgtttttgaacgccttgctgctcgtgctccttgtattccaactggagatgattggcagtttgctaaggacctttgtgatagattgaagattttctatgatgtcacagagttgttatctggcactaactatgtcacagccaacattttctttcccaaaatcaccaatatttatttggcaattaggaagtggcaagtaagtgctaacccaaaggttgaagaaatgtctagtaaaatgaaagagaagttcaacaaatattggtttgatgtgcatggtttgatggctgttggtgctgtcctagatcctaggtataaacttcatcttttgaacgtactttttctaaaaatccatggatctgaaattacaagtatggaggctgttaacaaagtcaaggatatcctttataacttggttttagagtatcaagatactatagaagttgttgccacaacagatggtgctcaacctaggacaagtagtgctcctaatgacatgtttgaggaggattggatggacacttttgatgattacatgtccaagcaaccagacgtgacctccacttatgtgcgcacagagatggatttgtacttagaggaaccacttcttcctaggacacatgatttggatatcattcagtggtggcagcatgctgggcttaaatatcctactttgagaaagattgcacgtgatgttcttgcaattccggtttcaacagtggcatctgagtccgtgtttagcacaggaggaagaataattagtccacaccgtagtaagcttgcaccatcaatggtggaagcactcatgtgtatgtaggcttggtcccgtgctgacatgttagggtctccaactatgatgggtgttttgatgacttgtcttgatgaacaagatgaagagatg

SEQ ID NO: 100331 - DNA, 2246 bp, Zea Mays
tgccgagtgaaaaaggcatttgcgagtgtttggaatattcggcaaagaatgtcagtttggtagtggagctacaaagttgtagatgtttttatataaattttatcttcaaccgagttcctatgcaggtacctcatcttagttgatgacatatggtctgcagaaacgtggaagaggatatcaaagtctttgcctgacaatgataagggcagtagaattatagttacttcgaggcttcgtgctgttggtgcgacatgctgccagaatggaaaggatcacctctgtgcagttgattttctccgtgacgaagatgctgggcattcagtcgaagtttttctgaatcgtctaagagccacaacgatcacatggtcccggaaattatagaccttgaagatctatggaggaggtgtgggggccagcctttggccatagtcaccatggctggtcttgtggcctgcaacctgaaccaaccgatcagttactgggaggaacttgggaaattattgccagcgcgagagatctccaatactcgcggggctccaaaccaagtaaattctcttactttggatggggttaaaaggatccttgattgttgctacaacgatctgcctggagatgtcaagacctgcttgctgtacttgggcatgtttccaaagggctgtaagatcagtaggaagtgtgtgacccggcgatggatagctgaaggttttgttagtaggaggcatgggctgatggaggaggaagtcgcggagacatatttcaaccagcttctaagaaggaagttgatccgtcctgtggaccacagcagcaacgggaggctaaaaacctttcaggctcatgacatggttcttgattatattgcgtccaaggccagcgaggagaactttatcactgtggtcggcggccactggatgatgccagcgcccagcggcaaagtgcgtcgactttccatgcagagcaccagtcgtcccaaggcggccgcaggagattattcaacaactagaggcatgaatttgtctcaggtgcggtcactggccgcttttgggagcctcgcgcagctgcctttccaagcgttcaacaacaggatcatgcaagtcctagatttccaaggcctcaagggatttaagaacagacatatgaaacacatctgtgaaatgcttgttctcaagtacctgagcctcagaggaacagatatcaccgaaatcccgtcgaggattgggaaacttgagtatctagagacgcttgacataagggagaccgatgtcgtggagctgccaaaagatgtgaagcaactaaaaaggatcagcagcatacttggtgggaacaagcacaagaaccctcggaaaggcctgaggctgccccaagaaaagagcagaaagaagaagagacgacggacgacggacgacgacgggatgatgaaagcactccgtatactgtctgggatcgagatcaacgagaatacagacgtaagtgggcttcaccagttgacggagctaaagaagcttacagtttacatgctaaacgtgctagacgaatacagagctgacatctttgaacagctgctctcttctatcgagtatctttgcagctgcggtctgcaaacccttgcgatcaatgacgaagattctaaatttacccagtcactggacaagatgtctgcagctccaagatatctcgtcgcccttgaactctccggaaagttggtgaaacccccagaatggatcgataagctactgacactgaacaagctaaccctttccatcaccattcttcggactcctactttcgagaaactccgcagcttgccgttgctgtattctctaaccttttcattcagtgcagtaaagcaggatcagcaggacgacatcaaggaaattctggaggagaacaaatcaaccacagatggtgagatctttgtgccaaaaggattccagaatcttaaactccttcgtttctttgcaccacatattccaaagctggggttttctgacaatgcaatgccagtacttgagacaattgaggcgcggtttaaagccttcgaaggtctgtttggcgttgacacactagaaaatctcaaaggggtacatctcagagaagctaaagtgggggaaaatggcaaggaaatagcagacattaacgaaatcttggtacatgatttgaaagatagcaccgagggactcaaggcaatcgttgatcacactttcatcacttattgaaatattgtcgccgccctcttctcattattatca

SEQ ID NO: 100332 - DNA, 992 bp, Zea Mays
gctatagctagatggagctggtggtaggtgcttcggaatccaccatgaacactctcctgggcaagctgggcaaccttctcgcccaggagtatgctatgctcaggggcgtccgcggtgacatccagtacatcaacgacgagctcgccagcatgaaggctttccttctcgaccttgctcgggacaaccaagacaaccggaggaaggactggatgaagcagatccgtgagatggcctacgactgcgaggactgcatagatgacttcgcccaccgcctccccaaggattcatccaacttgctgaacaccaaatgctggcccaggtggatggctacactgatctatgacctcacgacgtgctggcctcgccgtgagatcgcttgcaacattgctgagctcaaggtccgggcgcaactgattgccgaacgacgcgtaagatatggagtgaaggaaccggacagcagcggaagcatgcctgctgacgcccccccggagaacattgctgaggaccagctcgcaaggcgagatctcaccattaaggaacccgtagggatggggcacgtcatggcggatcttgagaggtgggtgaagcacgacgagcagggcgcaggcggccagcgagctgtcgcgtccattgtaggatttgggggcgtggggaagaccaccgttgccatggcactgtacaagaaagtcatgaaggattttgactgccgggcgtgggtcactgtgtcccagaactacgacatagaagccgtcctccgtgagatcctcaagcaaatcaacccagattacatgcatcaagacggcggcactgctgcaaccatctctgagaagaccaagaccaacaggacagcatcagcatccattgcttgcaaattattgaaccgagctttgaaccaccgcacaggccacacgcatggaggaggcactgctggaagctctaagaaaaatgacaccagcaaagctgtaatggagcacctcaaagggaagagctaa

SEQ ID NO: 100333 - DNA, 733 bp, Zea Mays
tgagggacttgggtatcctatgacgaccacacctgcgccttcaaaagggtcgagatgcatgtaacctcaaactgcgccagtagcataccataccatagaagctgaagagaccaaggacaaggacgacctgccttgcatggcgcaatcggtgaaaatattgtgtaaggatggcttcaacttgtacgtcaccattcgtggcaataaggccgttcttgcccctgaagatcccgacgacgaaatgcaggaatggttcaaggactactccagggtaagcagtgtgacggatgacaacggtcaaagggtgttcgcgctggtaaacaaggagacgcaacaagccatggtaaacagaagggacgagcaggaggtgcaacttgttccatattacaaagatgacgaccgtgtggatatctccatgctttggacagagctcccagaggaccacggcgacggctttcaccaaattgcagcgctcaagaacacatatgaggccctggacgggctaggcggcaattgcaaagaggggacgatcgttgggatagatcctacgcattattcatatctcggaactgttaataagaatcagctgtggaagatcgttgataaagggaccgctaggcgcttgaccaaagagctaggactaggaggagcgcgtctaaaaaagttggctcccatttctttacgtaactaataaaacttcacaatataataaaatttatgctctgtgttgtgctaa

SEQ ID NO: 100334 - DNA, 237 bp, Zea Mays
atggcccgacagcctaacgtgacagcccggcacagtcagcaggcccgctgctatgcctgggccagagctgtggcccacgggcattgggcccatgccgggacgcggtttggccatctgtatacggagcaacctcaaacaccatggagtccattgcgccaatgtggtctcagaaacgacctaatgcttgcaagagccaagaacacaatgtacgagaaccctgtggtagtgcccgcttga

SEQ ID NO: 100335 - DNA, 109 bp, Zea Mays
caaattatgaaatgtcttaagggttttctcacagttcatgtaaactttacaactgtgctaaatataccaacgagtacaatgctgtaaatgaaaaaggatagctcaagaa

SEQ ID NO: 100336 - DNA, 1702 bp, Zea Mays
atgccatacaaaattttgccacctcgggcaaatgactcatcctgtagtagtgtattgtgtgagtgtcagatcatggaagctgttgcagagtttcaactggcgaactggacccctgtggattatgcgtccatcgacatacctggtggtgcctgcggcctccaagcatatgactatgatgtgcagctgcagcaccacctcgctgagtactattctgcagcctcacaacacaacagtaatattgttgccaaagcagcaaagatctcctcgaacgacgatagtgacgatgctagcactagcaggagcgaggtgagaaaagtagtagaccggtttaaggctgatatggagatgatgaaagagaagatgcatagatacccagcatgccttggtgctgtcgataaatcttataccgtgccgaggattgtggccatcggcccctaccactgtggcatggagcacctcaagaaggcggaggaagtgaagcaggttgctgcctggcagtgtaccgggacaggcaagttactgaaggagatgtatgaagagctgatccccgtcgcagacgccgcctatgacttgtacgacaaggatgcgatacaaggcgttgccgaagatgacttccggcatatgatgttcttcgacgcttgcttcttggtgcagttcatgctttcacgggctggttcctccaaaattgataagagcttgcaggtttacttgaggcataaccgctacgacatcttccatgacatcatgctgcttgagaaccagctcccatggatggtggtcgaagcagtcatgagatttatgccacaaccatcgacgatacccaagagcttcgttcacagaatgagacgctgtatgatgccgtacgaccatcgtgagcctcctgaaccgaagccttttatctggtatgaagactacaatccacctcatctccttggcctcctccggtactacattgttggccgaagatgcgagtgcgacatcgacgatgacgaggaagagaaaccggagcccaagaacatgtcgttttctgccagcgccatggaccttgccgagatcggcatcacactcaaggccaacaagacgatgcagctcattgacatgcatctcaatcgtccgaaagcaggggctgttttcaccgagctttgcttggcgccgctgtccctggaccgcgatcgtgcaagctacctcgtcaacatggcggctcatgagctgtgcgcggtggagagttttggaggtgccaaggaagaggactctgctgtctgctcctacgttctgctcctggctaatttggtatacagggaggaggaagttcaggagctacgggagagaggtatcatccagagaggaggagggctcaccaatgaggaggcgctctgcttcttcaccaacttccagaatctgcgcatgggaccgcgctactatcgcatcatgcaagacatcgcgatttacagggaaaatagcctcataaagaccaagatacatgggtttctccacaaccacaagaaagccatcgccgcggttgtcaccggcattggtgctgttggcgggatcataggggcactcctgtctatcaaaaagtccatttgattttatctataccacggcatgaaatgttgttgtatctgtatgtgctttgattgtcaatttcctagctattttatgtacactcaaattaatgacgttgcttgcgtatttttttatt

SEQ ID NO: 100337 - DNA, 3873 bp, Zea Mays
tggaagaaagagaaacaagagagagactggcagtgtgttagctgagcctcctcgctcgtctcctcctcgccgatccccccgcactcactctgcgttgaatgcatccattcttccgtctccattgagatcatcgccactcccaggggcgggcagcaaggaagcaagccttgcttggtgcttggtgccattgtgcaccgcccgagcccccaaacaccgcgcactttttcatgcgtctgcccttgccattgccatcgccaagccccatgcgccgccgccacctccccctcccccttccccttcttccccttgtcttactccacctcctcttcgcggcgtcctctggctcgccttcgtcagaggtcgccttcttgacggcctggctcaacaccacggccgcgcgcccgccggactggtcgccggccgcattgtccccgtgcaactggtcgcacgtctcctgcgccggcgggacaggcgagacgggcgccgtcacgtccgtgtccttccagtccgtgcacctcgcggtcccgctcccggcgggcctctgcgccgcgctgccggggctcgtgtcgtttgtcgtctcggatgccaacctcacaggcggcgtccccgatgacctgtggcggtgccgccgcctcaccgtgctagatatcagcggcaacgcgctcaccggctccatcccgtcatcgctcgggaacgccacggcgctcgagaacttggcgctcaactccaaccagctctccgggcccatcccgccggagcttgcggcgcttgcgcccacgctcaggaacctgctcctcttcgacaaccgcctgtccggggagctcccgccgtctctcggcgacctgctcttgctcgagtcgttgcgcgccggcggcaaccatgacctggcgggcttgatacccgagtccttctccaggctgtccagcctcgtcgtgctcggcctcgccgacaccaagatctccggcccgctcccggcgtcgctgggccagctccagagcctccagacgctgtccatttacaccacggcgctctccggcgccatcccgccggagctcggcaactgctccaacctcaccagcatctacctctacgagaactcgctgtccggccctctgccaccgtcgctcggcgcgctgccgcggctgcagaagctgctgctgtggcagaacgcgctcacgggccccatcccggagtccttcggcaacctcacttcgctcgtctcgctcgacctctccatcaactccatctccggcaccatcccggcgtcgctcgggcggctgccggcgctgcaggacctcatgctcagcgacaacaacatcaccggcaccatcccgccgttgctcgccaacgccacgtcgctggtgcagctgcaggtcgacaccaacgagatctccggcctcatcccgcccgagcttggtcgcctctctggcttgcaggtgctcttcgcctggcagaaccagctggagggcgccatcccagcgacgctcgcgtccctggcgaacctccaggcgctcgacctctcgcacaaccacctcaccggcatcataccgccgggcctcttcctgctccgcaacctcacgaagctgctgctcctgtccaatgatctctccgggccgctgccgctggagatcggcaaggctgccagcctcgtgcgcttgcgcctcggtggcaaccgcattgcggggtcgatccccgcgtccgtgtctggcatgaagagcatcaacttcctcgacctcggaagcaatcggctagccggtccggtgccggccgagctgggcaactgctcgcagctccagatgcttgacctgagtaacaactcgctcacggggccgctgccggtgtcgctcgccgcggtgcacggcctgcaggagctcgacgtctcgcacaacaggcttaacggcgctgtaccagacgcgctcggcaggctggagacgctgagcaggctcgtgctcagcggcaactcgctgtcgggaccgataccgccggcgctcggtcagtgccgcaacctggagctcctcgacctgagtgacaacgtgctcaccggaaacatccccgacgagctctgcggcatcgacgggctagacatcgcgctgaacttgagccggaacgccctcaccgggccgatcccggcgaagatctcggagctgagcaagctctcagtgctcgacctctcgtacaacgcgctcaacggaaaccttgcgccgctcgccgggctcgacaacctcgtcacgctcaacgtgtcgaacaacaacttctccgggtacctcccggacacgaagctcttccggcagctctcgacgtcctgcctcgcaggcaactctgggctctgcaccaaaggcggggacgtatgcttcgtgagcatcgacgccaacggtaacccggtgacgagcacagccgaagaggcgcagcgcgtgcaccgcctcaagatcgccatcgcgctgctggtgactgcgacggtggcgatggtcctcggcatgatgggcatactgcgagcgcggcggatgggctttggggggaagagcggcggccgcagcagcgactccgagagcggcggcgagctgtcgtggccgtggcagttcacgccgttccagaagctgagcttctccgtggaccaggtggtgaggagcctggtggacgccaacatcatcggcaagggctgctccggcgtggtgtaccgcgtgagcatcgacaccggcgaggtgatcgccgtgaagaagctgtggcctagcacccagaccgcggcgacgtccaaggacgacggcacgagcgggcgcgtccgggactcgttctcggcggaggtgcgcacgctgggctccatccggcacaagaacatcgtgcggttcctcggctgttgctggaacaagagcacccggctgctcatgtacgactacatggccaacggcagcctcggcgcggtgctccacgagcggcgcggcgcgggcgcgcagctggagtgggacgtgcgctaccgcatcgtgctcggcgcggcgcaggggatcgcgtacctgcaccacgactgcgtgcctccgatcgtgcaccgcgacatcaaggccaacaacatcctcataggcctcgacttcgaggcatacattgccgacttcggcctggccaagctcgtcgaggacggcgactttggacggtcgtccaacaccgttgccggctcctatggctacattgcccctgagtacgggtatatgatgaagatcacagagaagagcgacgtgtatagctatggcgtggtggtgctggaagtgctgacggggaagcagccgatcgacccgacgatcccagacggcctgcacgtggtggactgggtgcggcggtgtagggaccgcgccggcgtgctcgacccggcgctccggcgacggtcgagttcggaggtggaggagatgctgcaggtgatgggagtggcgctgctgtgcgtgagcgcggcgccggacgaccggccgacgatgaaggacgtggcggccatgctcaaggagatccggctcgagcgtgaggacgtggccaacgtggacgtcctcctcaagggaggctcgtcgcctcctcatcatgttcatgccaacgccgcggcgatagctgacaaggccacgtcgtcaacgtccagcacgccgccgtgcccgcagggtccgagcaacagctgcagcagtagcagcttctctgccatctactccttgtccaacaaggccaagtcaccctttggctgatgctgaactaagcagcaggcctgtgacgttgtgcgttttgcatcggagcaagttgtgatctgtgtaaatgagaggatagtttttttttcttgttcttgttttcaggacctaggactagagtggcttcatgcccttttgatgaatgctcagtgtacgcttgttcgaa

SEQ ID NO: 100338 - DNA, 290 bp, Zea Mays
ccatgcatatctctaattagtttcataatacaagacatgcatactcatgaaaataatttcattcacacaacacaaatcaatttaatagcacaagccttatatatccacacaactaatcattcatccgactaacgaaaacaatggatcaacttaccacgactaaactcgactcgactccgcgagatcgacaaccgcatccggttgaagcgattcaccaagcacttggcaagcgcctcgctaaagctttcttctcatctaaatttcctaggatttacctccaccacaaacac

SEQ ID NO: 100339 - DNA, 1951 bp, Zea Mays
cagcccccaaaccaccaacacaacaacatctcttccagctcccaccagcaactacaagagaacatcacatcctagctagctactagctcgagctctcatcagaagaacatactgatcatcgatcaccagtcaccaccaccacctaaggctctcagacgacctcagagattgaaagccacacatcagccatggggctccttcctaccgaccgcatggacagcctcttctccccgcgctgccagtgggtgaacggccccatcatcgtgggcgcggggccctcgggtctcgccgtggcggcgtgcctgcgcgagcagggcgtcccctacgtcatgctggagcgcgccgactgcatcgcgtcgctgtggcagaggcgcacctacgaccgcctcaagctgcacctgcccaagcagttctgcgagctgccgcgcatgcccttccccgaccactacccggagtaccccacccgccgccagttcatcgactacctcgaggactacgccgccaggttcgagatcaggccggagttcagcaccacggtggtgttggcgcgctacgacgagacgtcgggcctctggcgcgtcaccacctcggcgcccgccaacggtggcgacgtggagtacatcggccgctggctcgtcgtcgccaccggcgagaacgccgaggccgtcgtgcccgacatcccgggtctcggcggcttccacggcaaggtcacccacgtcagcgactacaagtcaggggaggcctacgccgggaagcgcgtgctcgtggtcggctgcggcaactccgggatggaggtgtcgctcgacctctccgaccacggggcccgcccggccatggtcgtgcgcgacgccgtgcacgtcctcccccgtgaggtgctcggcaagtccaccttccagctcgccgtgctcctcaggcgctggctcccgctctggctcgtcgacaagatcatggtcatcctcgcctggctcgtcctgggcaacctcgccaagctcggcctccgacgccccgccgccggcccgctcgagctcaaggagacacacggccgcacacccgtcctcgacaccggcgcgctcgcgcgcatccgtgccggagatatcgccgtcgtccctgccgtgacacgtttcggaaagggcggccaggttgagctcgccgacggacgcactcttgacttcgacgccgtcatcctcgccaccggataccgcagcaacgttccccagtggctcgagagcagcaacgattccttcaacaaggaaggataccccaagacggccttccctcacgggtggaagggtcaatctgggctctacgccgtgggtttcacccggcgtggtctcttgggcgcctccaccgacgccgtgcgcattgccaaggacctcggcaacgtctggagggaggagaccaagcccacgaagagggccggcgcctgccacaggcgctgcatctccgtcgtcttctaatccgacccaccagcatgacgacgacgaatgaagctaacttaattactgaagcacacacaaacagacacacagacagatacacttgttcgttcatggtgttttagttagtcagtccaatccccttggttcgttgttcattaatttgttctttgcctgccaggtacattagtagtaatacggtgagagtgagttgagtaaaaaaaaaaacatggagccctcccatcagtagggaagaagtgagtgagccctagaggggattttttttactgcagctatggccgctagcttggtgtatagtagcaacctgttgatggaagaagaggctctctttatttttcattgacctaccagcatgtaaattatttaatttatttgttgttctatacacaccaccggtgtattagttactctactgcagtttgtagcttgtagtagtagccagttttagtactgtatggttatagtgatgaagaggtatatcacatcttgttgaa

SEQ ID NO: 100340 - DNA, 801 bp, Zea Mays
gtctgtggatagaccctgtcattgtgagaattcttaattcatgagttgtaggaagggacttatgtcaccataaacagaaactaaagcaagtgttggtttaaagcaggtgtcaaggattataaattgacttactacacccttgagtacgaaaccaaggatactgatatcttggcagcatttcgagtaactcctcagctcggggttccgcctaaagaatcttctactgcggaatcttctactagtacatggaaaactatttggacttatggaattaccggtcttgatcgttacaaaggacgatgctatcacatggagccagttcctaggaacccagatcaatatatatgttatgaagcttatccattagacctatttgaagagggttctgttactaacatgtttacttcaattgtgggtaacatatttggtttcaaagccttacgcgctctacattttgaggacctatgaattcccctccttatccaaaaaagtttccaaggtctgtctcacgatatccaagttgaaagggataagttgaacaagtacagtcgtcctttattgggatgtactattaaaccaaaattgggattatccgcaaaaaattacgatagagcgtttttggtcacttgttctcaaaagctacgaatcaagaataaggcaacacaaatgttaatggttaaagacttccgtccttcataacattatctcccttaggatataatgatcttcggacaaaggtcaagaagggcataccttcttcattgcaatgtacaaagatataaacttgattatatggaagat

SEQ ID NO: 100341 - DNA, 1851 bp, Zea Mays
tcaactctatccagtttcctgtctctttcgtattgttttcccagaaatggaccggatgtgatttgtattcgttttatccctaaatctgagtttagggggattttttagggaaataatggaggtgctgtaagtatcccttccgtctgtctctccctcactcccttggcgacgactacgcccggtgctcttcttcggccccaggtagctttcgctgccgtcctacggcaggtgcccaagtcttcttcggtcccttcaacgacgacgagcactaccagtttgttgaagatggaaaataaagagttgttcaagatgggaaatgcacatacagatactgctgcactgcacaaggagtgggatgatgttctctgtccgatatgcatggaccatccgcataatgctgtccttctgttgtgcagctcccatgacaaaggatgccgatcctatatatgtgatacaagctataggcattcaaattgcctagataggttcaagaaaatgaaagtgaatgatgaggacagtccttcacagccaagctcgtccatgcctaggggtacaggaaaccaaaatgttgtccagagatctcgttttggtctcactagagagagccccaggctacacatagacatatctgtacccgatgaaacttccgatcatcaagatgccagccatagacctgctgccatagttggagaacaggaagaaaacatctacaatgaaggcccagatttgacattggaaactcacgaggttgggatcaatggttcttcagtgtcaagtgacgtgtcaagcttaaaccaattgttgtgcccactgtgcagaggggcggttagtggctggaagatcatcaaagaagctagacagtatttggatgggaaatccagagcttgctcacgagaagcctgcatgttttctggtaactacagggagatccgtagacatgccagaagggtgcaccccacaacaaggcctgctgatgttgatccctcaagacgtcgtgcgtggcaccacctggagcatcagcgggattatgctgacatagtaagcgcaataaggtccgctatgcctggggcagttgtgcttggtgattatgctattgaaggcggagaaatattttcacatgaccgggaaaccagtgaaccaagtgggtctcttctgacaacattctttctatttcatatgctcagcagtagtccgattagatcaggtgatgagccaagaggcacatcaaggggcctgagaaggcagaggagacgctatctgtggggagagaatttgttaggtctccaatatgatgatgatgatgacgacgacgataacgaaggggaggaggatgaagtggatgctgtggatgaagttcagagaccaaggagtcgtcggaggttcataagatcaagatcagaggagcgggcctaatacattgtggagatgtggatgatgtgcttccttgcttggttaaaatgctgtgcgcatccctgcaatcaaagaccaaaaggcaaatggacctcaagttcaagtttagatgatttggatgcgtctgacaccatccatgtgccctctttaatctgacgatcataagaaacactcattcttagggcaaagctggactgctctcagaccagaactgacatggaagctagcgtttggagatgctcgctccatcacaacagctggtgccgtcactcattcaccatgcctttttacctttgcactgcgtgtcatctgcatctatagtatattcttcccgtattacgtctcattgagtccatgctgctactgttctggttgatatccttgttcaaaggctataaaatttattatattttcatgtgatgatgttgtaatgctctataa

SEQ ID NO: 100342 - DNA, 1916 bp, Zea Mays
tcaactctatccagtttcctgtctctttcgtattgttttcccagaaatggaccggatgtgatttgtattcgttttatccctaaatctgagtttagggggattttttagggaaataatggaggtgctgtaagtatcccttccgtctgtctctccctcactcccttggcgacgactacgcccggtgctcttcttcggccccaggtagctttcgctgccgtcctacggcaggtgcccaagtcttcttcggtcccttcaacgacgacgagcactaccagtttgttgaagatggaaaataaagagttgttcaagatgggaaatgcacatacagatactgctgcactgcacaaggagtgggatgatgttctctgtccgatatgcatggaccatccgcataatgctgtccttctgttgtgcagctcccatgacaaaggatgccgatcctatatatgtgatacaagctataggcattcaaattgcctagataggttcaagaaaatgaaagtgaatgatgaggacagtccttcacagccaagctcgtccatgcctaggggtacaggaaaccaaaatgttgtccagagatctcgttttggtctcactagagagagccccaggctacacatagacatatctgtacccgatgaaacttccgatcatcaagatgccagccatagacctgctgccatagttggagaacaggaagaaaacatctacaatgaaggcccagatttgacattggaaactcacgaggttgggatcaatggttcttcagtgtcaagtgacgtgtcaagcttaaaccaattgttgtgcccactgtgcagaggggcggttagtggctggaagatcatcaaagaagctagacagtatttggatgggaaatccagagcttgctcacgagaagcctgcatgttttctggtaactacagggagatccgtagacatgccagaagggtgcaccccacaacaaggcctgctgatgttgatccctcaagacgtcgtgcgtggcaccacctggagcatcagcgggattatgctgacatagtaagcgcaataaggtccgctatgcctggggcagttgtgcttggtgattatgctattgaaggcggagaaatattttcacatgaccgggaaaccagtgaaccaagtgggtctcttctgacaacattctttctatttcatatgctcagcagtagtccgattagatcaggtgatgagccaagaggcacatcaaggggcctgagaaggcagaggagacgctatctgtggggagagaatttgttaggtctccaatatgatgatgatgatgacgacgacgataacgaaggggaggaggatgaagtggatgctgtggatgaagttcagagaccaaggagtcgtcggaggttcataagatcaagatcagaggagcgggcctaatacattggtacctgtggtaattacattctgtactgctgtgaagttctattaccatgaactcatgatgactccttgcatgatctttgcatgccagtggagatgtggatgatgtgcttccttgcttggttaaaatgctgtgcgcatccctgcaatcaaagaccaaaaggcaaatggacctcaagttcaagtttagatgatttggatgcgtctgacaccatccatgtgccctctttaatctgacgatcataagaaacactcattcttagggcaaagctggactgctctcagaccagaactgacatggaagctagcgtttggagatgctcgctccatcacaacagctggtgccgtcactcattcaccatgcctttttacctttgcactgcgtgtcatctgcatctatagtatattcttcccgtattacgtctcattgagtccatgctgctactgttctggttgatatccttgttcaaaggctataaaatttattatattttcatgtg

SEQ ID NO: 100343 - DNA, 3757 bp, Zea Mays
aaatctgtttgggcgactgtggaattcagaaatcaggaggcgactgcgacatacgacgaagccggcacacgcagacgcaccggcctcctcttctcgctcgtctgcttctcttttgctcgttttaaccctcgctcgcgtcgcctcctcctccgccgcacccggctgctgcctctgagcctgcccccgccacctcggcgccctggtcgccgccggagcgccgcctcaacgtctcgatcccggttctacgtgatgcagccgccgatgggtaacgagaggccgccgcctcccggtcgcactgtctcagccttcgtgcccggcgccgctgtcccgcctccaccgtttgccgccggtggcccgttcgccccgccgccgtggcagggagtgccgcctcctcagtctggtgctgcggcgcctcatttcggggctgtgccacccgccgcaatgggtgggttcaggggtccaccgtcgtcacagggcccctttggtgctggcacaccgccccagcgccctttcacttccgcgccaccgcctcagagccctttcacctccgcgccaccgtctcagggcccctttgcctccgctccaccgtcgcaggtcccttttgcctccgctcaaccgtctcagagtccttttacgtctcctccacagtctcagggcccattcgctgctggaccgccgcctacgggcccttttgctgctacaccagcaccttttcgctctccgctgtcatcccttgcgcagccacaatctccaacgcaaggcgctttgcctccaccaccaacatatgcgaggccgctgtcacaaccactacaggcgcaagggtattaccctggtgcaccaccttcgaaccctcaatttccgatgtcaaggccagcatttcaacaacctgtgcagaatatgccacctcctccaatggggtcagctgccacatttggtaaccaggcagcttatcaaagtggcgggcctccagttggaggcacacttcagagtttagtggaggacttccagtcgttgtcactgagttctgtgcctgggtcacttgatcctggtgttgatgtaaaagggctgccaaggccattggatggtgatgaggagccagttaagcttatagagtcatacccatttaattgccacccaaggtacttcaggctgacaacccatgcgattccggcatctcagtcattggtctccaggtggcatttgcctcttggagctgtggtacatcctcttgcagaatcacctgacggggaggaagtgccagttatcaactttgggtccgccggtgtcattcgctgtcgaagatgtaggacgtatataaatccttatgcaacatttgcagatgctggaaggaaatggcgctgcaatctttgtacattgctcaatgacgttcctggagagtacttttgtgctcttgatgctagtggcaggaggtacgatactgatcaaagacctgaactctctaagggaactgtagagtttgttgctccaacagaatatatggtgcggccaccgatgccgccgtcctatttctttcttattgacgtgtcagtgtctgcagttcgaagcggattgcttgagattgttgcaaagaccataaaatcatgcctcgatgaacttccaggctttccgcgaacacagattggattcttaacatttgacagtaccttgcattttcataacttcaagtcttctttgtcacaacctcaaatgatggtggttgctgatttggatgatgtttttctgccattgcctgatgacctcttggttaatttggtcgactcaagacatgttgtggaatcatttcttgatagcttgccaaatatgttccatgacaatgtaaatgtggagtctgctcttggtccagcacttaaagcagctttcatggttatgagtcaaattggggggaagttgcttgtcttccagagtactttgccatctcttggtattggtcgtttgagacttcgaggagatgatgttcgtgcgtatggaacagacaaggagcatactctgagggtacctgaagatcccttctacaaacagatggctgctgaattcacaaaaaatcagatcgcagtggacatattttctttcagtgagaagtactctgatatagcttctttggggtctttggctaagtatactggtggtcaggtgtaccattatccatcattccaggcacctacacatgaagacaaacttaaacttgagcttagtagggaccttacacgagagactgcctgggaatctgttatgcgtatcagatgtggaaaaggagtacggttcacaacctatcatggtcatttcatgctacgatccacagacctgttagcccttccagctgttgactctgataaagcttttgcaatgcaattgtcgctagaggagacattaatgaccacccaaactgtatacttccaagtggcattgctatacacatcatcctctggtgaaaggcgtatcagggtccacacagcagctgcacctgtggtcacagatcttagtgaaatgtaccgtcaagcagatacgggtgccattgtgtcattgttgggtagaattgcggttgaaaattcactgtctgataagctggacagtgtccggcagcagttacagttaaagcttgtcagaagtttgaaggaataccgcaatttatatgttgtacaacaccggataggcgggagactgatttttcctgaatccctaaagtttttgccattatacatcctggctatctgcaaaactcttgctcttcgtggaggttatgccgatgtttctcttgatgaacgatgtgctgctggttttagcatgatgatattgcctgtaaaaaggctgctcaattttatctatccttctttgtacagagtcgatgaagtattaacaatggaaccaaataagattgatggttggttgaaacgcttgccattaacgtttcagtgtttagatacgggaggtttgtacctccttgatgatggcttcactttcttagtgtggttaggaaggatgctcccacctgaacttgtgaacaacattcttggagtgagcttggcaaacttccctgacctatctaagattctattgagagagtgtgacaatgagttatcaagaaatttcatgaaaatactaagatacctgcgggagaaggatccttcttatcaccagctatcccttgtggtgcgacagggtgaacagccaagagaaagctatctgcttctatctaaccttgttgaggaccagatggctggaacaagtagttacgttgattggatacagcaaattcaccgtcaaacacaaagctaatgacgaaataccaacaggaagctatgcctgaaatttttgcctactgtaagctgctgcagggcgtagattcagttgctgccagttccaagtcaatctcgcaaccccttggagatcttattcacaacccagctgtccagtatgccaccatgtaagcagtatttggctggcaaacaaagcttcttactgttaatatttgcccttgtgattattctatttttgcagagtgggaatacagctgttgtattggaataagtaggcagcaaatgcggtgggtatattatacaactggggtcgtgtagtgtggcctgtgcgttctttcctgatgaattctagtcgggttcagttacatggcatttgggttataaaaagttcatcgtgtaaactaatttttggctattttagtctgtttgtaatgggagatctcatttaatttaatgtcattccgttattaaagttacttccg

SEQ ID NO: 100344 - DNA, 3676 bp, Zea Mays
aaatctgtttgggcgactgtggaattcagaaatcaggaggcgactgcgacatacgacgaagccggcacacgcagacgcaccggcctcctcttctcgctcgtctgcttctcttttgctcgttttaaccctcgctcgcgtcgcctcctcctccgccgcacccggctgctgcctctgagcctgcccccgccacctcggcgccctggtcgccgccggagcgccgcctcaacgtctcgatcccggttctacgtgatgcagccgccgatgggtaacgagaggccgccgcctcccggtcgcactgtctcagccttcgtgcccggcgccgctgtcccgcctccaccgtttgccgccggtggcccgttcgccccgccgccgtggcagggagtgccgcctcctcagtctggtgctgcggcgcctcatttcggggctgtgccacccgccgcaatgggtgggttcaggggtccaccgtcgtcacagggcccctttggtgctggcacaccgccccagcgccctttcacttccgcgccaccgcctcagagccctttcacctccgcgccaccgtctcagggcccctttgcctccgctccaccgtcgcaggtcccttttgcctccgctcaaccgtctcagagtccttttacgtctcctccacagtctcagggcccattcgctgctggaccgccgcctacgggcccttttgctgctacaccagcaccttttcgctctccgctgtcatcccttgcgcagccacaatctccaacgcaaggcgctttgcctccaccaccaacatatgcgaggccgctgtcacaaccactacaggcgcaagggtattaccctggtgcaccaccttcgaaccctcaatttccgatgtcaaggccagcatttcaacaacctgtgcagaatatgccacctcctccaatggggtcagctgccacatttggtaaccaggcagcttatcaaagtggcgggcctccagttggaggcacacttcagagtttagtggaggacttccagtcgttgtcactgagttctgtgcctgggtcacttgatcctggtgttgatgtaaaagggctgccaaggccattggatggtgatgaggagccagttaagcttatagagtcatacccatttaattgccacccaaggtacttcaggctgacaacccatgcgattccggcatctcagtcattggtctccaggtggcatttgcctcttggagctgtggtacatcctcttgcagaatcacctgacggggaggaagtgccagttatcaactttgggtccgccggtgtcattcgctgtcgaagatgtaggacgtatataaatccttatgcaacatttgcagatgctggaaggaaatggcgctgcaatctttgtacattgctcaatgacgttcctggagagtacttttgtgctcttgatgctagtggcaggaggtacgatactgatcaaagacctgaactctctaagggaactgtagagtttgttgctccaacagaatatatggtgcggccaccgatgccgccgtcctatttctttcttattgacgtgtcagtgtctgcagttcgaagcggattgcttgagattgttgcaaagaccataaaatcatgcctcgatgaacttccaggctttccgcgaacacagattggattcttaacatttgacagtaccttgcattttcataacttcaagtcttctttgtcacaacctcaaatgatggtggttgctgatttggatgatgtttttctgccattgcctgatgacctcttggttaatttggtcgactcaagacatgttgtggaatcatttcttgatagcttgccaaatatgttccatgacaatgtaaatgtggagtctgctcttggtccagcacttaaagcagctttcatggttatgagtcaaattggggggaagttgcttgtcttccagagtactttgccatctcttggtattggtcgtttgagacttcgaggagatgatgttcgtgcgtatggaacagacaaggagcatactctgagggtacctgaagatcccttctacaaacagatggctgctgaattcacaaaaaatcagatcgcagtggacatattttctttcagtgagaagtactctgatatagcttctttggggtctttggctaagtatactggtggtcaggtgtaccattatccatcattccaggcacctacacatgaagacaaacttaaacttgagcttagtagggaccttacacgagagactgcctgggaatctgttatgcgtatcagatgtggaaaaggagtacggttcacaacctatcatggtcatttcatgctacgatccacagacctgttagcccttccagctgttgactctgataaagcttttgcaatgcaattgtcgctagaggagacattaatgaccacccaaactgtatacttccaagtggcattgctatacacatcatcctctggtgaaaggcgtatcagggtccacacagcagctgcacctgtggtcacagatcttagtgaaatgtaccgtcaagcagatacgggtgccattgtgtcattgttgggtagaattgcggttgaaaattcactgtctgataagctggacagtgtccggcagcagttacagttaaagcttgtcagaagtttgaaggaataccgcaatttatatgttgtacaacaccggataggcgggagactgatttttcctgaatccctaaagtttttgccattatacatcctggctatctgcaaaactcttgctcttcgtggaggttatgccgatgtttctcttgatgaacgatgtgctgctggttttagcatgatgatattgcctgtaaaaaggctgctcaattttatctatccttctttgtacagagtcgatgaagtattaacaatggaaccaaataagattgatggttggttgaaacgcttgccattaacgtttcagtgtttagatacgggaggtttgtacctccttgatgatggcttcactttcttagtgtggttaggaaggatgctcccacctgaacttgtgaacaacattcttggagtgagcttggcaaacttccctgacctatctaagattctattgagagagtgtgacaatgagttatcaagaaatttcatgaaaatactaagatacctgcgggagaaggatccttcttatcaccagctatcccttgtggtgcgacagggtgaacagccaagagaaagctatctgcttctatctaaccttgttgaggaccagatggctggaacaagtagttacgttgattggatacagcaaattcaccgtcaaacacaaagctaatgacgaaataccaacaggaagctatgcctgaaatttttgcctactgtaagctgctgcagggcgtagattcagttgctgccagttccaagtcaatctcgcaaccccttggagatcttattcacaacccagctgtccagtatgccaccatagtgggaatacagctgttgtattggaataagtaggcagcaaatgcggtgggtatattatacaactggggtcgtgtagtgtggcctgtgcgttctttcctgatgaattctagtcgggttcagttacatggcatttgggttataaaaagttcatcgtgtaaactaatttttggctattttagtctgtttgtaatgggagatctcatttaatttaatgtcattccgttattaaagtt

SEQ ID NO: 100345 - DNA, 2381 bp, Zea Mays
atcgccaccacagaccacaccaacaatcccctcccttctccccggggccgggcttgtcttcttcctcccgattcgttttctttttcttttcttccgctgctgcaaaatctcgcgctggcgcggcccgaggccagaggactccgatccttatccctcacgcatctcccgcctcgcctccgccacacgttccgcgcctctacagctctcgacctcgtctggatttttttccccgacccgattttcgcatcagctccttctgcccaccgggctcgtctcctcccctggtttctttttcgtcacttgtcaccgctagttcctttagagaaggtgtacccccattattccattagcggcctcactgacgagagagattttggcgtgactatccagagtctccaatcttttacacccaaaactcttctcagctaccggtgcggcatatcgcccctgtcggcggcgaacatttgagttctcgcgacgtgtctcgaggattctgtggtggaagatcggatcttttgctgcggattccagttgccaaccaagatgtcggctctcctcgatctactgatggggatctttcgccagcagaccctcggcggcgccgccctggagctcgccgcgctggcggcgccgctctcgctcgccgcgctcgtcggccttctcatcgggtgggcgtggcgcccgaggtgggcgggggtcgtcacggtcgacaacgcccaacagatggcgcagctccccgcggcggcgcctcctccggaccgcgccaccgccaccgcggtggtctctcgcaacgaggcggccgccgtcgtaccgagaactgtggtggctcatgcggcggccgaggacgagcagcagcagctggcggtcaacaccggtgacttgctgcacctctggcggctcgtcgacgagaaggacggtggcccgtcgtggattcacatgatggaccgcaccttaccaaccatgaggtaccaagcctggcggagagacccaccgagtggtccaccacagtaccgcagcagcacaatcttcgaggacgcgtcaccggaggttgtgagagatttcttctgggacgatgagttccggatgaagaacagctgggacgacatgcttcttcagcacgagacgctggaggagtgcaccgagactggaaccatggtggtccggtgggtcaggaaggtgagccgttctgcatccacacatctctgctggtgattattgagctcaaaccatggcgcaggctgcttatataaaccgacgatgcgtggttctcgcgtgcagttcccgttcttctgcagcgacagggagtacatcataggccgcaggatatgggcgtctgggaagacattttactgtgtgaccaaggtatggaacgaaatagctagcttattattgatatatatgaacgaacggacggacggaatttctgctgcctgtgcttgcgttgcgttgatgcccattttttctttctctccagggtgttcctcgtccctccgttccaagacaaaacaaacctcgccgtgtggacttgtactactctagctggtgcatccgtccaggtaactatacgttagtttcacagcagtgatctctgcagccttggtagcaggatgactcaagtgcatgaactgaacctatcctattgtatctaatctaccagttgagtcgagaaaaggcgacggtgcaatgagtgcatgcgaggtgctcttgttccaccacgaagacatggggattccatgggagatcgcgaagcttggcgtccggcaggggatgtggggctgcgtcaagaggatagagcctggccttcgggcgtaccaggtcgggaggaccgccggagaggctgtttccaagtgtgctgccatggcacaggtcaccaccaggttcagtgccgacgagctcgtcatcgcagggccgggcaacacggaggccagttcttcttcgtccggcgacggcgcagaggttggcaaggtgacgaagcactgggcgaacagcatacccaaggttctcatggtcggtggcgctgtggccctggcctgctgcaccttcgacggtgggttgttgaccaaggccgtcatcttcggcactgccaggaggtttgcaggagggccaggaaggcggtaggtacggtgtaacggtggacggaaagatccagcggcacaacacaaaacaagtgttgctgcactgcagcccgctgcgggttaataggttagaaatatagcatttgttacgaggacacatatagaagtattatggaagaaaaccgctgttagataagaaatacactgctgtgtattagtagttaataacaagaattcttggtttttgtatgtaaccatattgtggatcggatccattgttcttccccatggacactactactacca

SEQ ID NO: 100346 - DNA, 4669 bp, Zea Mays
atcgtgcgtcgatagacgatgatgccggagtcgcatccgcatccccacgcgggggcggtgctggcgtcgacgtctagccgtcggagcctcagcttggggtcctccatctcgcagtcgttccggcagatggacacggaggaccccttcgcgcggtcgcagtcggagcatgagcaccgcgacgacgaggagaacctgcgctgggccgcgctcgagaagctgcccacctacgaccgcatgcgccagggtatcctacgccgggcgctcgaccaacaacaagagagcggcggcggcggcgtcgagatcgtcgacatccacaagctggccgccggcgacgggggccgtgcgctcctggagcgcctcttccaggacgacagcgagcgattcctgcgccggctcagggaccgaatcgacatggttggcatcgagctccccacagtggaagttcggtacgagcagttgacggtggaggctgacgtgattaccgccgggagggccctcccgacgctgtggaacgccgccaccaattttcttcagggtctcattggacgcttcggttcttcaaacaagaggaacatcaccatacttaagaatgtcaatggtatcctgaagccatccaggatgacgcttcttcttgggcctccatcctcagggaagagcacactaatgcgagcactcgctggcaaacttgacaaaaatctcaaggtctctggcagcattacgtattgtggccatccaatttcagaattctatcctgagaggactagcgcgtatgttggtcaatatgatctccacaatgccgagatgactgtaagggagacacttgatttctctaggcggtgcctaggcattggtgccagatatgagatgattacagaacttgctagaagggagcgggatgccggcattaagccagatcctgagattgatgctttcatgaaagctactgcagtacaaggacaggagactaatattataacagatctcactctcaaggtgcttgggctggacatttgtgctgatgttattattggtgatgagatgatcagaggaatttctggcgggcaaaagaaacgtgtgacaactggggagatgctaacagggccagcaacggctttatttatggacgaaatatccactggtttggatagctcgagcacatttcagattgtaaagtttatgaggcatttggtccatgtaatgaatgaaactgtcatgatctctctgctccagccaccgccagagacctacaatctttttgatgacataatcctgctatcagaaggatacatagtgtaccatgggccacgcgagaatatcctggaattctttgagtctgtcggtttccggtgccctgacaggaaaggtgtcgcagactttcttcaagaggttacttccaagaaagaccagcaacaatattggtatcttgatcaggagcaatatcattatgtatctgtacccgactttgcagaacgtttcaaatcattccatgcatgccaacagatgcagaaggagttgcaaataccttttgaaaagtccaaaacccatcctgctgcgttgaccaccaaaaaatatgggctttctagctgggaatcactcaaggcagtgatgtcaagggagcagctattgatgaagcgcaactctttcatctatattttcaaggtcacagtgttgatcatccttgcattcgtgtccatgactgtgtttctcagaacaaagatgccccatgggcaaattgctgatggcaccaaattctttggggccctgacttttggtttaataacgatcatgttcaatgggttcgctgagctacaattgaccataaagaagctaccagttttctacaaacatagggatttcttattcttccctgcatggacctttggagtggcaaacatactcttaaaagttcctatctcgctcgtggaatcagtagtatgggttgttctcacatactatgtgatgggctttgcacctgctgcaggaaggttctttcgtcagtttatagctttctttgccacacaccaaatggcaatggctttatttcggtttcttggtgctgttttgaaaacaatggttgtggccaatacttttgggatgtttgtgctgctcattattttcatttttggaggatttgtcatccgtagaaatgacattaaaccttggtggatctggggttattgggcatcacctatgatgtatagccaaaatgcaatatctatcaacgaattccttgctagtaggtgggctattccaaacaatgacacgactattgatgcaccaacagtaggcaaagcaattcttaaatccaaaggcttgtttactgaagaatggggattttggctttccattggagcccttataggattcattattttgttcaacagtctctacctttgggcccttacatatttaagtcctagtagtggctccaatgccctagtttcagaaggtgaagatgatgtaaatgaaatagcattgaaagaaagaagcagagatgcaagaagcgaagatgaaatatcccaagttgtatacggggatctaggtgcaaacacatgcactaatggagcaacaaacacactagttcagtcacgagtcactttgcctttccagcctctttcactttgctttaaccatgtaaactattacgtcgacatgcctgcggaaatgaaggaacaaggattcacagaaagccgtttacaactgctctctgatatcagtggtgcttttaggccaggggttctaacagcattagttggtgtgagtggagctggaaagaccactttaatggatgtcctggcaggaaggaaaactagtggagccattgaaggagatattaccctgtccggataccccaaaaaacaagaaacttttgcccggattagtggttattgtgaacaaaccgatatccattctccgaatgttactgtatttgaatccatcacgtactctgcatggttgcgtctttcctcggatattgatgatggtacgaaaaagatgtttgtggaggaagtgatggcccttgtagagcttgatgtgttgtgcgacgctcttgtgggtctccctggagttagtgggttatcaactgagcaaagaaaaaggctgacaattgctgtggagctggtagcaaacccttcgatcatcttcatggatgagccaacttctggtcttgatgctcgagctgctgcgattgtcatgcgtacagtaagaaatacggttaacactggacgtactgtggtctgcacaatccatcagccaagcatcgacatatttgagtcttttgatgagctactgcttttgaaacgtggaggtcaggttatttatgctggtgaacttggtcgccactctcacaaattagttgaatattttgaggcgattccaggtgttcaaaagatcacagaaggatataatcctgcaacatgggcgctggaagttagctctcctctatccgaggctcgattgaacatgaattttgctgaaatttatgctaactctgtgctttataggaaaaatcaagagctcatcaaggagttgagtgttccctcaccagactaccaggacctgtcattccctacaaaatattcgcagaatttctacaaccaatgcgccgcgaacttttggaagcaataccgttcctattggaagaatccgccctacaatgctatgcgctacctgatgacatttctcttcggccttgtatttggtacagtgttctggcaaaaaggaaagaacatagattcacagcaagatttatataatctactcggagccacttacgctgctaccttctttctgggggcttcaaatagcatcacggttcagcctgttgtatcaattgagcgagcagtgttctaccgtgagaaggcagcggggatgtactctccattatcctacgcatttgctcagacgtgcgtggaggtgatctacaccatcttacaggggatactgtacacagtcatcatatatgcgacgatcggatacgactggaaagcggataagttcttgtacttcctgtttttcatgaccgcgtgcttcaactacttcgggttgttcggcatgatgttggtagcgtgcactccctccgcattgctcgccaacattctcatcacgtttgctctgcctctttggaacctcttcgctggattcctcatcgttagaccggcaataccaatttggtggaggtggtactactgggcgaaccccgtgtcgtggaccatctacggcgttgttgcgtctcagttcggcgagaaccaaggcgagctttcagttcccggtgggaagcccgtggtggtgaagcagttcttgaaggataatctcggcatccagcatgacttactcggctatgtcgtgctagtccatttcgcctacatcattgcgttcttcttcgttttcggttattccatcaagttcttcaacttccagaaacgttagctgcacctctactctctgctgtctcacacggacggtcatttgtaatctactttctcgtacgtcgaagcaaatgcttgtttgggaagcctgtttgcaagtagccaagtactagtatattctcctctagcatgttccttcaatggaaaatgttaaaaaaagatgacgaatacataaagtgacatctttgtttagatatcggtgtcgtatctgttgtaccgtaataaaaaaattgttgggactg

SEQ ID NO: 100347 - DNA, 750 bp, Zea Mays
atgaactcaataactctcgttcgcaagctatgcgagtttggttgtctgttccataaggtgtggggcttcatttctgacaacataagccgctcgccctcagatgctgccactgaggtgggcactgttacccaggcattctgctcggcgctccaggaggagctatctgattattacaagctgctggttgttctggaatcgtactcattgaatccaattcccacacctggatctgattcagaagggaggagaggaagtagcgacaaggtcgccaagaccacctggcgcgatgtctcctaccagatcaccaagatcaacatgtacaaggatggtcggcatgtacaagatatgcttaaggtgaggttgcaattcagtatgtgcatatatttcttgggattgaatttgtacaaaggtcctcatatgcttaaggagaaggagttgcttgaaaagcacaatctctggcttgatgaagaactgaaagcaaaagcaaagaacttggctaaactaggaaaaacaaatatggatgagatgtcagcaaatattgctaagtttgaaagagagagatatgaatcttctagctccttgagacgaagcaaagaacacatctctgaactggagcaaaggatatcctacatgaaaaggtggaggtggcccataatgggaaggagcaatcgtgcttgctcccttcttggtttcgctcaactgctcgtgctgtcgcttagctttgtgaccacctacaaggactcaccttaa

SEQ ID NO: 100348 - DNA, 237 bp, Zea Mays
acttccaactctatacactgtcaagccggcttgtcttcgcgtgggccaccttgcttcgagcctccgactcaccgctgtaaggacggccgcagctgcgtgtttgtttgccagtataacggaatcagaacctatagggcattctgtaaaacacctacaaatgctcaggagacctatatgtgctgctgcccaccatagatttgaatggtgtaattaacaattaatgcatccagcatgtac

SEQ ID NO: 100349 - DNA, 99 bp, Zea Mays
taatagaaacaatagtccgtcacatacactttatgctaatcgctcaacattctcatgatctcaatttcacaatatatacaaatttaaacaataaattgc

SEQ ID NO: 100350 - DNA, 237 bp, Zea Mays
atgccactgctgaccagaaaaagtgatacgccctcctccgacgagtatatgcactacagtaaaaggaacaatttccgacggccaaagccgtcggacataaggattgaaccgtcggagataacctatgtccgacggttttatgccgtcggacataaggcgtcgaaaatagccttatgtccgacggccgccgtcggaaataacctatctctgacggccgcctcggcccgtcggaagtaa

SEQ ID NO: 100351 - DNA, 1936 bp, Zea Mays
ccagaccctagccacgactttccccaagcctcagcccctctccccgctcgtgtctccaagccgcaacggcgcagctcctcttcttggacgccgaaaccgggcaccgtcgtagcccctgtctccgctcgtctccgggaccctgcttggccctctccggcgaacctctgtgcccctgctccgccgccagttcgacgccgcctgctccagatcgacgttgtcgtcctccgtcctttgtccgcctgctccagatcgacgacgcctgctccagatcaaatccggcctccgtcctctgtgcccctgccctgccgctcccagatcgacgccctaccgctccaggtcgagctgctgctccagatcgacgcccaactgctccagatcgagctgcttgtcccagatcgacgctaaggtaattagttcagtgctttcttttgtggtaatctgaacattgtgactggtaatttttttgtcaaagaagtagttgcaatttagaaggttggaagtctccaatttttctgtcactgaacagccaagaataattagttcaacctatcatgcatagatggataacatgccaaagaacaggaaaccaaatgctcaatgggatctcagtgctgctagaatttttaatgagatatgtgtggaataagtattgacaaataatagaccacaaggttgtttgaacaacaaagggtacgccaatcttgtagccaagtttaatgaatggtcaggcagaaattacacccgtgttcaaatgaaaacccgttgggatgcactgaaatctgactttacaacatggaaaacactactccttagtgtgtctgggttaggaagagatccaaggattggttctattacagctagtgacgaatggtgggaagaaaagatagaggtatgcaaccttggctttgtttctattgtatgaaatggttatgttgcttgttataactattagagttgttgtgtttcaggccatgccagcatgcaaaaagtttaggcttgcagcattggagaatgaagatcttgaaataatgtttaatggggtgtcctgcactaatgcatatgctatggctccaggggcaaaagaaggattgcctgccaatgatagtgatgatgtggaggaggtgtctccaagtgttgaggacaagcaagctagaaaaagaggtgttgatcacaaatccccaattaaaaaatcaaagaagaattttagagatatgcagttcaagcgttttgtggattcatttgtggaaaaagctagttcaagcaagtcttccgcaacatcttcgcctaatgatcatgttaggcaagagataacagaaatgatggaatcagttatctcagctgggatagttgaaggaagtgatgacatttctatgccactcaacttctcatcaagaaggagtatcgagatgtgtttctcacactaaagattccagaagggaagcttgcatggctcaagagaacttgggaggagaggaaaaaacataagctagttatatgtattcatgctgtatcttgaacttgattagtaatgctatttgttcatgttgtatcttgagcttgattagtattgctatttattcatgttgtatggttgagttatattattcatgttgtatggttgacagatggctttcacctcaagtgaatcaaatgaagctgacataacaagtaattcaagtgactcaagtgactcaagtgactggatgtgtgaagctgctgcaattgcagcttatgcaatgctcgattgcggtacatcatctggaaagaagcaaaaaataagtgcaggagactggttatcagtgggttcagaggcatctcagttatccagagagttgttatgatatgtttagaatgagaaggtcagtgttctatagtttgcatgacattttagttaacagttatggtttacgatcatcaaatgagatgtgttcaattg

SEQ ID NO: 100352 - DNA, 1704 bp, Zea Mays
ccagaccctagccacgactttccccaagcctcagcccctctccccgctcgtgtctccaagccgcaacggcgcagctcctcttcttggacgccgaaaccgggcaccgtcgtagcccctgtctccgctcgtctccgggaccctgcttggccctctccggcgaacctctgtgcccctgctccgccgccagttcgacgccgcctgctccagatcgacgttgtcgtcctccgtcctttgtccgcctgctccagatcgacgacgcctgctccagatcaaatccggcctccgtcctctgtgcccctgccctgccgctcccagatcgacgccctaccgctccaggtcgagctgctgctccagatcgacgcccaactgctccagatcgagctgcttgtcccagatcgacgctaagatggataacatgccaaagaacaggaaaccaaatgctcaatgggatctcagtgctgctagaatttttaatgagatatgtgtggaataagtattgacaaataatagaccacaaggttgtttgaacaacaaagggtacgccaatcttgtagccaagtttaatgaatggtcaggcagaaattacacccgtgttcaaatgaaaacccgttgggatgcactgaaatctgactttacaacatggaaaacactactccttagtgtgtctgggttaggaagagatccaaggattggttctattacagctagtgacgaatggtgggaagaaaagatagaggccatgccagcatgcaaaaagtttaggcttgcagcattggagaatgaagatcttgaaataatgtttaatggggtgtcctgcactaatgcatatgctatggctccaggggcaaaagaaggattgcctgccaatgatagtgatgatgtggaggaggtgtctccaagtgttgaggacaagcaagctagaaaaagaggtgttgatcacaaatccccaattaaaaaatcaaagaagaattttagagatatgcagttcaagcgttttgtggattcatttgtggaaaaagctagttcaagcaagtcttccgcaacatcttcgcctaatgatcatgttaggcaagagataacagaaatgatggaatcagttatctcagctgggatagttgaaggaagtgatgacatttctatgccactcaacttctcatcaagaaggagtatcgagatgtgtttctcacactaaagattccagaagggaagcttgcatggctcaagagaacttgggaggagaggaaaaaacataagctagttatatgtattcatgctgtatcttgaacttgattagtaatgctatttgttcatgttgtatcttgagcttgattagtattgctatttattcatgttgtatggttgagttatattattcatgttgtatggttgacagatggctttcacctcaagtgaatcaaatgaagctgacataacaagtaattcaagtgactcaagtgactcaagtgactggatgtgtgaagctgctgcaattgcagcttatgcaatgctcgattgcggtacatcatctggaaagaagcaaaaaataagtgcaggagactggttatcagtgggttcagaggcatctcagttatccagagagttgttatgatatgtttagaatgagaaggtcagtgttctatagtttgcatgacattttagttaacagttatggtttacgatcatcaaatgagatgtgttcaattg

SEQ ID NO: 100353 - DNA, 626 bp, Zea Mays
ccagaccctagccacgactttccccaagcctcagcccctctccccgctcgtgtctccaagccgcaacggcgcagctcctcttcttggacgccgaaaccgggcaccgtcgtagcccctgtctccgctcgtctccgggaccctgcttggccctctccggcgaacctctgtgcccctgctccgccgccagttcgacgccgcctgctccagatcgacgttgtcgtcctccgtcctttgtccgcctgctccagatcgacgacgcctgctccagatcaaatccggcctccgtcctctgtgcccctgccctgccgctcccagatcgacgccctaccgctccaggtcgagctgctgctccagatcgacgcccaactgctccagatcgagctgcttgtcccagatcgacgctaagatggctttcacctcaagtgaatcaaatgaagctgacataacaagtaattcaagtgactcaagtgactcaagtgactggatgtgtgaagctgctgcaattgcagcttatgcaatgctcgattgcggtacatcatctggaaagaagcaaaaaataagtgcaggagactggttatcagtgggttcagaggcatctcagttatccagagagttgttatgatatg

SEQ ID NO: 100354 - DNA, 379 bp, Zea Mays
atgtctagtcagcatggatcggactatgactggaggaccgcacctattgatcctcaggttgtgtatgcaagtgatggaaaaccccatggaaggtactcgatgttcgataacgtcatcgactcgagccaggatactgcagaagttgagcaactacgagaagagcttaggcaacatcaggagcggcaaagggttcaggaggaatacttgaggcaacatgctacgcaacaagaatactatgctactcagtttcaacaacaacaagcactgatacaacaactagcacaagcccaagggatacaggttccgatggccccccccacctccacctcccatacattttccttggccttcacctccacctccacctaccgaacatcag

SEQ ID NO: 100355 - DNA, 1226 bp, Zea Mays
aagcacaagtcaaagcatatatatcatatatctcctgcatcgcggcaggtggtggggcatttgaacaaaggccggtaaactttacaaggcattgatcgagggccgagccgagtgaggcatatatataaacgacaagcgaacgaggcagaaaacaaagatgtgtctatactaagagaactgctgcgaggtcgcaaacgtctgaccgaacccccagctggcgggcgcgacgtcggggaaggttttggtctggccgtcgctgctggtgacctggaacgacaggctctggccattgaggtacgcgttggactgccagttgacgccccagttccgggacatggccatccacccggtgcgcgaccccttgatggacgccgactggatggacccgcagccgccgacattggagatgagcaccagctcgaagtagtcgcgcccgttgatgctgaacctcaccccgcctttcttcacacacggcaccctacacacacagcacagcagcgtacgtacattcatttcagatcatccatgcatgcaaggagagagatatataaaccggcacaggcaagcaaagcaacctttggtagttgacgggcacgatgccgccgcggtagatgccgatcttgagccaggccggctcggccatgtcgaagtgctgccgcggcgggttgcaccagccgccgtcgtcgttgggcagcgcgtagttgggagggcacaggttggtggcggtgatggtcaccgacgtgccgcggatgcagaaccgcgggtccgcctggtagtcgcaggagatccggtagcactgcccgcacgaggcgccgtcgttgaagagcgccgtgctcagcgccgccgtgtccgtgccgtaccccgtcgagtacaggttgccgtacccacaagccccacctgcaggacgcacgcacgcaccgcacgcgtcagcaaaggtagtcttggagtgttgttagcgtcaagctcgatcggtcccatcggtcttagcttcttacggtcttacccatcgttcctgaagcgtcgctaccgccatagaaggtggcgaacgccttgtttagcccggacgccgagaagcacgcggcttccttccagagaaggcacgccgccaagagcaacgcaagagcgcgagagactgatgatgagccagttgcggctttcattgttgttgccagcgagcgagctaagcttagcacctagcaggagatcgacgaaccaccacacacacc

SEQ ID NO: 100356 - DNA, 2581 bp, Zea Mays
tcaactttaaaagataaacctaggttgacaaggtaggacccatcaaggcatcaattgtgtaatacaatacaaaagtaaagtgtattactatgctattcttggttgaaaagaatatgcatgggtaaatccacttgccttttccgtaaatctgttgtggttctgctgagcttgtaaattctgtatggaggcgatgagattctgcagtaactgcatttgggttgctatgaactgttccattttcggatttagtggtggaggtggtaattcagtacgtctttgattcaaaaatattctgtcgtactccggtcctaccttctggtttattagagaggtggagtttcagacaagaaaggggaacttgataaagctaataaaatagataagtgggacaagctttgaacttaactagactttaacttatttatctaatgatgcatttgtggccatcacttcacaaaacatcacaatcattacaatggctcaaatcaaacatttgttaactcaaaagcattacattgcacgtcctcacaagaacggttctagtcgaaacatccgattaagataaccaatcctaagagcctggtctagaagactggtgatggaacaaagtgatccataaaggagcttcttacaaagtggtgatatggcagggcaggaaacatcatccgtaaccttccgtggatcctgtccagcgagctgagcctctagctgagcaacctggcatgagcatcctgtagctctccatgggtctttgctagctctgaggtggcgccgtcgaggtcggtgttgagggcagcaactactcgggtgagagtgttgatgcgatcctctctagcttctcccaataagatggcactgtttgtaatttttgttgcctcattgggacagcagctagcactgttggtgcaaaatccttgattgagcaacccaataactacttgtcacaccaaaataaagtagaatgccattgctgaccattgattccatagctatattgaacaaagccagggctttagaattagttgggatttcaagacctgtccatggccgattatggtcagtttctggagccataaccagcaaatctgcagtgcccaactcataacttcaaccgctgttcatatcatcctatccaataaaaacacaatccttaacttcggttgcatggttatggtcttatcattaacgcgttatgcattctctccttttggcttgtgcttttggtgaagatccattttttattgtaaaactgatgtatccctttaaacatatcactctgctaactgctagtgttgttttttggtgtccaaccagatatttcaaatactgaagttatggtttgctaaccaaaaactgatacatgggagtgggagaaaatgcattaaaaacaactgagcagtactagcttgtatgccacatttggcttgtgcttttggtgaagatccattttttattgtaaaactgatgtatccctttaaacatatgactctgctaactgcttatcagatatttcaaatactgaagttatggtttgctaaccaaaaactgatacatggctgagttgaagagaaattctgttgttactattatattgctcatttttcttatgtttgtctgccaaaaaaatgcataccattaatgaggtagtaagatttctatgcagcttacacttaattagacccataatctttttatcatcaagacctgtgcacttttgggtttcatttttgactgttacaactcttgggtcttcaccaatgatctttagtgccaaagttatgtgcatctatgttctccaatctccaagatgcttgtagtttctctctttcgattgtcgcacaattacttcgttcttttgatgcaccagtttattgttgagaatgttgaaataatgcttttcggtcatatatttaggttcattgaatttggaaatgacggtggacctgcagcgaagaccttgaagccaaagttcaatttgttcgtcaagctagtgtccaagaatactggattgggggtgccgcatattgatataaaaactgtcattgcagctaccatgtttcttaaaggctttggtggtcttctgttcatagtcagcagctcatttggagcattcctcctgctcatttacttggcgtttataacccctattgtgtatgacttctacaaccatgaaatggagtcaacactgtttgtcgatctttttttcaagttcatacagaacttggcgtttatgggtgccctgcttttcttccttgggatgaagaactcaattccaaaacgtcgctccaagggaaggacaacaaaaaccaagacaaactgatgtcagtggttgtaggaggggaagcaattgggctcattatgtttgcatactatacaggaatagatgtcccacttttgttcttggtgcgccaattgaattgtgaattgggacttacagaacttagcatgtaggatatttaagttatcttgcgcaattttattttcttatgttgcgatgtgttcttatgtcacatttcattttgctacaagaactgctttgacagtaaaaaaatattaagtcgcatagtctattttctgtgca

SEQ ID NO: 100357 - DNA, 803 bp, Zea Mays
tctccccctcccctgcctcctcgtctcctcggtctcccctccctgtcttccagagacacagagcagggcgctcttcggtcggaggagaagcgcgaccacgaccatgggctttatctcgttcgtcggccgggttctcttcgcctccctcttcctcctctcggcctaccaagacgaagaccttgaagccaaagttcaatttgttcgtcaagctagtgtccaagaatactggattgggggtgccgcatattgatataaaaactgtcattgcagctaccatgtttcttaaaggctttggtggtcttctgttcatagtcagcagctcatttggagcattcctcctgctcatttacttggcgtttataacccctattgtgtatgacttctacaaccatgaaatggagtcaacactgtttgtcgatctttttttcaagttcatacagaacttggcgtttatgggtgccctgcttttcttccttgggatgaagaactcaattccaaaacgtcgctccaagggaaggacaacaaaaaccaagacaaactgatgtcagtggttgtaggaggggaagcaattgggctcattatgtttgcatactatacaggaatagatgtcccacttttgttcttggtgcgccaattgaattgtgaattgggacttacagaacttagcatgtaggatatttaagttatcttgcgcaattttattttcttatgttgcgatgtgttcttatgtcacatttcattttgctacaagaactgctttgacagtaaaaaaatattaagtcgcatagtctattttctgtgca

SEQ ID NO: 100358 - DNA, 838 bp, Zea Mays
tctccccctcccctgcctcctcgtctcctcggtctcccctccctgtcttccagagacacagagcagggcgctcttcggtcggaggagaagcgcgaccacgaccatgggctttatctcgttcgtcggccgggttctcttcgcctccctcttcctcctctcggcctaccaagagttcattgaatttggaaatgacggtggacctgcagcgaagaccttgaagccaaagttcaatttgttcgtcaagctagtgtccaagaatactggattgggggtgccgcatattgatataaaaactgtcattgcagctaccatgtttcttaaaggctttggtggtcttctgttcatagtcagcagctcatttggagcattcctcctgctcatttacttggcgtttataacccctattgtgtatgacttctacaaccatgaaatggagtcaacactgtttgtcgatctttttttcaagttcatacagaacttggcgtttatgggtgccctgcttttcttccttgggatgaagaactcaattccaaaacgtcgctccaagggaaggacaacaaaaaccaagacaaactgatgtcagtggttgtaggaggggaagcaattgggctcattatgtttgcatactatacaggaatagatgtcccacttttgttcttggtgcgccaattgaattgtgaattgggacttacagaacttagcatgtaggatatttaagttatcttgcgcaattttattttcttatgttgcgatgtgttcttatgtcacatttcattttgctacaagaactgctttgacagtaaaaaaatattaagtcgcatagtctattttctgtgca

SEQ ID NO: 100359 - DNA, 2813 bp, Zea Mays
acgaccggcctaactgtggcagcggtgctaaacatcaatggagagggaatcatggtgaggcttctccgggtttcctctctttctctatctcttcctacatcgccactcgccagtgcggcggtgacctctagaatccaaagcaagctgtagtgagcagccccttacatactctctgcggactgcggtccgcaccgcacgccatctcagcaagacgagagctccaccgcgctgttcacttcttctgacgaaggatggcgggaaaagaggatgagaatgagaagccatcgttggtggcagccggcggcaagcaagatcggacagcggcgaccacggaatcccttccgcaaaggacgaatcttgagtggggaaaggcagcgtgtagcgaggatgacatccagaagtgtgtagctgccggtgccttccatcccggtgagctggtcgaatggcgagctcccgtcaaggatgagactccgacgctatccaccatggaggatcagtttgttatcctgtctctgacgcacataatttgcggtctgagggtcgatgcgagcgatttcctggtcagtgtgctcgagtactacagacttgagtggtctcacctgacgcccaactctattacggcgctgagcatcttcgcccacctttgtgaggcctacgtggaggcgcctccaactgtggaggtcttcacgcacttctacagcctctatcacaataggaaaggcgaaacgacaacactgggcgccgtctacttccggctcagggacaggatgaagaagaattatccattgtactacttgaggtcctcgcagttcatgtgggtttctctgtggttctatgccaaggtaccaaagagctgtcgcttgaccttcaggggtgatatactaaaggaggaaaacaattggaattggaaagatcttttgcctctttcctgtgagcagatgaagcaggtcggccaaatcatgaagctaagtaaccaaggcttgactggtgcagacatcattcatgattacctcaagcgccggattagccctttgcgccgaaggatgcatttgacatgcaattattctggcctctcagatcctaccagggattcagacaaagatctttctgtggaagacattgagagcaagctgagctaccttctagatcttaagaggatgggtgtgaagcagcctacaggtagactggtcagagcatcaaccaatgaccaagccaatcagcctctagacttgctgaatgtttgctcaactcacgaagctaagaaggaagcacaacctcaagtttgtgcctccctacgaagatacacaaggcaatctgctggtcccaggaaggttgcagtacctccacctcttaaaattgaccctccccccactcaaggtccggccccagaagagattctagatgccacaacaaacatagcgactgcagtttctccaaacctgggcgtagaacaaaaatctatagagcaccctactgtggctgaagagcggaaaatagcagagttagtgaaacctacgttttcagtcattggtgccaaaaggaaggcatctgccccccggtctcgttcaaagagaagagcaaagtattcattactttccgttgttacaaagaccaggatgtcatctttggacactggttctataaaagggacttctagaacaaaagaggcagtgttagcgctgaattcacggtcaataggattggctcgatgccctcctgcctctttagcagaagggacagggaacggtggactgttcatgcttgccaaagttgttgaccatactaaggttgttgaggattccatgtcgaatatactccttaatcaacaagttggagattcttctcgcaaggaggttgatcctgcacaatctatcactgagattgtccaagaccaggaggccattgaggtttcagctgccattccggtgcctaataaggaggaaataaacagtggggtgatatgggagcggatgcagaaagttcagagtgaatacgtgtcactcagtatgacagcctcctctgagcttttagaacaagcaaagaagctggtcatggagaataaacgcctgaaggacgtgcagataatgctgtcgcaacaagtgaaagacctcgaagacggcagaaggctcttaacagaaaggatgaagaaagccgagcaggagacattcaaaataatagaagaaaatatgaagctcaaagatgagaacaaaggtagttaaatcgtctcttgtcattgaagttgtacacttgatatgtgcatttccaattttcatccgcagggcagaagcagatgatcgaggagctgagtaagcagaatgagtcaaccctaggggccttggtccataaatgcactctgttggaccgctacaaagaggagtctgctcagctcattagagagaaggaagagctgcaatcgcgtgtttcgcgtgtcaatgatcttgtcaagctagtctctagtactttgtgccaagagaaagacagcgcttcctaaattttatgtagcatttgtgtgtttgacaagtgcaaatgagatccacagaaggaatgtgattggaagcgaatgcagattactgatgtatagaaacatccttatcaatgattgatgtagtctaaaatctcaactgaaggggttatggcattatgggcatgatttagggggtgtttggtttcttttttttttttctcggaattaagaagaaagaaggttatggggccaaaaaacaacccagatacaagagcctcttacgttggacgaaaacataaaaacataaaaggactcataagtcgaaaacataaaaacataaaaggactca

SEQ ID NO: 100360 - DNA, 2745 bp, Zea Mays
acgaccggcctaactgtggcagcggtgctaaacatcaatggagagggaatcatggtgaggcttctccgggtttcctctctttctctatctcttcctacatcgccactcgccagtgcggcggtgacctctagaatccaaagcaagctgtagtgagcagccccttacatactctctgcggactgcggtccgcaccgcacgccatctcagcaagacgagagctccaccgcgctgttcacttcttctgacgaaggatggcgggaaaagaggatgagaatgagaagccatcgttggtggcagccggcggcaagcaagatcggacagcggcgaccacggaatcccttccgcaaaggacgaatcttgagtggggaaaggcagcgtgtagcgaggatgacatccagaagtgtgtagctgccggtgccttccatcccggtgagctggtcgaatggcgagctcccgtcaaggatgagactccgacgctatccaccatggaggatcagtttgttatcctgtctctgacgcacataatttgcggtctgagggtcgatgcgagcgatttcctggtcagtgtgctcgagtactacagacttgagtggtctcacctgacgcccaactctattacggcgctgagcatcttcgcccacctttgtgaggcctacgtggaggcgcctccaactgtggaggtcttcacgcacttctacagcctctatcacaataggaaaggcgaaacgacaacactgggcgccgtctacttccggctcagggacaggatgaagaagaattatccattgtactacttgaggtcctcgcagttcatgtgggtttctctgtggttctatgccaaggtaccaaagagctgtcgcttgaccttcaggggtgatatactaaaggaggaaaacaattggaattggaaagatcttttgcctctttcctgtgagcagatgaagcaggtcggccaaatcatgaagctaagtaaccaaggcttgactggtgcagacatcattcatgattacctcaagcgccggattagccctttgcgccgaaggatgcatttgacatgcaattattctggcctctcagatcctaccagggattcagacaaagatctttctgtggaagacattgagagcaagctgagctaccttctagatcttaagaggatgggtgtgaagcagcctacaggtagactggtcagagcatcaaccaatgaccaagccaatcagcctctagacttgctgaatgtttgctcaactcacgaagctaagaaggaagcacaacctcaagtttgtgcctccctacgaagatacacaaggcaatctgctggtcccaggaaggttgcagtacctccacctcttaaaattgaccctccccccactcaaggtccggccccagaagagattctagatgccacaacaaacatagcgactgcagtttctccaaacctgggcgtagaacaaaaatctatagagcaccctactgtggctgaagagcggaaaatagcagagttagtgaaacctacgttttcagtcattggtgccaaaaggaaggcatctgccccccggtctcgttcaaagagaagagcaaagtattcattactttccgttgttacaaagaccaggatgtcatctttggacactggttctataaaagggacttctagaacaaaagaggcagtgttagcgctgaattcacggtcaataggattggctcgatgccctcctgcctctttagcagaagggacagggaacggtggactgttcatgcttgccaaagttgttgaccatactaaggttgttgaggattccatgtcgaatatactccttaatcaacaagttggagattcttctcgcaaggaggttgatcctgcacaatctatcactgagattgtccaagaccaggaggccattgaggtttcagctgccattccggtgcctaataaggaggaaataaacagtggggtgatatgggagcggatgcagaaagttcagagtgaatacgtgtcactcagtatgacagcctcctctgagcttttagaacaagcaaagaagctggtcatggagaataaacgcctgaaggacgtgcagataatgctgtcgcaacaagtgaaagacctcgaagacggcagaaggctcttaacagaaaggatgaagaaagccgagcaggagacattcaaaataatagaagaaaatatgaagctcaaagatgagaacaaagggcagaagcagatgatcgaggagctgagtaagcagaatgagtcaaccctaggggccttggtccataaatgcactctgttggaccgctacaaagaggagtctgctcagctcattagagagaaggaagagctgcaatcgcgtgtttcgcgtgtcaatgatcttgtcaagctagtctctagtactttgtgccaagagaaagacagcgcttcctaaattttatgtagcatttgtgtgtttgacaagtgcaaatgagatccacagaaggaatgtgattggaagcgaatgcagattactgatgtatagaaacatccttatcaatgattgatgtagtctaaaatctcaactgaaggggttatggcattatgggcatgatttagggggtgtttggtttcttttttttttttctcggaattaagaagaaagaaggttatggggccaaaaaacaacccagatacaagagcctcttacgttggacgaaaacataaaaacataaaaggactcataagtcgaaaacataaaaacataaaaggactca

SEQ ID NO: 100361 - DNA, 1172 bp, Zea Mays
gcacaccggcacacggctcctccaagatcgagagctgtagctgcaacctgcagcagacgcatatgtccgtcgccgccgccttgggccgcgccgatgagctccgcgcgctggacgacaccctcgccggcgtccgcggccttgtagcgtctggtgcgaagcaagttcctcgcatctttcgcgtcccctacccggaggagctactccaccatgaacaaccgccagcggcggcgaccgtcccggtgatcgatctcagcggcgaccgcgcagccgtgatcgacgccgtccgtggggcggcggcggggtgggggttcttccaggtcacgggccacgcggtgcccgagcaggtgatgtcagcagccgtggcggcgatgcgggcgttccacgaagccgacggcggggagggcagcgacaaggcgcggctctactcgcgagagcccgggagggcggtcaagtaccactgcaacttcgacctgtaccagtctcccgtggccaactggcgcgacacggtctacctgcggatggcacctgaccctcccgccgccgacgatctgccggagatctgccgagatgcactgtttgaatacgccaaacaagtgaaagatttggggcagaggttgtttgggctgctctccgaatccctcgggctcaaaccgagctacttgacagatattgagtgcgaccagggacagattatacttgggcactactaccctccatgcccccagcctgaactcgccattgggacaagccggcattcagactccggcttcctgaccatactactgcaggacaaagttggcggcctccagatcctccatgatggtcagtgggtcgacgttgcaccgacgcctggagcattcatcgtcaacataggcgatctcttgcagctggtctctaacgacaagttcagcagcgtcgagcacagggtggtagccaagaatgctgaaccaagagtttcgatcgcgtgctttttcagcacccatttccatcccgcttcgacaagaacgtatggcccaatcaaggagctgctgtccgaggagaaccctcctttgtatagggaaacactcgtgagagagtatgttgcacgttactactctgttggcttggatggaaaacagaagactgctctagctgatttcaggttgtctgcagccgtgtccgcgaggccgccc

SEQ ID NO: 100362 - DNA, 900 bp, Zea Mays
agctgagcacgccgaaaagctcatcagtgctcatcccctgctggcccgttctcagtcccagtgagaggctccatgaagatcctggtcgcggtgaagcgggtggtggactacgctgtcaaagtgcgcgtgaggccggacgggaggggcgtggagacggccaacgtgaagatgtccatgaatccattctgcgagatcgccgttgaggaggcgctgcggctccgggaggccggcgtcgccgctgaggtcgtcgccgccaccgtaggccctgcccagtccgccgacacgctccgcaccgcactcgccatgggcgccgatcgcgccgtccacgtgctccacgacccggaccctgcgcggcccctcctccctctcgccgttgccaagatccttcgcgccgtcgcgctccaggagaagcccggcctcgtcatcctcggcaagcaggcaattgatgatgattgcaaccaaactggacaaatgttagctggattgctcaagtggccacaaggaacctttgcctccaagcacggatttaagacttaaccagccaagatatgcaactttgcccaacataatgaaggcaaaatccaaagttattaagaaagtcgccgctgaagaccttggcgtagatattagatcagacatggaggtgattgaggtcaatgaaccaccaaaacgaaaagcaggggtgattctttcatgtgtcgacgagctccttgacaagttgaaaaatgaagcacgtgtcctttaaccatttgtatattattcctcgctgaatatggtctgacgttcatttatttaagttctctctccaaatgttcagacttcagaccatttacaaataaaataagtgttaacatgaaccaattaagatactacccctgaaacatttacctgctgaattcc

SEQ ID NO: 100363 - DNA, 1010 bp, Zea Mays
aactcgcaactccgcagctgagcacgccgaaaagctcatcagtgctcatcccctgctggcccgttctcagtcccagtgagaggctccatgaagatcctggtcgcggtgaagcgggtggtggactacgctgtcaaagtgcgcgtgaggccggacgggaggggcgtggagacggccaacgtgaagatgtccatgaatccattctgcgagatcgccgttgaggaggcgctgcggctccgggaggccggcgtcgccgctgaggtcgtcgccgccaccgtaggccctgcccagtccgccgacacgctccgcaccgcactcgccatgggcgccgatcgcgccgtccacgtgctccacgacccggaccctgcgcggcccctcctccctctcgccgttgccaagatccttcgcgccgtcgcgctccaggagaagcccggcctcgtcatcctcggcaagcaggcaattgatgatgattgcaaccaaactggacaaatgttagctggattgctcaagtggccacaaggaacctttgcctccaaggttacattggacacagaaaaacaaaaagctactgttgagcgagaagttgatggtggaattgaaaccatctgccttgatctgccagcagtgatcaccacggatttaagacttaaccagccaagatatgcaactttgcccaacataatgaaggcaaaatccaaagttattaagaaagtcgccgctgaagaccttggcgtagatattagatcagacatggaggtgattgaggtcaatgaaccaccaaaacgaaaagcaggggtgattctttcatgtgtcgacgagctccttgacaagttgaaaaatgaagcacgtgtcctttaaccatttgtatattattcctcgctgaatatggtctgacgttcatttatttaagttctctctccaaatgttcagacttcagaccatttacaaataaaataagtgttaacatgaaccaattaagatactacccctgaaacatttacctgctgaattcc

SEQ ID NO: 100364 - DNA, 3408 bp, Zea Mays
gaatcttgagagtgaagaaaaatcttgtgagtggatacaaagatatcctcaactgtcccaataccacaactgcaattgctagagttaaaggaggctttggatgaaggaaaaagggattagaccaaaaggacagtactttgatgaagctgaatcaaatgagaacgaaaatgatgatgttgtagaaataattgggtcatcatctagagaacagaattatcaagcaagccattaacgttggggcaacaaagaagcccactacaactttgctctgacgtacaccccaagagattgtagcggaaaggtatgccaagggggcaactcaaagaaccatcagtgctgcaatgaagcctaaagaaaaaggagaagctgtttgtatgaagatagccaagttttttgagtgtggcatacccttcaatgctgccaactcaagacagtttgaggtagctgtagaggccattgcacagtatggtacggggttcaaaccccctagtttccatgagccatgagaaccattgcttgtgaaggctgtcaaagagatagatggtgagaagaagcatgaggatgcatggagtcaatatggctgcaccctcatgtcagatggatggacagacagaaggggtcgacatttgatcaacttcctagttaacagccctaaaggtacattctttttagaatcagtggatgcatcgatgagtctcatgatgtgatgatgcttgcagaactactagatataagacattgagcagattggaagggataaggtcatacaggtcgtagctgacaatggtgctaactacaaggctgcagggcgcattctggttcagaccactcctaccttgttttggacccttgtgctgctcactgcttagactttatgctggaggccatagaaaaactgaaggattttaagaagcctattgcacgtgtctgtcatgtcacaacattcatatatagacataggagaattctaagtgagatgagggtgcatacaaaaggtatggatcttgtgaggcctgctgctactaaatttgctactgcattcctcaccttgaggagtttacataagcacaaggatcgattgagagcattgttttctggtgatgttttcactcgctccaaagtagctaaaacagaagcagggaaaaaagtatgacattgttttctcaacagagttggcattcggttgaggactgccttaaagcttctttaccactacttgttgtgcttagattggttgatggtgatgagaagccagccatgcctaaagtggcagcagctatgaagatagcaaagcaaaagattacttcatcattctctattcaaagcaagaaagcttgtctaaaccgcatcatgaaaattgttgacagtcgttgggtgaaacaaatggatactccgttgtatggagcagcactctacttgaaccctggaaaattctagagctaaggggttgcttcaattatgtacttgttcaaatggtggtagatgaggaccttagagaaaaaattgatgctcaggcagtcctttatgagaaccaaaaagaagcatttgcaaacccaatggccattaaaaatgctcaaacaagaaactcacttgattggtggcttgcatatggtggtcgaaccattgagttatataagtttgcaggacggattgttagtcattgtgcttcatcatccagttgtgagcagaattggagcaaatttgaatttatgcatgccaagataaggaacaggctagagcacaaaaattgaatgatttggtgtatgttacatacaatagaaagatggcagctaggttccaaaaaaatatgtgaagaagggaagaactttgatcctttggttcttgaagattttgattgggacaatgagtgggttgatccattagctacttcatttgttgttggggatggccctcttttcacatgggaacatgttgatcatggggccggtgcatctacacaacttcaaggccgcaactttcctaggacagctcatggtactcaactgccaatcaatgttttcaagtcgtctggtcgaacctagtcgtatagctaccgaccagtcgactagtcgcgattagtcgtcgaccagatcgactaatcggccctcagcaaaaggaaagcagaggagaaaaaaccatacttaccatctgaggatgtgctcatcttgaggacgaggagcgctgcacaaggcagggtagggtgattggaaggttgttgtcgaggtgaggggagggggacggtggctcctccttgggcgagggcggcagctactccttgggagacggcggctctgtcttggggccaaggaggaggctgcagtcgtgtgcgccggcggctcctggtggctggtccttgtgcgccggctgctccctgttctgtgtgccagcggcggtgtgtgggactggaggctggaggggttgtgcaggactgcctgagcgttctcaactctcaagtctaaccctagaagcccacaaatcaaattgcagcccagttccaaccccagttgcaaaagcccatcaacagtgccatgtccaaactagtcgtcccatgtttaatcggacgactaatcaaacgactaattttctggtccgttagtcgcatcggtggggctggtcgattgcaatccaccgattaatcgcgattagttggacgacttgaaaacactgctgccaattcttgaggatgatgaaaatggtcttgatgtgggtgaagagaatgaagacgatgaaaattttgtgcttgacaaccttgacatggatgataaagaagcaacaaacaacagtggtgactgtggtggtgagcaagacaaggatgatgttggtttagatgatttggatgatggttattgagtgcttgagtaacacttgtgtgcttgtggttgtggacattgcattccactttagttgcttttgtgctatgtttgtgattggggactactagacatctcattccactttgtttgcggttgtcgacttcctattagttgaacttgtgttattgtggtaatgtcattttgcacaatattatcatgtgaactcatgttggttattgtctgaaattatgatatattgaaatttccctatgttgtataaaacgtttaaaagtcaaaactccacccatgagcgtttcaaagtttcgtcgttttaataaccatgctttcaagagtaatcatgttgcttttcacagtacttagacgtcaaaaacaccacaatcatacaccatgccttactaggaccaccagtcaaaatgatggaatggataaatcattatgtcagaatctggtctctaaaataaattcatgttaaacagatctatacaaggaattgaagaaaacacaaagtgctcgaattacctggcaaatacaacatggttcaacacctgttggaggatcttccaatgatattaag

SEQ ID NO: 100365 - DNA, 1069 bp, Zea Mays
gattttaagaagcctattgcacgtgtctgtcatgtcacaacattcatatatagacataggagaattctaagtgagatgagggtgcatacaaaaggtatggatcttgtgaggcctgctgctactaaatttgctactgcattcctcaccttgaggagtttacataagcacaaggatcgattgagagcattgttttctggtgatgttttcactcgctccaaagtagctaaaacagaagcagggaaaaaagtatgacattgttttctcaacagagttggcattcggttgaggactgccttaaagcttctttaccactacttgttgtgcttagattggttgatggtgatgagaagccagccatgcctaaagtggcagcagctatgaagatagcaaagcaaaagattacttcatcattctctattcaaagcaagaaagcttgtctaaaccgcatcatgaaaattgttgacagtcgttgggtgaaacaaatggatactccgttgtatggagcagcactctacttgaaccctggaaaattctagagctaaggggttgcttcaattatgtacttgttcaaatggtggtagatgaggaccttagagaaaaaattgatgctcaggcagtcctttatgagaaccaaaaagaagcatttgcaaacccaatggccattaaaaatgctcaaacaagaaactcacttgattggtggcttgcatatggtggtcgaaccattgagttatataagtttgcaggacggattgttagtcattgtgcttcatcatccagttgtgagcagaattggagcaaatttgaatttatgcatgccaagataaggaacaggctagagcacaaaaattgaatgatttggtgtatgttacatacaatagaaagatggcagctaggttccaaaaaaatatgtgaagaagggaagaactttgatcctttggttcttgaagattttgattgggacaatgagtgggttgatccattagctacttcatttgttgttggggatggccctcttttcacatgggaacatgttgatcatggggccggtgcatctacacaacttcaaggc

SEQ ID NO: 100366 - DNA, 1094 bp, Zea Mays
gttatcctttttttcttttatcaatgggtttaagattcactagctttctcattctactctttcacaaaggagtgcgacaagaactcaatgaatcttatgctattcattaaatagatgatttcttttttatttcttttttatttattagagtagagtatcgacaaggaatctcgattattaattcgttttttaagtattattaagtaagccatccacaatgcataggactacccctccccatttcctaattttgaatggaatactttattgattttttagtccctttaattgacatagatgcaaatactttactaagatgatgcacaagaaagggtcaggatagctcagttggtagagcagaggactgaaaatcctcgtgtcaccagttcaaatctggttcctggcacagaaaaaaggatctactgaatagatattgatacaaatattttgagatggattggggtaaatatttattaaaaatctacttagtctttagtctagagtaagtagataaatctctagagtaagtagataaatctctaaacacttctttttcttttaaaaaaagggtttaaatctctggttctttatggtatagaaagaggtgagattaggtgcccttttcttcattttgcatttcttattaaattttgtataccgctattccgaagaatatatttttttttattcttgcttatcctactttcccagttgttctaagtaatatgcgcggtacaaagttcatggtaggaacttctttgagtcattgtatttttctgttcatacgaaggaaacaaatatgtgattttccaaattggaaaatagaaatgaagccctttttgttcagtctatctggacctttttgtataataggaattaattagaatattatattctaagtatttcgtttcgtctaggaacagaaggtcaaaatattccttgacttgaataaaatctggaattgtgttgtataagtgaacatgaatttattatcactcaatgagcatcttgtatttcatagaaattgggggttatatagtccttacgtaagggccagcctatccaactttcaggcattaagatacgtttaagac

SEQ ID NO: 100367 - DNA, 3150 bp, Zea Mays
atgcgggatgcgagggctccgcagttccagaggcggggccagggcggcgtcggcgtcgtcctcctcccgctgatgctcctcctcgcaggcaccgccagcggccagcagcagatccagccgcccccggtacctccggcggacctgccggacgtggagaggcggctcaacaacctgaccgaccacgtcgccaccaccatctccgacaagttccgcttctgcgtcgccgacccgaaggaggactggaacgaggcgttcaactacacatcggacctcagcttcgtggatcgctgccttaccgagacccaaggcgacctgcctcagcgtctctgcggccccgatgaagtcaagttctacttctcaagcttgtacgaccgcgatggggacaagaacatcaacctcaagacaaacataaactgcaacatgtcttcttggggcaagggatgcgatgccggatgggcctgcgccaccgatccagttccagaccgccccagcaaccgtggtagcaacgatatcccgctgagaacaagcagctgccaggcatgctgcgagggcttcttctgcccccgcggcctcacttgcatgctccgcactattgcagattgggttccacagctgaggagaggtgcgttgtgcctgctgcttcttgtcatatacaactgctcagacaaattcctcagcatccgtgaacggaggaaagcaaggtcaagggagaatgccatccggctagctcgccagcagctaaaggcgcaggagggatggaaagcggcgaaacagtttgccaggaggcatgtgagtggcatgcagggtcatctttcacgcacgttttcgcggaggaggtcgtttcgtcagcaggtagacgcagacaagtctagccatagggtgcaggaagcgccgctgatgggtcaggtccagatgcaggaaatgtcggattctgctgtgtttgcttctgagagcgcaaatgagataacagaggcgatgccatcagtcattgtagatgtcagtgatggggaagttgttgctacaaatgaaaatcctgcgccgaaaggaaaacatagatcaacccacacacaagtgttcaagtatgcgtatggcgagattgagaaggagaaattccagcagcgacaggacaacaagaatctaacttttactggggtgatcgccatggtgaaggaccagcagaaggagataactaggcctttgctcaaggttgagttcagagacctgacactgatgctagggaagaagaagctgctgaggtctatcaatggtgaactccggccggggcgtgtaactgctgtcatgggcccatcaggggctggcaagaccacatttctcaatgccgtcactgggaaggtgaacggctacaagatgacaggttctgttcttgttaatggaaagaatcttaatatccgttcctacaaaaaggtcattggatttgtgccacaagatgacattgttcatggaaacttaacggtggaggaaaacctctggttcagtgcaaagtgcaggctatcagcaagcatgaagcatcgcgacaaggtgctcctagtggagagagtgatagattctctggatcttcagggaatcagaaattcattggttggcacagttgaaaagcgtgggatttctggcgggcagaggaagcgtgtcaatgtgggcatcgagatggtgatggagccgtcgcttctaatcctggatgaaccaacatctggcctggatagctcctcgtcacaacttctcctcagagcccttcggcatgaggcgctccaaggcgtgaacgtctgtgctgttgttcatcaaccgagctacacgctgtacaacatgttcgacgatttgatactcctcgcaaaaggggggttgatggtctacaatggcccagtaaagacggtcgaggagtacttcacagctcttggaatccatgttcctgaccgcgtaaaccccccagaccactacatcgacattctcgagggcattgtgaagcctgattcttctgccatcaaagcgaagcacctaccagtgcattggatgctacacaatggctacgaagtaccaagtgacatgcaagatgatgtcaaggaaatcggtgaacaagccccacaattcaggtccagctcctcgacatctggctcgccctctcctcactgcctccccatcagaaatgcatttgcagaagagcgtgaccgtctcgaacagcgtttgtcaaaaccgaaggacttgtccagcagaaaaacaccagggatcttcatgcagtacaaatattacttgggaagggttacgaaacagcggctgcgtgaagctaggctgctcatggttgatttcctgatactaggcctagctggtatctgcttagggacgatagcaaagctcagtgacaaaacattcgggatgcctggctacatatacactataattgcagtctctcttttgtgcaagatcgcagcactgcggtcgttttcgttggagcgattgcagtacttcagagagagagaatctgggatgagctctctggcatacttccttgctagggacacgattgatcatttcagtactgttgtgaagccgatcatttacctgtctatgttctactacttcaataacccaagatcaacaattgctgataactacattgtgctcctcgcgcttgtgtactgtgtgactgggataggatacacttttgccatctgcttcagtcctggctcagcacagctgtgttctgcgcttatcccggttgttctaaccctgttatccactcaaaagagtactccaacattaatcaggagattgtgctactcaaaatgggcattggagggcttcataattgtaaatgccaagaagtatcctggagtttggcttataacccgctgtggcctgttgtttcagagtcaatttgatattcacaactacaagctctgcattttgattttgttcatgtatggtctgttcttcaggatggtggcatttgctgcaatgattttactgaagaagagatgaatgtactctagatgtaacatttagttcatctctaatatcttcattcatttttacatgtgtaaaacaattctgatgaaaggttttagagcactgacccttgtacagatgagaaaaaaggcaataggaattcatttttttctaccattattgtttcgtaca

SEQ ID NO: 100368 - DNA, 914 bp, Zea Mays
agccccaccaggaggcacgagccggccccacctctcagccccaacttcacctccgattcgaaatgtcttcctcatcatccgatctcgtcctctacaacctcgtccccgctccccaaaccctaaaccctcccccaccacacgtcaccgccgcccccgatctctccatctccaccgccgtcgcggcggcgccagaacccgtcatccgcggccgggttcgccgcacggtgggctcctcttccgccgaccgccacgccaaggtcgccggccgcggccgccgggtccgcatcccggccatggtggcggcgcgcgtcttccagctcacgcgtgaactcggacaccgcaccgacggagagaccatcgagtggttgctgcgccaggccgagccttccataatcgccgccaccggcaccggtgtcacgaccgaggaggcgccgtcgtctctcgtccccgtctcctccatcgcgtcctcagtgtcccttacgccggtcccgtactacaccgcgctcctcatgcaaccaccgcccaccgccaatgagtcccctgtcgcctctgcatccgtatctggcactgttgcggaggagaataacaactaggctaggtggaagaggattatcaaatggcagttaggctcaaagttagttagtggttagggtttattatgtgtgctatgtggtcatggcttattaccttgggagaggattgcggtgatttagctagcaaaactgattgagaatgtaacaacagaagaaggaatgacatcttttaaagtgtttttttgagtcatactggtgttgcaagcgaagtcttatctcttgtgatatgtctagtgcttctgatttctatatcttggtgcttcaattcgtttctgaatgttttttgttgttgttgtgtgtatatatgattagttgagcact

SEQ ID NO: 100369 - DNA, 2466 bp, Zea Mays
caggaacattttggcaattctacatctttatctgttggaccatctggccaactgtttaatggtgcaggagactgggatgaatggcagtttggaccgagcacagttcatagtggtggtgctatggcaaactatgcatttgatatgaatctcctttggacagatatgaatccagacaatgctgaatatcacagaaatatccagaatcacttcatgtcaaacattgaaaacatgaatgcttatggtaatagggatcttgatgcttcctccatgtttgattctgatatttcagatgctttatctgggttgaggctgtctaataattcagtaatggatcaaaggaataatagggaagagctagcagatgaaatactcgagcgtcaaagagatttctctaaaactgttgatgaaacccgatcatctttggttggtaatgtttttcatgcacctaggtcagatgtgcatccatcacgaatatatggagatggtattttacggaggcagaccagtgcatgtgcattagatggttccaatgtttcaaggatcaatcgccatcacataaagggtgttgatcgcccatctttggctgaccagctagctataatgcaatcaggcaactttcctagagggaccaatctttctcgcaatgtgtctgtgactaacatgtccaaccccatgagcaacagatacaacagcaatacagacctggatttggctaggagtcgaatgacattttttaaggagatacttgcacaacagtatctgcaggaggataatctgtcatataacgatagtaggatctatcatgatgagccttgttttccctgttcaagaatgcaaagatctggatctcatttttattcaaactcgcggtgcattctatcccatggtgatcggcaatcacggctcttgtccctcaataggaaggcaatgggtagaaatattggatcacatgcctatcatgataatacattatcaaactacctggatgtgctttctttggataatgcagatagaaacggtgctgattcagtggaactgattgatttagtgggtcacgttaaggaaattagtatggatcaatatggaagccggtttattcaacaaaaactcgaaattgcatcactggatgaccgggaaaaaatatttccagagatattatccaatgccattgctctaacaactgatgtttttggcaattatgttatccagaagtttttcgagttcgctacagaaaggcagttaatccaattggcagatcaactcaaaggtcacattttggaactcagcctccagatgtatggttgcagggtagttcagaaggttttggaggtagttgataaggatcgaaagattgacattgttcatgagctcaggaatcatattctgaaatgtattggtgatcaaaatggtaaccatgtgatccagaaatgcatcgagtgtgttcctgaagaccgcattccatttgttattgatcctatactttcacaaattcttgttttatgtacccatcaatatggctgcagagttattcagagagttttagagcattgccatgatcctgtgactcaaagtgctaccatgaatgaaattgtgcagcaaaccttccatctgacagatgataaatttgggaactatgttgttcagcatgtgttgaaacatgggaaaccagaagagcgttcggccatcattcaaaagctctctgggcaagtggtcatcttgagcaagctaaagtatgcttctaatgtcatcgagaaatgtttggagtttggaactcttgaagaacgtgatagccttattggggagatcatttcttctggtcaaacatttcaggaattgatgaaggatcagtttggtaactatgttgtacagaaagtccttaagacatgtgatgaaagatacctagagatgatcctctcgagcatcaagttacacttgaatgaactgaagaattacacgtacggaaagcacattgtgacacgcgtcgagaagctaatcgttacaggagaggaacgagcaaggatggcctccctgagcggccagcgtcagcagcagccaccaaactgtacagctgtcgacgcacactaatccttttttttatgcattggcgtcaaatgcgacggcacattggttccttttaacgcattgtggcgtcaaatacgagtagctagatgagagctaggtttttgggcactgtaaattcttttggccatgtgcaagttcatttacagtggataatagatgtacattgtgctggagcgttcgttagctttggtatggtaggtgatcgagagcagtgctgtgtaatataaatatactcttgttgttcaccgtacgacgtacagttgctcttttgtagcactgatctcgtttttcattcatatgtaatctctaattcattcgtaaggctgctttcaagttccaacccttgtcttaatcagcgccacattagtgatcaattgtgctgtc

SEQ ID NO: 100370 - DNA, 2277 bp, Zea Mays
caggaacattttggcaattctacatctttatctgttggaccatctggccaactgtttaatggtgcaggagactgggatgaatggcagtttggaccgagcacagttcatagtggtggtgctatggcaaactatgcatttgatatgaatctcctttggacagatatgaatccagacaatgctgaatatcacagaaatatccagaatcacttcatgtcaaacattgaaaacatgaatgcttatggtaatagggatcttgatgcttcctccatgtttgattctgatatttcagatgctttatctgggttgaggctgtctaataattcagtaatggatcaaaggaataatagggaagagctagcagatgaaatactcgagcgtcaaagagatttctctaaaactgttgatgaaacccgatcatctttggttggtaatgtttttcatgcacctaggtcagatgtgcatccatcacgaatatatggagatggtattttacggaggcagaccagtgcatgtgcattagatggttccaatgtttcaaggatcaatcgccatcacataaagggtgttgatcgcccatctttggctgaccagctagctataatgcaatcaggcaactttcctagagggaccaatctttctcgcaatgtgtctgtgactaacatgtccaaccccatgagcaacagatacaacagcaatacagacctggatttggctaggagtcgaatgacattttttaaggagatacttgcacaacagtatctgcaggaggataatctgtcatataacgatagtaggatctatcatgatgagccttgttttccctgttcaagaatgcaaagatctggatctcatttttattcaaactcgcggtgcattctatcccatggtgatcggcaatcacggctcttgtccctcaataggaaggcaatgggtagaaatattggatcacatgcctatcatgataatacattatcaaactacctggatgtgctttctttggataatgcagatagaaacggtgctgattcagtggaactgattgatttagtgggtcacgttaaggaaattagtatggatcaatatggaagccggtttattcaacaaaaactcgaaattgcatcactggatgaccgggaaaaaatatttccagagatattatccaatgccattgctctaacaactgatgtttttggcaattatgttatccagaagtttttcgagttcgctacagaaaggcagttaatccaattggcagatcaactcaaaggtcacattttggaactcagcctccagatgtatggttgcagggtagttcagaaggttttggaggtagttgataaggatcgaaagattgacattgttcatgagctcaggaatcatattctgaaatgtattggtgatcaaaatggtaaccatgtgatccagaaatgcatcgagtgtgttcctgaagaccgcattccatttgttattgatcctatactttcacaaattcttgttttatgtacccatcaatatggctgcagagttattcagagagttttagagcattgccatgatcctgtgactcaaagtgctaccatgaatgaaattgtgcagcaaaccttccatctgacagatgataaatttgggaactatgttgttcagcatgtgttgaaacatgggaaaccagaagagcgttcggccatcattcaaaagctctctgggcaagtggtcatcttgagcaagctaaagtatgcttctaatgtcatcgagaaatgtttggagtttggaactcttgaagaacgtgatagccttattggggagatcatttcttctggtcaaacatttcaggaattgatgaaggatcagtttggtaactatgttgtacagaaagtccttaagacatgtgatgaaagatacctagagatgatcctctcgagcatcaagttacacttgaatgaactgaagaattacacgtacggaaagcacattgtgacacgcgtcgagaagctaatcgttacaggaggtgagcaaacagcaaattattcgcatcacaatgcaaaaaggactttcgaagtaaaagtaactcttgtactgagcaaaacactcggtttctgatttcagaggaacgagcaaggatggcctccctgagcggccagcgtcagcagcagccaccaaactgtacagctgtcgacgcacactaatccttttttttatgcattggcgtcaaatgcgacggcacattggttccttttaacgcattgtggcgtcaaatacgagtagctagatgagagctag

SEQ ID NO: 100371 - DNA, 2713 bp, Zea Mays
ctgagagccataccaaaagaactgatggcagctccccttctcttccccttgctgctgctgctgctgctgctgtcgtcctctaccactcctcttcaagctcaacagaacttcacccaaggttcctccttgacgccccaagggcctaccacctcttggctctccccatctggcgacttcgcgtttggcttccagcccatcgagggtaacacctctttctacctgctcgccgtctggttcaacaagatcggcaaccttacagtgacttggtatgccaagaccaacgacccggatccagcgccggtgcaagctccatccggctcacgcctccagctcaactccaatggggcgctctcgctccaggactccgccggcacagaggtatggaatccccaagtcgtgggcgcatcctacgctgccatgctcgattctggaaactttgtgctggctgctgcagatggctctgccctatgggagagcttcaaataccctacagataccatcctgcccactcaggtcctcaccactggaatgagcctccgcagtcggatcatccccacagactattccaatggccggttcctcctcggcctgcaaagtactggtgcgtctctttataccgttgctgtgccctctggttacgaatatgatccgtactggtccatggatgtgaacaccaccaatctggtgttcgatgcgtctggcgtgatatatatcggcaacagaagtgaaatcacatcttgggtggtcagctccatagcagactactaccttcgtgccacacttgaccccgatggcgttttccgacagtatatgtacccaaagaagaacagcaaccagagtaatcaggcatggtcagtagtggacttcaagcccccaaatatctgtggagcacagctaacaaacgttggaagcggtatttgcggttttaacagctattgcacatggaatggcgcaaacaaccagagtacctgcaagtgccccgagcagtactcatttattgatgatgagaggaagtacaaaggctgcaagccagacttccagccacaaagttgcgacttggatgaagcagcggccctgatgcagtttaaggtcataccgatgagccatgttgactggccactgtctgactatgagcagtatagccccataactaaggatcagtgtcagcaactctgtctgacagattgtttctgtgcccttgctgtgttccatgatgaagacaatacatgttggaagaagaagatgcctttgtcaaacggccaaatggcggatggtgtgcagaggacagtctatatcaaggtacgaaaggacaacggcacgcagtcggagatcgtcgattccaacaaatggaagaaagacaagaagaactggatcattggaagttcattgttcttgggaagctctgtcttggtcaaccttctgctgatctccataatactctttggtacttactgtaccatcacgataaaggaagtcccagctatgcagtcatcaaacagtataggattgcccctgaaagccttcacttatgctgagcttgagaaggcaaccggtggtttccagaaagtgattggcactggtgcttctggtattgtgtacaagggccagctacaagatgatctcagtacccacattgctgtcaaaaagatcgacaagcttgagcatgaaacagaaaaggagttcaccattgaggtccaaactattggacggacacaccacaagaacttggtcaggttgctaggattctgcaacgaaggaaaagaaagactgttagtgtatgaattcatgaccaatgggtcactcaacagatttctatttggtgatgccaagcttcagtggaatattcgagcccagcttgctcttggggtggcaagggggctgctatacttacatgaggaatgcagcacacagattatccactgtgacataaagtcccagaacatccttctcgatggcaacttcacagcaaagatctctgacttcggcttagccaaactgctccgaaccaaccagacacaaacaaatacaggtattcggggtacacgaggatatgttgctcctgagtggtttaagaacatcggtatcactgccaaggtggatgtttacagctttggggtcatcctgttggagcttgtttgttgtcggcggaatgttgaattggaggccacagatgaggatcaaaaaatactgactgactgggcaaacgactgttataggtgtggcagaattgattttctggtggagggtgatgaagaagcaatttctgatttgaagaacgtggaaaggtttgttgcagtggcattgtggtgtcttcaggaggacccaactatgagacctacaatgctgaaggtgacacaaatgcttgatgaagcagctgcagtccccagccctcctgaacctacttcctttgtcagtgcacttgcatagcatcacacctgcatattgtcatattagtatatgtatgaacatgcgtgttcgaggaaaaaaaaagtatatgtatgaaccaacaaaatggtgtgggaaattaggtatagctatctactgaaaattacctatgctgatattgtagtgtgttcatatgtactgtaaagagcacagcattactgtctgcagccataacgtactgtagtaaatattaggaagtcttcattttcccaatttgaatgcatgtttccttaaaataaattattttctatgaacaaattaatgtggt

SEQ ID NO: 100372 - DNA, 1681 bp, Zea Mays
tggtatggatccaaatttccctttatgatttccctgcgagcacaaagctagcgaagataccaaacaatggggagcacgagcgccacaggcaccacgtcgtcttcctcatcggctgcccacgggggcggtgccgcacacgtactgctcctgccgtacccgggcgcgcagggccatacaaacccgctgctccagttcggccgctgcctcgcctaccacggcctccgccccacgctcgtcacctcgcggtacgtgctctccaccaccccgcctcccggggagcccttcagggtggccgccatctccgatggcttcgacgacggcggggcggccgcgtgccccgacctcgacgtgtactggcgccagctcgaggccgtcggctcggagacgctggcggagctgatccgctccgaggccgccgatgggcggcctgtgcgcgtgctggtttacgacccgcacctgccgtgggcgcgacgggtggcacaggcggccgggctggcggcagcggcgttcctatcgcagccatgcgccgtcgacgtcgtctacggggaggtgtgggcaggacggctgccactgccggtggtggacgggaaagagctgtttgcacgcgggctgctgggtgtcgagcttggtcccgacgacgttccgccgttcgcagcaaagccagactggtgccctgtgttccttcgggcatcactgcggcaatttgaggggctggaggacgccgacgacgtgctcgtcaactcattccacgagatcgaacccaaggcagattatatggccctaacatggcatgcaaagacaataggcccaaccttgccatcattttatcttgatgatgaccgtttgccgttgaacaagacttacggtttcaacctcttcaacagcagcgagtcatgtctggcttggcttgacaaacagcttccgtgttctgttgttcttgtatcctatggtactgtctctgattatgatgaaacacagttagaggagcttggcaatggattgtacaattctggcaaaccattcatttgggttgtgaggtcaaacgaagaacacaagttgtccgatgaacttcgtgacaagtgcaaggaacgtggccttattgtttcttggtgcccccaactggaagttctagcacataaagctacaggttgtttcttcacacattgcggatggaactcgacactggaagcaattgttaatggtgtgccaatggtggcaataccacactgggcagaccagccgaccatatcaaaatatatggagagcatgtggggcttgggtgtccgggtgcgcaaggatgagaaaggcttggtaacgagggacgaggtggaaaggtgcatcaaggatgtcatggatggtgatagtaaggataagtataggaagagtgccactatgtggatgcaaaaggccaagtccgccatgcagaatggagggagctcggacaagaatattacagaattcgtcgcgaagtattctttaagttaattttcaaagatttcgtaaaaaagttatttttcaaaggtataatgatagtgttataattacttcctaccttcgtggattgtatgccttcctgcatgtgatatattttgtctcgggattgtgtgtattacgttttgacttgatgctgtacatgctacagcagcaacctccacgtctaaaaatatatacattgttacgc

SEQ ID NO: 100373 - DNA, 233 bp, Zea Mays
atctttgttgtttctgcaaccaaagatgcatgggatgactacaacatgtatatttcagataaacaagcgaatgataaggaagtgtggattgttaagaatggtgcccggaaacacattcaagctcaagatatctgtgtcggtaacatagtttggattcgagagaatgaagaagcaccatgtgatcttgttttgttgggtacttctgaaccacaaggcatctgtcatgttgaggt

SEQ ID NO: 100374 - DNA, 4886 bp, Zea Mays
gggatggcgctcccatggtggctcaccaccaaggcgtgcacagcgccgccgcctggccccggctccttctccgatgcggtcgcgttcctcttcctctccccgtgcccgcagcgcgggctcctcgccaccgccgacctcgtgttcctcgtcgcctgcatcgtccgcctcgccagacgccttcgcaggggacacccggtgcccgcggctgctccccctcccgagcgcgaggcgctgctgcagaagccgaaccatccttcgccgccgctcgtccgccacgtgctcgcgctcggggcctccgcggtgttcgcggcggtgtccgtcgtcctcctcgcgctcgcgctcctcctcctgccggccacgccgtggcgcgccgcggagggagccttcctctccgtccacgccgtcgcgcacggggtggctgcctggaccatcgtctcttcgcggagagcaggagctgccccggaggcgcacctccgcgtgttctggctcgccaccgctctcggcgccgcgctcttctctgcctcggcagtggtccgcggcgcggacgcctcgctgctcttccccgatgacattctcgccttcgctggtctgcttgtctccctgcctctggcatacatagcggtcaccggcttcaccggcaatgtcaccagggcacaagaaggtgaaccggaacacgccggtccagaggcgccctcctcgccgtacaccaccgcttcgttcctttcgcgcgctacgttcagctggataaactccctcatcaccaagggctacgcggccgaatccctcaaaaccgaagacgtgcccccggtctctgccgcccaccgcgccgaggcggcgcacgccttgttcatgtccaattggccagcgtcgccagcatctcggcacccggtcggcgtggcactctggctctctttctggccgcagctcgtgcttactgcgttccttggcctcgctcgtctgggggccatgtacgttgggccgtcgctcatcgatcagttcgtcgagttcatccgccgcggcgggacatcatgggagggccttcgtctcgttctcatcttgctcgctggcaaggccgtccagacgctggcatcgcaccattacagcttccagggacagcttctgggcatgcgcatccgcggcgcgctgcagacggcgctgtaccgcaagtcgctgcgcctcaccgccggtgctcgccgagcgcacggcgctggagccatcgtcaactacatgcaggtcgacgctgggatcgtgtcctacgccatgcacggactccacgggctgtggctgatgccgctgcagatagtggtggcgctactcctcctgtacgcctacctcgggccccgccgtgctcatgacgctcgccgtgatcaccgcagtgactgtggtcacggccttcgctaacaagctcaacctggcgtaccagctcaagttcctcggcgtccgcgatagccgcgtgaaggcccatcaccgagatgctcagtaacatgcgtcccatcaagctgcaggcttgggaggacaccttcgggggcaaggttcgcgacatccggcgagaagagctcgggtggctggccaagatcatgctcttcatgtgcgccaacacggtggtattctcgagcggtccgctcgctatgacggtgctcgtgttcgggacctacctcgcctccggtgggcagctcgacgccggcaaggtgttcacggccacggcgttcttcggcatgctggaaggccccatgcggaacttcccgcagactattgtcatgtccatgcaggcgtttgtgtcgctggatcggctgaacaaattcctgacggacaccgagatcgacaccgcggccgtggagcgcatcgagagtggcggcgctgaggacacagtggccgtcaaggtgcaaggcggggtgttcgcttgggatgtgccagcggacgaggagatgaagggcaacaacaacaacagcagcaggccccgccatgaggtggcagagaatgaccaaggaaatcgggcggagttggtgacagtgctgaggggcattgacgtggaggtgaggaggggcgagcttacggcggtggtcgggacagtgggctccggcaaatcgtcgctgctgtcctgcatcatgggggagatgcacaagctctccggcacggttagcatatgtggaagcacggcatatgttgctcagactgcttggatccggaatggaaccattcaagagaacattttatttggaaagccaatgcattcagagagatattcggaaatcgtaaatgcttgctgcctggaaaaggatttggaaatgatggagtttggtgaccagactgaaataggagagcgagggatcaatctcagtggaggccagaaacagcgcatccagcttgcaagagcggtttatcaagactgcgatatatatcttctcgatgacatatttagcgcggttgatgctcatactggatcagctattttcaaggaatgtctgaaaggcatactcaagaataagactgtgttgcttgtgactcaccaagtggacttcttgcaaaatgtggatactataattgtaatgaaagatgggttagtcatccagtcagggatctatcttgagttactagcatcatgctcagaattttctgatcttgttacagctcatcatagttcaatggagacagcaggggcacaagcttttcatgttcagaacacagagagctctcaggcttccactggatctgtagatgccccatctttggcatcgaaatccaatgctgaaaatggtgaatcagttggcagtgcaacaaacaaagaagcaggttcttctaagctgatccaggaagaggaaaaggagagtggccgagtaagctggcgtgtgtacaagctatatatgacagaggcctggggatggtggggaattgtggtcattttagctgtgtcactgctgtcagagggctccagtatggctagcaactactggttatcatatgagacatcaggaggccctgtgtttgacacttccttatttcttggtgtttatgcttcgatagttgctacgacaattatattggaaatgatcgccactcttattgtgacattcatggggcttcaatcagcacaggcctttttcaacaagatgtttgacagcattttacgagcgccaatgtcattttttgacaccactccttcaggaaggatcctaagccgggcatcatcagaccaatctaagattgatactaaccttgtgttctatgttggttttgccacatcaatgtgcatctcagtggttaccaacgtcgctattacttgccaagttgcatggccatcagtaattgcagtatttcctctgctgcttttgaacatctggtatcggaaccgttacattacgacatctcgagagcttacccggcttcaaggggtaacaagggcgccaattattgatcactttacagaaagctttctgggtgccccaactgtaaggtgcttcagaaaggaggatgagttctaccagataaacctggacaggatcaattcgaatctgcgtatgtcatttcataattatgcagctaatgagtggcttggatttcgcctggagctaattggcacacttattttgtctataactgcttttctcatgatcagcttgcctagcaatttcatcaagaaagaatttgtcggcatgtccctttcctacggcatttctctcaattccttggtgtactacacaatttccataagctgtatgatcgagaatgatatggtagccatagagagggtgcatcagtacagtactctcccttctgaggcagcatgggaagttgccgacggtcttccctcacaagattggcccagccgaggagacattgatgtgaaagatctgaaggttcggtatcgtcaaaacacgcctctaatcttgaaaggcattactgtgagcatcaaaggtggagaaaaggttggagttgtgggaaggactggcagtggaaagtcgactttggtgcaggctttattcaggatcgtggagcctgcagatggccatatcatcatcgatggtgtcaacatctgcactctggggcttcgtgatctgaggtctcgcttcggtgtgattccccaagaacctgtgctcttcgaaggaactgtacggagcaacatagacccagcagggcggtattccgaggctgagatatggcaggccctcgagtgctgccagctaaaggatatagtagcctcaaaaccagagaagcttgatgcactagtcgccgacatgggggagaactggagcgtagggcagaagcagcttctgtgcttcggccgagtcatactgaaacgcagccggatcctcttcatggacgaggcaacggcttcggtcgattctcaaacagacgcggctatccaaaagatcatccgcgaggagttcactgaatgtactgtcatcagcgttgcacatcggatcccgactgtcatggacagtgaccgtgtcctggtgttggacgcaggtctagtggcagaattcgacgcaccctccaagttgatgcggaggccatcactctttggtgcgatggttcaggagtacgcaagtcgctcatctagcgtgaaggaaaccgttggatgagatgagagtatgagaccacttctcatggccaaaagacgacggtatcggagaaatttaggcatacgcatgatgggctctgttcgcaaggaaaaataaattgtactaggactttctgtaagcttgcaagcataaagctttgttttgttcgctacaccatgtattatcttaaatagaactggactatttggtttgcatttccgccaattttgtatgtgacgaaagcttagagcatctacaggaagtttgtgtaattcacatgctaaaccagtgactttcctaagttaagaaaacctaaatttatctctc

SEQ ID NO: 100375 - DNA, 2691 bp, Zea Mays
atgacggtcatgctcccgctcccgccctctggccttccccctcccgacgcctcgtttccaccccccactggcccctcgccggctcctattccgggtccggcgaccacccctctcccctcgccggcgtcgcaggacccttcccctggtgtccagcgcggcggacgtccggaggtgctgcgctacgcgccgtgtcctccttcctctggcctctcgccggctcttactccaagaccggcgaccactcaacttccctccccggcgtcggaggattatccccttggtgttgtgcgcggcggaagatcgaaggaacagcgctggctggaagacggtggtgcttgtgcctcctctgctgcgtcactagttcagggtgacgtggggaagaaatcctatagggaggctctgttttctcccaggcctgctgcgtccagggacgttgatggttgggtgacggtggttcgtcggcgtccgaacaccttgaagtccctccccagacctgtcccggtggatttgcgcggaagatgcttcaattgtttctcgtctgagcaccgtgcggctgtgtgccgtaatcgcgtgcggtgttttttctgccggttgccggggcaccgtgtgggcgtgtgcccgcgccggcggacggaccctcccatccctggacgcactttggtgtggcgacctgtggctatgagaccttcggagaagaatgtctgcgatcgagatacggctgtggctggcgagtctggacctgttacaacgactggtgaaggcgcgaggaagagaactcgccgtggacagaggaagaggaggtcgggcgctggggtgcagttgccttctccgcctgccttcggcctggataagccggtgagctttgtcgggcgctgtggaagagttgatcgggctgaggaggaactccgtcgtgcactgatcgtcagtgttgtaggcagggaggtttctggctgcgccgtggaggtgcgtgacgcgatcgcctcaaggttttgccttgaagcagggtcgctccgcatacgtcgtgctgcgcctaattctttcctagtcttcttcccctcggttgccgtggctgatcgggtgattggggaggggcaatctcttcatgtccctccgctcaggttgcatatccgaaggtggtctcgccaggcttttgcttctggaggtggaaagccgcttgtgcccgttgacgtcgaacttcgtggaattcctgcgcatctctgggggattgagactgctgaggctgttcttggtgctttctgtttgattcaaggttttttgcctggcttggtcatggaggaagacatgtctgttctcagactgaaggtctggtgccggtcacctgtgctgctgccggcggtggtggatctccttgctgaagagccgatggtctgtggagaggatgggagctgggttcctagcacgttggtgttccctgtttctgtggtggtgcttcattctgatgggagttcagcttccggtgtggatcctcctgcgccatccccttcgggctttgtcgacgaagatagtgatcatgagcatcatttggaacggccggggcgccctgcgtcctctgttcgggttccaattcacttgcgtctgggtcagcgcagtcgttctgggctggtggatgatatgtctgttgtggctgttcatcaggatttggtggaggggggatcagttgatgctccggctctcccgattgtttcggttgaggagcgggaggcgcctggtcaccctccagttttgggatcagttgatgccctggctctcccggaagtttcggttgcagagctggaggcgcctggtcaccctccagtgttagcgttggatctggcagaggatttggagttcagttgtcaggagggctggtcttcgcatgttgttatctcgccggctaggccttgcttggacaatcctttggtgggggaccttatgaccggactggcggaggttgtcactgctgggcagcatggttccgggttctcctatttgctgaccgatggtgtttctgctaatgtggaggaggcagtcactgctgggcagcacggttccggggtctcccaattggtggctgttggttctcctgctgttgtctctgccagggtgcggaggtttgagtcttgtcagtcttcccgggctgatagatggagatcaaagccacccgtgttcaaagtttattccagaagaagattatctcaggctcaggtggtccaggacgaccttttactgcaatctgtggtggaactggttccacctttggaggagttcaagtctgcggttactaagccttctgatggcttgttaccaccccctccccaccgaaggaccaaaagcaggaaaaaagtaatgccaagtgattttcggccacggagaagtaggagggtggccaaattccctccagaacttggttccaatgcggctgcacatgtatgtagacatctgggtttttgtgatgaaatggagaatatttctcttgatgatgcctgcaattatgcaaagttatttgattctgggctttcgagtgcacatgtggctgctttggcagctttgtttggttgggaggtccctcaggtgggggcgatctgatttgtttccaatggagaatggctgttttcttatttggaatgtgaggggtctaaatgatcgtgccaggagggactcggttaaatctctggtccttgatatcaagcc

SEQ ID NO: 100376 - DNA, 196 bp, Zea Mays
tgtgtgtggggggcctgttggcacgtttgttgtttgcctccttttgctggaggttggggcactgtgcacagcaggaggttggtgggtctgtttgttctgccttttgggctttgtactttggtccattttggacccttttcttctcttaatataatgatgcgcagctctcctgcgcgttcaagaaaaaaaaagaaac

SEQ ID NO: 100377 - DNA, 106 bp, Zea Mays
gccctacggcggccaataacaagcataaatgaaaccatccatgacaaaaacactgctaccaaaacagcactacaactatctagctaacagggagacctgggatggg

SEQ ID NO: 100378 - DNA, 1139 bp, Zea Mays
aaagaaagcccagaccaaagcagagctgcttgcttctccacgccttgtgcttccacagagcaaccagttctcagaagcaatgtccgcacccctggtggacgccgagtacatggccgagatcgagagggcacggcgggacctccgcgctctcgtcgccagcaagaactgcgcgccgatcatgctccgcctcgcgtggcacgacgccggcacttacgacgccaagaccaacacaggaggccccaacggctccataaggttcccacaggagtacagccactcttcaaacgcagggatcaagatcgccattgacctcttagagcctgtgaagcagaagcaccccaagatcacatacgcagacctgtatcagctcgccggagttgtcgccgtcgaagtcactggtggaccgaccgttgacttcgtccctgggaggaaggattcttcgatttgtccagaggaaggacgcttgccggatgctagaagaggtgcttcgcatctcagacaagtattctaccggatgggtttatcagacagggacattgtggcgctctccggcggccatactctggggagagcgcatcgagagaggacagggtttgatggcccatggactagggatcctctgaaatttgacaactcttatttccttgagcttctgaaaggcgactctgaagggctcttgaaactccctactgacaaggttcttgtggaagatcctgaattccgtcagcatgtccaactatatgccaaggatgaagatgcatttttcagggactacgcggagtcacacaagaagctgtcagagctaggcttcacccccccctcgctcttgtctctcatccagatctgcgaataaacacaagtcgttgctggtgcaagctgcagctgggctcgcagttgctaccgcagttgtcgcatgggcgtacctgtgcgaatccaacaacaagttcatctaacttacgcttaccgttagtacaaatacaaattggagtcgccaaaatatttcagttctgtgcacatgtatttgcatctacatattgatataataccaagcatgttatgtgttgtgaacttgttgaggccaaagaatgaaataaagaaaaacctaaaaataagggcaaaagaagaagatagaaaatagt

SEQ ID NO: 100379 - DNA, 953 bp, Zea Mays
aaagaaagcccagaccaaagcagagctgcttgcttctccacgccttgtgcttccacagagcaaccagttctcagaagcaatgtccgcacccctggtggacgccgagtacatggccgagatcgagagggcacggcgggacctccgcgctctcgtcgccagcaagaactgcgcgccgatcatgctccgcctcgcgtggcacgacgccggcacttacgacgccaagaccaacacaggaggccccaacggctccataaggttcccacaggagtacagccactcttcaaacgcagggatcaagatcgccattgacctcttagagcctgtgaagcagaagcaccccaagatcacatacgcagacctgtatcagctcgccggagttgtcgccgtcgaagtcactggtggaccgaccgttgacttcgtccctgggaggaaggattcttcgatttgtccagaggaaggacgcttgccggatgctagaagaggtgcttcgcatctcagacaagtattctaccggatgggtttatcagacagggacattgtggcgctctccggcggccatactctggggagagcgcatcgagagaggacagggtttgatggcccatggactagggatcctctgaaatttgacaactcttatttccttgagcttctgaaaggcgactctgaagggctcttgaaactccctactgacaaggttcttgtggaagatcctgaattccgtcagcatgtccaactatatgccaaggatgaagatgcatttttcagggactacgcggagtcacacaagaagctgtcagagctaggcttcacccccccctcgctcttgtctctcatccagatctgcgaataaacacaagtcgttgctggtgcaagctgcagctgggctcgcagttgctaccgcagttgtcgcatgggcgtacctgtgcgaatccaacaacaagttcatctaa

SEQ ID NO: 100380 - DNA, 1460 bp, Zea Mays
aataccacaggtcgcactccaatggatgtaagtacaactgctcaggagatatctaacactgatgttactgttttggaaggacacagttcagaggtttttgcttgtgcatggagcccatctggttctcttctagcttctgggtcaggggactcaactgctagaatctggacaattccagatggtccatgtggttccaacatgcaatcatctcctcctggtgttcatgttttgaaacattttaaaggtcggaccaatgaaaagagtaaggatgtcaccacacttgactggaatggtgaaggtacactgctggctacaggctcctatgatggacaggcaagaatatggagtagagatggagacctgaagcagacattgttcaaacacaagggacccatattttcattgaaatggaataagaaaggagattttctcctaagtggaagtgttgataaaactgctattgtttgggatacaaagacatgggaatgcaaacagcagtttgaatttcattcagctccaacactagatgttgattggagaaataataactcttttgcaacatgttcaaccgataacatgatctatgtttgcaagattggggaacagcgtccggttaaagcattcagtggccatcagagtgaagttaatgctatcaagtgggatccgactggttctcttttggcttcatgttctgatgattggacagcaaagatatggagtatgaagcaagacaaatgtgtatttgatttcaaggagcataccaaggaaatatacactattcggtggagcccaacaggcccaggaacaaacaatcctaatcagcagttgcttttggccagcgcgtcttttgattcaactatcaagctttgggaagtcgagcaaggatgccttctgtacagcttgtctggtcataggcaaccagtgtattctgttgcatttagccccgacggcgaatacttagcgagcgggtccctggatcagtgcctacacatctggtctgtgaaagaaggcaggatcctgaagacgtacagaggtactgggggcatattcgaagtgtgctggaacaaagaaggcagcaagattgctgcctgtttctccaacaacacagtctgcgtgatggatttccggatgtagtccaaccagtagggtggtgcatatcaatcctaacacaaggctagatcataaatccgtcccatgcaaatttgtgaagagcggagttgttagcaaaatgtagatcctaggtggcttcaacttttgtccatgcacatttcgtttttcttggtcatacttaccttagagtagcaatgtagtagtggaaatgccttaacagggtttagtagcatggaaatgttttggtggtaaattaatgaattaatctgagatgtactagtttgtagtttgcacataccgtcgtgtcaatgtcttttatattgaactgctatagcgagcttggctgacca

SEQ ID NO: 100381 - DNA, 234 bp, Zea Mays
cgacggcgccctcgcccgcgccgcctgctatgggtgtgcttacatcgacggaactcaacttcctcgtcttccgctatctccaggagtcaggtacttgcgccattgcatcccctttcttctgctccgcatcttgactgcttgtgccgggagaactttcctcttttttttgaactaattaggctttggagcttcgctgatgtggggcggcgagttcctcggttggatcgtggtgga

SEQ ID NO: 100382 - DNA, 3915 bp, Zea Mays
cgcagcggtttgccggcagacgggcgggcccaggccgaggaaacaggcaggtgcatccatccagagccacgccggcgaaacgcggcgaacagatcagagcacgcgagagtggtgcagcgaggttgaagcaacgacccgcatccggccagcccccgagctgcgctgctctgctcttgctctcgttcgtcccactcctttcttcccaccgaggggagagacaaccccctggctcctgcctgctcgacggacccaaagcatcgcctcctcttcctacccctctcctcaatcggctcgtccggtcgtcgcttagcgccctccacccgccagccaccccactgcgacgccgcgttctccccttcttccgacgtcgctgtctctctctcagcccagctccaggggcgaggctgtgaaagaagagggaggaaagggagaaaaaaagaccctcttttcttccgtcggcaggcctcgtgaccatggatccgccgcccgccgggctctcgacgctgccgaggtctgctggagatccgtagccagcccacgtgtagacggttatggtgctagtaccggtgccaacgctgtgtttcttggcgggcgttgctgctcctcctccgcttgaggattgctgctgcatccggcaggagggatggtcggaggcggaaggagcgtcggcacccgcagcgtggaatcgacgacgggcgcctccagtcggttcagaaatgcgcaaatgcgcgtctgaatgaagcctggttggaggtggtagagccgatggtggtgggaacggcactgctgcgcggggtttcctccgcgtggatcctcctgttcctctcctccctgctcctctcgccgtcagcggcgtctgtcgatttcggccactgcggcggctgcgacgacgccgacgacggcgccctctccagcacctataacatcctgcaatgccagaaggtcagcgacttcctcatcgccgcggcctacttctccatcccgctcgagctgctctacttcgccacctgctccgacctcttccccctcaaatggatcgtgctgcagttcggcgccttcatcgtgctctgcggcctcacgcacctcatcactgtgttcacctacgagccgcactccttccacctcgtactcgcccttaccgtcgccaagttcctgacggcactggtctccttcgcgacggccatcaccctgctgacgctgataccacagctcctgagggtgaaggtcagggaaaacttcctgatgaacaaggcgcgtgagctggaccgggaggtggggaggatgaaaaggaaagaagaggcgagctggcatgtgcgcatgctcacacaggagatccgcaagtcgctcgacagacataccatcttgtacaccaccatggttgagctctcgaaggcactggaactgcagaattgtgctgtctggatgcctgatgagaccaggagcacgatgatcttaacacatcagctgagggaaagggatataatggacccacagaaacactcgattcctattgatgatccggatgttcaagaaataaaggcaaccaaggatgcaaaagttcttggcccagattcggcgctaggggtttctagccgaagcaagcatgaagcagggcctgtggctgcaataaggatgccgatgttaagggtgtcaaatttcaaaggagggactccggaagtgatgcagacgagctatgctatcttggttctggttttgcctaatgatggttcattagggtggggtcgaagagagttggagattgttgaggtagttgctgaccaagttgcagtcgctctgtcacatgctgcactcctagaggagtctcagctgatgcgagagaagcttgccgagcagcatagggacttgctgcaggcaaaggatgaagccatgagggcaggggacgctaggaattccttccagactgcaatgtacgatggaatgcgaaggccaatgcactcaatccttggtctcgtctcaatgatgcaacaggagagcatgaatccagagcaaaggcttgtgatggatgccattgccaagacaagcagtgttgcatccacactgatgaacgatgtgatgcaaacatcgacaatgaactgtgagcacttgtctttggtcaggaggccgttcaaccttcattccttcattaaagaagttgttggagtggtcagatgtctaactggttgcaagggtgtggagtttgagtttcaagtggagaattctttgccagaaaggatcattggtgatgagaagagagtcttccatattgtcctgcacatggtaggcactctaacagaccgatgtaatgctggctgtatctcattatatgtaaatgtccataatgaggttgaagataggcataatcatgactggatgctgcgaagagcaaacttctctgggggctatgtatgtgtgaaatttgagattaggattagaaaatcaaagggctatctgttgagttcatcaagcagtcagataagtcagggatccaaacccaacaattctgagatggggcttagcttcaatatgtgcaagaagattgtgcagatgatgaatggcaatatttggtcagtatcagattctaaaagcatcggagaaactatcatgctagtcctccagttccagttggaacctgtgactccggtctctggagcgtcctcagatttgtacagatcatccgcaattcccaactttaatgggctcagagtcctccttgcggacagcgactgcaccaaccgagctgtaactcacaggctcctagagaagcttggttgccgagtcctttcggtcgcttctggcgtccaatgcatcagctccttcgctgcggagtcgtccttccagctggtggttcttgatcttgacatgcagacgatggatggattcgaagtagcccgcgcgatcaggaagttcagtagcaatagttggctgccgttgattattgccctagcagcaagaatcgacgacaacatccgggatcgttgccagaggtcaggagtaaatggcctgatccagaaaccggtcacattagccgcgctgggagatgaactgtatagagtccttcagaacaattaaaagagcctgacggttctcatttctttcaatctcaatagattgctatagcttgatcggtaactaatttctgccaggttagctccatacaatcacaaaaaaaaaaacattttgaggcaaaagggaaatgtataggaagctgaaagcatcgctttctgcttggttcctcggtgaaggaggaggaggacgactacgacaggaaggtacaaaaaacttggagagatcatactgttagaacttagacccattcatctgtaaaccctcagataagcaaagaattagattcatgcactaacactaaccacgatataattagtttggacgaaatccatgagctgttgagtttgtgattgggactcagaatggatgggggttcagtgaatgcagcggcatatgtgtctacaggggggaaaaaggaacttttgttattggttagacatgctgcaaaagcaggctggatgagattgcagacaagaaggcagacgatgcggctgatgctgaccttttttacattacagacttgggctggttctggtcagcgaacccttgcttgcttatacgatatcctctgttccttacacgatatccttctagaaacactttaagatataaactagttttttttaagcacgttagcatcagtggaacagtttgggtagtaaaaatctggtgcattggcacctaagcttctttggtcacctcaagagctctcaacaatcagagcgattgtctaatgagaatccacggccagatttggtgttttgacccggttgtccttgtgaacttggattattttacgctaacaccgcaagttcgtttgcctgccgtgctaacaccgcaagttcgtca

SEQ ID NO: 100383 - DNA, 3152 bp, Zea Mays
ggccgaggaaacaggcaggtgcatccatccagagccacgccggcgaaacgcggcgaacagatcagagcacgcgagagtggtgcagcgaggttgaagcaacgacccgcatccggccagcccccgagctgcgctgctctgctcttgctctcgttcgtcccactcctttcttcccaccgaggggagagacaaccccctggctcctgcctgctcgacggacccaaagcatcgcctcctcttcctacccctctcctcaatcggctcgtccggtcgtcgcttagcgccctccacccgccagccaccccactgcgacgccgcgttctccccttcttccgacgtcgctgtctctctctcagcccagctccaggggcgaggctgtgaaagaagagggaggaaagggagaaaaaaagaccctcttttcttccgtcggcaggcctcgtgaccatggatccgccgcccgccgggctctcgacgctgccgaggtctgctggagatccgtagccagcccacgtgtagacggttatggtgctagtaccggtgccaacgctgtgtttcttggcgggcgttgctgctcctcctccgcttgaggattgctgctgcatccggcaggagggatggtcggaggcggaaggagcgtcggcacccgcagcgtggaatcgacgacgggcgcctccagtcggttcagaaatgcgcaaatgcgcgtctgaatgaagcctggttggaggtggtagagccgatggtggtgggaacggcactgctgcgcggggtttcctccgcgtggatcctcctgttcctctcctccctgctcctctcgccgtcagcggcgtctgtcgatttcggccactgcggcggctgcgacgacgccgacgacggcgccctctccagcacctataacatcctgcaatgccagaaggtcagcgacttcctcatcgccgcggcctacttctccatcccgctcgagctgctctacttcgccacctgctccgacctcttccccctcaaatggatcgtgctgcagttcggcgccttcatcgtgctctgcggcctcacgcacctcatcactgtgttcacctacgagccgcactccttccacctcgtactcgcccttaccgtcgccaagttcctgacggcactggtctccttcgcgacggccatcaccctgctgacgctgataccacagctcctgagggtgaaggtcagggaaaacttcctgatgaacaaggcgcgtgagctggaccgggaggtggggaggatgaaaaggaaagaagaggcgagctggcatgtgcgcatgctcacacaggagatccgcaagtcgctcgacagacataccatcttgtacaccaccatggttgagctctcgaaggcactggaactgcagaattgtgctgtctggatgcctgatgagaccaggagcacgatgatcttaacacatcagctgagggaaagggatataatggacccacagaaacactcgattcctattgatgatccggatgttcaagaaataaaggcaaccaaggatgcaaaagttcttggcccagattcggcgctaggggtttctagccgaagcaagcatgaagcagggcctgtggctgcaataaggatgccgatgttaagggtgtcaaatttcaaaggagggactccggaagtgatgcagacgagctatgctatcttggttctggttttgcctaatgatggttcattagggtggggtcgaagagagttggagattgttgaggtagttgctgaccaagttgcagtcgctctgtcacatgctgcactcctagaggagtctcagctgatgcgagagaagcttgccgagcagcatagggacttgctgcaggcaaaggatgaagccatgagggcaggggacgctaggaattccttccagactgcaatgtacgatggaatgcgaaggccaatgcactcaatccttggtctcgtctcaatgatgcaacaggagagcatgaatccagagcaaaggcttgtgatggatgccattgccaagacaagcagtgttgcatccacactgatgaacgatgtgatgcaaacatcgacaatgaactgtgagcacttgtctttggtcaggaggccgttcaaccttcattccttcattaaagaagttgttggagtggtcagatgtctaactggttgcaagggtgtggagtttgagtttcaagtggagaattctttgccagaaaggatcattggtgatgagaagagagtcttccatattgtcctgcacatggtaggcactctaacagaccgatgtaatgctggctgtatctcattatatgtaaatgtccataatgaggttgaagataggcataatcatgactggatgctgcgaagagcaaacttctctgggggctatgtatgtgtgaaatttgagattaggattagaaaatcaaagggctatctgttgagttcatcaagcagtcagataagtcagggatccaaacccaacaattctgagatggggcttagcttcaatatgtgcaagaagattgtgcagatgatgaatggcaatatttggtcagtatcagattctaaaagcatcggagaaactatcatgctagtcctccagttccagttggaacctgtgactccggtctctggagcgtcctcagatttgtacagatcatccgcaattcccaactttaatgggctcagagtcctccttgcggacagcgactgcaccaaccgagctgtaactcacaggctcctagagaagcttggttgccgagtcctttcggtcgcttctggcgtccaatgcatcagctccttcgctgcggagtcgtccttccagctggtggttcttgatcttgacatgcagacgatggatggattcgaagtagcccgcgcgatcaggaagttcagtagcaatagttggctgccgttgattattgccctagcagcaagaatcgacgacaacatccgggatcgttgccagaggtcaggagtaaatggcctgatccagaaaccggtcacattagccgcgctgggagatgaactgtatagagtccttcagaacaattaaaagagcctgacggttctcatttctttcaatctcaatagattgctatagcttgatcggtaactaatttctgccaggttagctccatacaatcacaaaaaaaaaaacattttgaggc

SEQ ID NO: 100384 - DNA, 2567 bp, Zea Mays
atggatctccaacaacgagcgccgccgccgccgcctcgcctcgacaaacccggctccagggcgacagctcccgccgctgcggggcccactaaggtcagcgtcttcatcgccagcaacgacgccgagcaggcctgcgacttcaagatcaccggcatctaccatgacggtacaaaccttgcaccttcttcgactcttcccgtccgatttgactatctaaaactgttgtttctgattcggtgcgctggcgatctggtcgcccgcagggagttcgtgaagaagaactatggtgacatcaaggcccgcaacccctccctccccttccttgtccgcgagtgctccggtgtccagccccagctctgggcgcgctacgttttagtgccactacaggggaacgaagctgatggtagattaccttattggttgcccaatacatctgtagtccaaagatgccgtctccaaagaaacattttcttggaggtgttaactgctattttagtcttaccaacagtatggctgcgagatcttcgagtactctcgtacttttcagcgagtggtgtgatggcaactcttcttgtattcctgtccgttggtttagttggtgctactgatggtataggcttccatttaactgggaaggtagtaaactggagtggcatgccctttgccattggtatttatggatttttctactctgggcattcagtattccaaacatctaccagtcaatgtctgatcactctaagttccctatggcactattcatatgaactctgctcggtattgttcttcggtaattcgattgttgcattacttataagggttatgatgacattccaaatatgggaatgtcaaggatttgcaaattttgagaggttcacaacaaacaaagctggttatgccttcataaagtatcaaaaaaatcaagcattggcagctattgaagctctaaacaggaaatacaaaatagagcattacaatattgtccagcggccaccccctgttcttggcagccggcggctgcgtcacgacgacagccacctgaaatgcggattctgttttccccttcaaaaggttcaagcatatgatgctttgagaaggtatgtttttattctatattgcttttataaatctctttcaaatggagtagagcagtcacctgaaaaattgctcataactaatttgattatcttgattatggctggaacacgagaaccagatccgacaacctcaacaaagtgcacattttcagttgtcaagccagcttcagccaaggccttctccaagggtcctttgacacgtaccagcacagcactcaatgttcagtggggcctctgggttggcgctcagcgtcttcttaagcttctcacacgccacacgcaacctaaggcatgcacgggcattctgctggtcatgctccgggaggtcagtcttacaaatgcaacctttaactcacagttgatctcaataggcgctctaggactaatatcaaggcttaatatcggcgcacttgaactgggagactatcttgcacttggggcaatattctcggccacagactcaatttgcaccttgcaggtgttaagccaagataagacaccattcttgtacaaccacgtgtttggtgaaggtgttgtcaatgacgcaacttctgttgtgttgttcaatgcaatccagaactttgatcctagaaatatcagcggtgccaaattactgaacttcattggcagtttcctttatctgttcggctccagcaccattcttggagtagcttctggacttcttagtgcttataccattaagaagttgtactttggcaggcattcaaccgatcgtgaagtttccattatgatgctaatggcttatttatcttgcatgctagctgaaaaagttcgagggtcacaaccaagcatgcctttgcaacattgtcgtttatctccgagatttttctgtttctttatgttggtatggatgcattggatatagagaagtggaagattgtcgatcaaacttatagcccggtaaagtctatcgctttgagcagcaccattttagccttggtgctggtttcaagagctgcttttgttttcccactatcctttctaccaaatttgaccaaaaaaactccaaatggaaagatatattttaggcagcagataagtctttaacttagcaacatcttaacttcttatgttctcttgaaacagttgttatgttccttacatgatattggtcattcaggttattgtttggtgggcgggtctcatgagaggtgctgtgtctattgtgttggcttacaataaggtaaatcttgtgtttggtctatctggtttgagctttggtctggaattatgttactgcttttgtttcctctatccattccaaaacataggacattttttgttgtcgtaagtcaaaattctctaactttgacaaagtatataaaaaaacataccaacatcaacaaccttcatttcttaatcttatatagaagttgcagtattttagtctaatagatggacatgttttaaattttgaggaggcattgaaacaatttgcatcatgaaggc

SEQ ID NO: 100385 - DNA, 114 bp, Zea Mays
atttatttccgccgctatcccatccacctttcccagattacaagtcgagacaccacattactcgatttgccctcgctagccgccttgtgtgaactctcgccacgctagccctag

SEQ ID NO: 100386 - DNA, 1515 bp, Zea Mays
atgtctaaaaaggtgaagcagttcactaagggacttgcgaagagagcgtcctatgttatgagaaaggaggacttagtgtttaagggcactagttctagctcgagtaggcgtagagctttgttggagcatgttccagagttgcagggtcagacagttggtgttcagaggaatgaggatgagtctgaagatggggtagagacagaggaggggagacaggtgggaaatgttgatgatgaggtagagacagaggaggggagacaggtgggacatgttgatgatgaggtagagacagaggaggggagacaggtgggagatgatgatgaggtagagacagaggaggggagacaggtgggagatgatgatgaggtagagacagaggaggcggagacagggtggggatgccatgatactggtggttttggacatgatagccatagtggatggcgtgaatggcctgaggatgcaagtggatggccaagagatggagggtcaggagttgggggagctagtgggtcaagggaaggagaagcttgtggttttggaagtgggggagttggaggggcttgggtggatagtagtttcactggcacaggtcgtcgaaggcaagtaaagaaagtgttgggcaacatatgtcgtatgaaatggcctggattggtgacagaggatggtaaggaggtccctgtcacaagatgggatcaatatgcccttgcaataaatgcgcaacatgagaatgcacaagatgcagtttgcacgacttctggaaacattacaagttgcctgaaggagatactcatacggaacacgcacactccgtgttccataggaatgcggcaagtgattagtcaagccatgtttggtagtgaagggcgacgtccagagagtaagaacgaggtgacacagtatggactcgatatgactgagcaacaatatcttgagcattcgattccatggatagctgccaatgatgctgcttggcatgcgttatgtcgttactgggcttcggctgaattcaaggcaaagtctgtgcgacacagttccaatcgtggaactgagtcgtatcacagtgtttgtcaaatgtacatacaagaagctagcactggtgcagtgcccagtgatgttcaaatataccttagggggcacagaggaccagatcctgcaaatccagatgtgttgtgcagccaaaaggcaacagatcgtgtggttgtgtatgcaagtggtggaaaagctcatggaaggtacacaatgtttgctaacgtcatcgactcgagccaggttagggtccagcgtggaggttcatcgaggtctgctgctcgtagctcccgtcgctccactcaagatccagcagaagtggagcaactgcgagaagaacttaggcgacatcatgattacttgaagcaacaagctgcgcaacatgaatattatgctacacagattcagcaacagcaaacactcatacaattaagttcaaaagataatagctttcactttaagatatgtattgatttaaaacgctga

SEQ ID NO: 100387 - DNA, 786 bp, Zea Mays
gaatacggatatatccccagatctccgtgctgttcttgtttgttgtgtagccgccactagtacgaagccctcagtcctccctcacacaccgaaccgagcgcaccatgtcgtcggcggctggaggagtggaggagacggtgcgggcgtcgcacatcctcatcaagcacgagggttcccgccgcaaggcctcctggaaggaccctgacggccgcatcatctccgccaccacgcgcggcgacgccgcagcgcgcctcctggacctccgcaaccagattctctccggccaggccaacttcgccgacctcgccgctcggcactccgactgctcgtccgcgcgacgcggtggggacttaggtacctttgggaggaggcagatgcagaaacccttcgaggacgccacatatgccctcaaggttggtgagctcagcgacatcgtggacactgacagtggggttcacatcatcctgcggactgcctgaggaggggatcacactgtcctctcaggctttcagttagtgcttatggcgttctgttagaacctgtatttgtattcctgctgggagcctgagttccattccgtgcaaagataaatcatgtgtgacgacacgtttgcaacagcatttatgcttaaactgcattaatgatgatgcgttgagctcctgaatgcctagtttttctggcgacagtatatttgtctgcttctgattataattcctggcctcgacgattgttcctttgtgtatcagtctttatcaacctaataaaagctaattacatttgatatta

SEQ ID NO: 100388 - DNA, 1954 bp, Zea Mays
gatgctgaaactggaaacaatattatcttttattactttgttctcagtaatgaaaaaacaggggtggtcccttttatctttaagaaaatttgaaaacactgtttatgatatttgaagtcatgtaattagtgcatttctaatgttatgattacattttcaattcactgaacttatcatccactgattcaagaaatttaaacataaacattgagatggactatacactgtttaagctcatttgctgataagctgacaatgcatggaggtaaaacttgtggttgtgcaatgtgtctcctgcatggatcaatatctttctgctaatgtatgtagtagttactgataatctgacaatgtatgtagtagttaccgcctatcataggtgacaatgtatgtagtagttactgcctatcataggttcccgttcaataaatattatggaagaagtataaataatcaaatggagtgttacttctgtagcatattttgagttttcatggcactacccttttttttctgtcggattaaaattgtcaattatcatttcttgaccagtgatcacattgccttctggtcacggtctatctaccacaaaagattgtccattcttgttgttggttcaacctagttgtggagaacagaagtatgagtaacttttagaagatatgttcatgcgattcaaggcagctctttgccagtccatgttttgttgcatatagcaatctatggatctttagttaggggcttagggctagacgaaatgagtatgataatggctgtaatcatacagaagcacttaaaagtttcccaattttttggttagtttccaaaggcattccatttggttggtacacctttaagtataattctttcatattattagtttcattatcttttgtgtgtaccctgtgtatttgcctgtgcatgttgtgcatcattgttcttttctcattttgatgttccataatgcaagttcattttgctatagctttcagctgctgtaatatatgttttatatatctcaggcatagggaaagcttgttttcttcattaaattacagtgcgtgaggttgtgttgcattcccctcctgagtccttactcttgtgcactttcgttcaaaagagtttgttgattaataacagatgattctttagagtttggagtaatacaagtaattatgtagtggctaatgagaatcagagtttagttgatatgcaacaactcttcagattgaagatgtgtgaaggtgaaattctttttttttaactcgcaagaacaagaaattttgtcaagctaattcacaagttcaccatgagcataatagttcaaatgcaaacgtgctgcatggaatgatgatatccgtgtgcatctcttttgtgtgttggtattaatacatggaaagaacacatgttgatggttacatgggttttgtgagggaagaaaaatatcaattggatagacattaaacaatttacagtagtagctccgcggcatgcaaccattgttatttactgtcagcttgcgttcggtcagtcagtcctgattgaagatgtcatgtttccaaccatgatgtttcaaccacaggtacctttgggaggaggcagatgcagaaacccttcgaggacgccacatatgccctcaaggttggtgagctcagcgacatcgtggacactgacagtggggttcacatcatcctgcggactgcctgaggaggggatcacactgtcctctcaggctttcagttagtgcttatggcgttctgttagaacctgtatttgtattcctgctgggagcctgagttccattccgtgcaaagataaatcatgtgtgacgacacgtttgcaacagcatttatgcttaaactgcattaatgatgatgcgttgagctcctgaatgcctagtttttctggcgacagtatatttgtctgcttctgattataattcctggcctcgacg

SEQ ID NO: 100389 - DNA, 339 bp, Zea Mays
attgtttattctgcagatctcctgcttaccgatcaagatccccacctgccaaccgaagagcatatgactaatcaagaactatattatgatgctataaatgctagcggcaactcgtgtcgggctttttcagggctgcagccagcgggaagaacttactgtgcctgtaccggagtgtcaccttaattgctttaaactcctgtctttaaaatggcatgttatgttatgcgactgtcggagtttagtacatgcaatatcgtcacatgcatgctggcattttgtttttcttgagacgctctcgagttcgttttacatcttttaccgtcctttgtcgttgctgct

SEQ ID NO: 100390 - DNA, 1348 bp, Zea Mays
ctgaggatggtgctgtagtatctgacggtggctggatttctcatctaatggtgaaactgaaactgatgcaggtgatgctcctgggccacagtgactcctatgtgaaggacaaggcaatgcaggtgacgatagccttcaaccatttcggtgaaggtctcatccagagaatgccaaggtgccggcatggctacttccatgttgtgaacaacgactacacccactgggaaatgtacgccattggcgggagcgctgagccaaccatcaacagccagggcaaccgctaccttgctcccacaaacccgttcgccaaggaggtgaccaagagggtcgaaactgctcacactgtctggaagaggtggaactggagatcagagggtgacctcctgctgaacggcgcctacttcaccccctccggcgcgggcgcctcagccagctactcgcgcgcgtccagccttggcgccaagtcatcatctatggtcggcaccatcaccctggatgccggtgccctgtcgtgccacaagggcgcggcctgctagcgcagccgccgcagaaggaaacaaacccacccccacgccacctctccaacaacagaaaagaaacaagacaacagaaaactaagctacctcaacaccatggttacagtttccccccgtctctctctctctctctctctctctctctctctctctctctctctctctctctctctgttttttggttgcttttgacaagggttatatatgatggtccttcctgattcaccatttgctcaacctccccctgctcctgacatggaaagctacctggagcaggcgtgaagcgttgctgattgatatttcgtccgccgctcggtctctctattagtcatctgatctgagtgtggtacgttgctacctgccccccgcccacagcaagtgtacgttgaggtcaggggtgcatactgtgtgtgagtgagtgcgtgtgcgttgttgtgtgtgtgtgatgcttacttggttttggagaacatgctggattgttagtagtgggtagtactgcaatgttatgcctgaacatggctggatttgccacgtagacgagacatgggaggattgccatgttcttattcttcttctccagtgaaaagcgtaaacattacaggctagctggatattttgacctggaagtacagcatgcgctgcttttgaaatgtgtacctgatcagtttgcttgaatacttcaatgtcgatacccagtaattgtcgcatctgatggtgctgagatttatttttttttggctgaaagaacactatcaccagcagcacattgatcatgcaccgatggctgaaagtttgctgacttccattgtaac

SEQ ID NO: 100391 - DNA, 2375 bp, Zea Mays
ttgagtctgctctgtagtggagcacgaaagtaagcgacggatctagaaacaatgctgcaccgacagaaagaaagaaagaagaagtgttcttgttaagtttggcgccaacaaggcgttattgaccgacatgttagatgcaacgaatggccatgagcagtgaattggtcccagtgaattgtatctctgttctgcaaaagtttcctgctggctgcattggtcttctagttactgtaactggattcctaaatgagtattgctatatctagaatttccgtggctcatgcatcgagcatcaaatcgagcatcaaatcgctcagtacctgaattattaaattctaactcaatttgtcattgttccttttttctgtatagttagtagtttctacaaatcgagtcgttgacaatgctgcttggatcggaaagtcggaataactagatgaatggctgctctgcaggtccatcaacaacatcacggcccggcgaaatctcgggtacctgtcgtgcgggacaggcaaccccatcgacgactgctggcgctgcgactcggactggcacaacaaccggaagcgcctcgccgactgtggcatcggctttggccgcaacgccatcggcggccgtgacggcaagatctacgtggtcaccgacccgagcgatgacgaccctgtcaacccgcgcaagggcaccctccgctacgccgtcatccaggaagagccgctctggatcatcttcaagcgggacatggtcatcacgctcaaggaggagctcatcatgaacagcttcaagaccatcgacggacgcggcgccaacgtgcacatcgccaatggtgcctgcatcaccatccagtacatcaccaacgtcatcatccacgggctccacatccacgactgcaagcccacggggaacgccatggtgcgcagctcgcccagccactatgggtggcgcaccatggccgacggagatggtgtgtccatcttcggttccagccacgtctgggtggaccactgctcgctctccaactgcgccgacggcctgatcgatgctatcatgggatccacggctatcacagtgtccaacaactacttcacccaccacaacgaggtgatgctcctgggccacagtgactcctatgtgaaggacaaggcaatgcaggtgacgatagccttcaaccatttcggtgaaggtctcatccagagaatgccaaggtgccggcatggctacttccatgttgtgaacaacgactacacccactgggaaatgtacgccattggcgggagcgctgagccaaccatcaacagccagggcaaccgctaccttgctcccacaaacccgttcgccaaggaggtgaccaagagggtcgaaactgctcacactgtctggaagaggtggaactggagatcagagggtgacctcctgctgaacggcgcctacttcaccccctccggcgcgggcgcctcagccagctactcgcgcgcgtccagccttggcgccaagtcatcatctatggtcggcaccatcaccctggatgccggtgccctgtcgtgccacaagggcgcggcctgctagcgcagccgccgcagaaggaaacaaacccacccccacgccacctctccaacaacagaaaagaaacaagacaacagaaaactaagctacctcaacaccatggttacagtttccccccgtctctctctctctctctctctctctctctctctctctctctctctctctctctctctgttttttggttgcttttgacaagggttatatatgatggtccttcctgattcaccatttgctcaacctccccctgctcctgacatggaaagctacctggagcaggcgtgaagcgttgctgattgatatttcgtccgccgctcggtctctctattagtcatctgatctgagtgtggtacgttgctacctgccccccgcccacagcaagtgtacgttgaggtcaggggtgcatactgtgtgtgagtgagtgcgtgtgcgttgttgtgtgtgtgtgatgcttacttggttttggagaacatgctggattgttagtagtgggtagtactgcaatgttatgcctgaacatggctggatttgccacgtagacgagacatgggaggattgccatgttcttattcttcttctccagtgaaaagcgtaaacattacaggctagctggatattttgacctggaagtacagcatgcgctgcttttgaaatgtgtacctgatcagtttgcttgaatacttcaatgtcgatacccagtaattgtcgcatctgatggtgctgagatttatttttttttggctgaaagaacactatcaccagcagcacattgatcatgcaccgatggctgaaagtttgctgacttccattgtaac

SEQ ID NO: 100392 - DNA, 2094 bp, Zea Mays
gttagctgttgacatcatctgcatatgctgtgtttctgggttgcggtggtgtccaacatcactagcggactcacttggaattgtgctctcttgctcgtgcaggggcagggccgacggtgacgccggcgccggcgcggtggaggatccggaagccgtggccaacgacgtccacgcgtccatcaacaacatcacggcccggcgaaatctcgggtacctgtcgtgcgggacaggcaaccccatcgacgactgctggcgctgcgactcggactggcacaacaaccggaagcgcctcgccgactgtggcatcggctttggccgcaacgccatcggcggccgtgacggcaagatctacgtggtcaccgacccgagcgatgacgaccctgtcaacccgcgcaagggcaccctccgctacgccgtcatccaggaagagccgctctggatcatcttcaagcgggacatggtcatcacgctcaaggaggagctcatcatgaacagcttcaagaccatcgacggacgcggcgccaacgtgcacatcgccaatggtgcctgcatcaccatccagtacatcaccaacgtcatcatccacgggctccacatccacgactgcaagcccacggggaacgccatggtgcgcagctcgcccagccactatgggtggcgcaccatggccgacggagatggtgtgtccatcttcggttccagccacgtctgggtggaccactgctcgctctccaactgcgccgacggcctgatcgatgctatcatgggatccacggctatcacagtgtccaacaactacttcacccaccacaacgaggtgatgctcctgggccacagtgactcctatgtgaaggacaaggcaatgcaggtgacgatagccttcaaccatttcggtgaaggtctcatccagagaatgccaaggtgccggcatggctacttccatgttgtgaacaacgactacacccactgggaaatgtacgccattggcgggagcgctgagccaaccatcaacagccagggcaaccgctaccttgctcccacaaacccgttcgccaaggaggtgaccaagagggtcgaaactgctcacactgtctggaagaggtggaactggagatcagagggtgacctcctgctgaacggcgcctacttcaccccctccggcgcgggcgcctcagccagctactcgcgcgcgtccagccttggcgccaagtcatcatctatggtcggcaccatcaccctggatgccggtgccctgtcgtgccacaagggcgcggcctgctagcgcagccgccgcagaaggaaacaaacccacccccacgccacctctccaacaacagaaaagaaacaagacaacagaaaactaagctacctcaacaccatggttacagtttccccccgtctctctctctctctctctctctctctctctctctctctctctctctctctctctctgttttttggttgcttttgacaagggttatatatgatggtccttcctgattcaccatttgctcaacctccccctgctcctgacatggaaagctacctggagcaggcgtgaagcgttgctgattgatatttcgtccgccgctcggtctctctattagtcatctgatctgagtgtggtacgttgctacctgccccccgcccacagcaagtgtacgttgaggtcaggggtgcatactgtgtgtgagtgagtgcgtgtgcgttgttgtgtgtgtgtgatgcttacttggttttggagaacatgctggattgttagtagtgggtagtactgcaatgttatgcctgaacatggctggatttgccacgtagacgagacatgggaggattgccatgttcttattcttcttctccagtgaaaagcgtaaacattacaggctagctggatattttgacctggaagtacagcatgcgctgcttttgaaatgtgtacctgatcagtttgcttgaatacttcaatgtcgatacccagtaattgtcgcatctgatggtgctgagatttatttttttttggctgaaagaacactatcaccagcagcacattgatcatgcaccgatggctgaaagtttgctgacttccattgtaac

SEQ ID NO: 100393 - DNA, 2295 bp, Zea Mays
cgcgtccagtgctcctctcttcctttctctctcgccgcacgcaggcagttcgagagggcgtgcgttgctcgaggggcggtaaatggcagcggcgggctcgtccgcggcgagggccaggagggcggggctcgcagccgccgccgccgcggcgctcctcgtcctcgtggtggtcgccgtcagcgcggcgctccctggcgggcgggtgagggtcctcgacggccttcggcaaaggagcacgtccgtggtggcgggaggcgcgaggcggtggctgcgggactcctccttgccggcggcgacgacgaggggcagggccgacggtgacgccggcgccggcgcggtggaggatccggaagccgtggccaacgacgtccacgcgtccatcaacaacatcacggcccggcgaaatctcgggtacctgtcgtgcgggacaggcaaccccatcgacgactgctggcgctgcgactcggactggcacaacaaccggaagcgcctcgccgactgtggcatcggctttggccgcaacgccatcggcggccgtgacggcaagatctacgtggtcaccgacccgagcgatgacgaccctgtcaacccgcgcaagggcaccctccgctacgccgtcatccaggaagagccgctctggatcatcttcaagcgggacatggtcatcacgctcaaggaggagctcatcatgaacagcttcaagaccatcgacggacgcggcgccaacgtgcacatcgccaatggtgcctgcatcaccatccagtacatcaccaacgtcatcatccacgggctccacatccacgactgcaagcccacggggaacgccatggtgcgcagctcgcccagccactatgggtggcgcaccatggccgacggagatggtgtgtccatcttcggttccagccacgtctgggtggaccactgctcgctctccaactgcgccgacggcctgatcgatgctatcatgggatccacggctatcacagtgtccaacaactacttcacccaccacaacgaggtgatgctcctgggccacagtgactcctatgtgaaggacaaggcaatgcaggtgacgatagccttcaaccatttcggtgaaggtctcatccagagaatgccaaggtgccggcatggctacttccatgttgtgaacaacgactacacccactgggaaatgtacgccattggcgggagcgctgagccaaccatcaacagccagggcaaccgctaccttgctcccacaaacccgttcgccaaggaggtgaccaagagggtcgaaactgctcacactgtctggaagaggtggaactggagatcagagggtgacctcctgctgaacggcgcctacttcaccccctccggcgcgggcgcctcagccagctactcgcgcgcgtccagccttggcgccaagtcatcatctatggtcggcaccatcaccctggatgccggtgccctgtcgtgccacaagggcgcggcctgctagcgcagccgccgcagaaggaaacaaacccacccccacgccacctctccaacaacagaaaagaaacaagacaacagaaaactaagctacctcaacaccatggttacagtttccccccgtctctctctctctctctctctctctctctctctctctctctctctctctctctctctgttttttggttgcttttgacaagggttatatatgatggtccttcctgattcaccatttgctcaacctccccctgctcctgacatggaaagctacctggagcaggcgtgaagcgttgctgattgatatttcgtccgccgctcggtctctctattagtcatctgatctgagtgtggtacgttgctacctgccccccgcccacagcaagtgtacgttgaggtcaggggtgcatactgtgtgtgagtgagtgcgtgtgcgttgttgtgtgtgtgtgatgcttacttggttttggagaacatgctggattgttagtagtgggtagtactgcaatgttatgcctgaacatggctggatttgccacgtagacgagacatgggaggattgccatgttcttattcttcttctccagtgaaaagcgtaaacattacaggctagctggatattttgacctggaagtacagcatgcgctgcttttgaaatgtgtacctgatcagtttgcttgaatacttcaatgtcgatacccagtaattgtcgcatctgatggtgctgagatttatttttttttggctgaaagaacactatcaccagcagcacattgatcatgcaccgatggctgaaagtttgctgacttccattgtaac

SEQ ID NO: 100394 - DNA, 1218 bp, Zea Mays
ctctccctccccctgcttggcttcgctcgccttctcagccacgccgccggtcagccacgccgccgcttccctcggtgggcacccccctcccccatctggaacccactcccgccaacgggtatctccattcccccctgcctaccttcgaaccgacgtgctcggattggctgacccgccgcgggcgctccctccgtcgatcaaattgaccgccgcggcgcgcccgtccccatctccgccaatctccgtggaggagccaggccatctagtgacaagtaagtagcattatcggcgaagaaaacatccacagctgagttgccaaagaaaggcggataaatatgtctcaaggaacttctccgctgccaaaagataaacctaccgcagaacctggaaaggctattggcatcaaacggctgcagactgatactccctcaggtcttgcatatcataatgtttatgtacgaaggaaagtagaatctgagcatagtaaagtgaacccttctcaggagttgaaaggtaatggaagagacaaatcaaaagatctggaggcatgccaagatgttcaacatgaggaggccaacaagcctcaagtggcatctccttttgctgaatctgtagaactagtatcttccaaatcttctcaagaaccaaatgcggaaactgtggcggagaaaactgagccaccagttgcttctagcactggcattcaagaggaggtgaaacggtcaagcatagaatactggaatgagagatttaatcggttacagacatatttggagaactgtgatcattcaacccaggagggttatttgcgaaagcttaggtccctttcggctgctgggagaaacatgcatgcaattgagctggagaaaagggcaatacatctcctaatggaggaagggaaagagctccagcgaatgaaggctttgaatgttcttgggaaggtttccccaaatgcttcgtcgaagctgacaccttcgcagcggtagtctctacaatgagatgactgtataacatcaagagggctgtaatactcaaatacattgcagaaaagacatgttgttcctgtgtaacacctttccttttatttcctttgatgccctgcccttttgatgtaagattgttgtaatgctatgtaaccagccgtacatataaacctgccattcttagtcctaaacctgactattatttgtttgttcctttgtcatgtgattgtgattt

SEQ ID NO: 100395 - DNA, 1365 bp, Zea Mays
aagaagacggcagttccgtacttccgttggattctcttgcctcggctgctcctctccctccccctgcttggcttcgctcgccttctcagccacgccgccggtcagccacgccgccgcttccctcggtgggcacccccctcccccatctggaacccactcccgccaacgggtatctccattcccccctgcctaccttcgaaccgacgtgctcggattggctgacccgccgcgggcgctccctccgtcgatcaaattgaccgccgcggcgcgcccgtccccatctccgccaatctccgatctggtgcagcggtgagagttgtctcgctgagtcaccatgcctctctgcatttgcaaaggtttcattatgattaataaattgtgtattaatgtagtggaggagccaggccatctagtgacaagtaagtagcattatcggcgaagaaaacatccacagctgagttgccaaagaaaggcggataaatatgtctcaaggaacttctccgctgccaaaagataaacctaccgcagaacctggaaaggctattggcatcaaacggctgcagactgatactccctcaggtcttgcatatcataatgtttatgtacgaaggaaagtagaatctgagcatagtaaagtgaacccttctcaggagttgaaaggtaatggaagagacaaatcaaaagatctggaggcatgccaagatgttcaacatgaggaggccaacaagcctcaagtggcatctccttttgctgaatctgtagaactagtatcttccaaatcttctcaagaaccaaatgcggaaactgtggcggagaaaactgagccaccagttgcttctagcactggcattcaagaggaggtgaaacggtcaagcatagaatactggaatgagagatttaatcggttacagacatatttggagaactgtgatcattcaacccaggagggttatttgcgaaagcttaggtccctttcggctgctgggagaaacatgcatgcaattgagctggagaaaagggcaatacatctcctaatggaggaagggaaagagctccagcgaatgaaggctttgaatgttcttgggaaggtttccccaaatgcttcgtcgaagctgacaccttcgcagcggtagtctctacaatgagatgactgtataacatcaagagggctgtaatactcaaatacattgcagaaaagacatgttgttcctgtgtaacacctttccttttatttcctttgatgccctgcccttttgatgtaagattgttgtaatgctatgtaaccagccgtacatataaacctgccattcttagtcctaaacctgactattatttgtttgttcctttgtcatgtgattgtgattt

SEQ ID NO: 100396 - DNA, 1305 bp, Zea Mays
aagaagacggcagttccgtacttccgttggattctcttgcctcggctgctcctctccctccccctgcttggcttcgctcgccttctcagccacgccgccggtcagccacgccgccgcttccctcggtgggcacccccctcccccatctggaacccactcccgccaacgggtatctccattcccccctgcctaccttcgaaccgacgtgctcggattggctgacccgccgcgggcgctccctccgtcgatcaaattgaccgccgcggcgcgcccgtccccatctccgccaatctccggtttcattatgattaataaattgtgtattaatgtagtggaggagccaggccatctagtgacaagtaagtagcattatcggcgaagaaaacatccacagctgagttgccaaagaaaggcggataaatatgtctcaaggaacttctccgctgccaaaagataaacctaccgcagaacctggaaaggctattggcatcaaacggctgcagactgatactccctcaggtcttgcatatcataatgtttatgtacgaaggaaagtagaatctgagcatagtaaagtgaacccttctcaggagttgaaaggtaatggaagagacaaatcaaaagatctggaggcatgccaagatgttcaacatgaggaggccaacaagcctcaagtggcatctccttttgctgaatctgtagaactagtatcttccaaatcttctcaagaaccaaatgcggaaactgtggcggagaaaactgagccaccagttgcttctagcactggcattcaagaggaggtgaaacggtcaagcatagaatactggaatgagagatttaatcggttacagacatatttggagaactgtgatcattcaacccaggagggttatttgcgaaagcttaggtccctttcggctgctgggagaaacatgcatgcaattgagctggagaaaagggcaatacatctcctaatggaggaagggaaagagctccagcgaatgaaggctttgaatgttcttgggaaggtttccccaaatgcttcgtcgaagctgacaccttcgcagcggtagtctctacaatgagatgactgtataacatcaagagggctgtaatactcaaatacattgcagaaaagacatgttgttcctgtgtaacacctttccttttatttcctttgatgccctgcccttttgatgtaagattgttgtaatgctatgtaaccagccgtacatataaacctgccattcttagtcctaaacctgactattatttgtttgttcctttgtcatgtgattgtgattt

SEQ ID NO: 100397 - DNA, 1426 bp, Zea Mays
atagcaaaaacctctaccttctatgagcttctatgagccaagtaaagagagaagccgagaaactgtgtttcacgtcccggcgatgagcccccgtgtggtcctcctcttcctcgccgccctccgcccctgcgccgccctcgtccgccttcactccaccactttttccttcactttcctcgacgccccagcgcgctttggcccccgagtgagcggcgatgggatctgcggctccctgcgtgccgctgacccggccgaggcgtgtgagaccatcaaagaccgcggcggccgccgcggcgcgggccggaaggctttcgtgctgatcgcgaggggcaactgcagctttgaggagaaggtgcgggcggcgcagcaagcggggttcgacgcctccatcgtgtacgacgatgaggagaaggccagcctttactccatggttggtgaatctgatggcatacacatacctgcgatatttgtttccaagatggctggcgaaacactaaagaagtttgccaggggtgaagatgaagagtgctgtattaactcgtcgatggatgagactgcagggacagtgttggtaatgtcatttgtgtcacttgttgtcatcatgtcagttcttgcttcttttctgtttgctcgaaactgccgacttctacgccatggagttgataatcacccaccttacgtcaagaaacaagtggtggaaaagtttccctgctcagcgtacagtgctccctgttctagtgaagataatttccaggaagcttgtgcaatttgcttagaagactacaataatggtgatatgcttagacatctcccatgcaagcatgaatttcacaagatctgtattgattcttggctcacaaaatggggcatcttctgccctatatgcaagctagaagtaacgttgggcgggtaggcacacttcattactgcatccaagtgctggcagttctattgaagattgttgatcttttgatccacattgcgaggttcaatattcattttaatcattgatctttgagaatgaagtacagatctcagttcctcaggttgggccttgtagtgtgctactagactactgcgttcaggttaatatttcgatcatctgtttgatatccttgtttggtgtgtggaagagctcaaggagctctgctgctgataaatgtcagcacttctgttgctgtgtattgccctgtattcctagagaaattaggtgttgtgtgcaagcaaagtgtaatcgtaagtccaatgtaaaccccttttataccaggttacgttaccttgctcattttattttgtgggcacagataaatgctcgttaattaggcaggggttgatcttactctaaaaaattgtcctaaggctcagaaataacgatgtttgaagatgcatttgttgcaaaaaacgatgttgggatcagattttgatg

SEQ ID NO: 100398 - DNA, 1424 bp, Zea Mays
ataaggccaagtgtccaagtgaccaggtgccaacctagtttgcgttctcatctccctcggctagttgttcatatcttaatctctcgaaaatcactaatcagacaactagagttctgattggcctagtcgactcggggtgcctaagtgagctgagcggactgataagccaactaatcatgattagtcaaacgacctgattatattgctggtgtaggatgtaccactatgctcatcaatgtagtgaggtttctataggtacctgagtgaagagcttctcatcgcatgagaatctgaatatcagaataaatcttatcaatgttagacacgagaaaatgttttttgtgctgtttagcaaagaattttttttttctgtattcatctattcagtttttgtagccttgtatgagatttcctgttcagttaatagtttcctcctttatgttaatttagtggttggtgaatctgatggcatacacatacctgcgatatttgtttccaagatggctggcgaaacactaaagaagtttgccaggggtgaagatgaagagtgctgtattaactcgtcgatggatgagactgcagggacagtgttggtaatgtcatttgtgtcacttgttgtcatcatgtcagttcttgcttcttttctgtttgctcgaaactgccgacttctacgccatggagttgataatcacccaccttacgtcaagaaacaagtggtggaaaagtttccctgctcagcgtacagtgctccctgttctagtgaagataatttccaggaagcttgtgcaatttgcttagaagactacaataatggtgatatgcttagacatctcccatgcaagcatgaatttcacaagatctgtattgattcttggctcacaaaatggggcatcttctgccctatatgcaagctagaagtaacgttgggcgggtaggcacacttcattactgcatccaagtgctggcagttctattgaagattgttgatcttttgatccacattgcgaggttcaatattcattttaatcattgatctttgagaatgaagtacagatctcagttcctcaggttgggccttgtagtgtgctactagactactgcgttcaggttaatatttcgatcatctgtttgatatccttgtttggtgtgtggaagagctcaaggagctctgctgctgataaatgtcagcacttctgttgctgtgtattgccctgtattcctagagaaattaggtgttgtgtgcaagcaaagtgtaatcgtaagtccaatgtaaaccccttttataccaggttacgttaccttgctcattttattttgtgggcacagataaatgctcgttaattaggcaggggttgatcttactctaaaaaattgtcctaaggctcagaaataacgatgtttgaagatgcatttgttgcaaaaaa

SEQ ID NO: 100399 - DNA, 688 bp, Zea Mays
atacgaacatgaggtcggccaccctgcttacgatctgcaccttgtccgcgctgctgctggtggcgcgcggctcggagaagccatcggccgcgccgccgccggtggtggccgtgggcgtggcggcagccagcgacctcatccgctccggcggtcaccgctacctggacgtcagaacagaggaggaattcaggagtgggcatgtggaggattcactcaacgtgccctatcttttcttcacttcacaaggaagggagaagaaccccaagttcatcgcacaggtcgcagcgggtttcgacaaagaggacaacatagttgtgggctgcaaaagcggagtgaggtctgaattagcatgtgctgatctcatggcagctggatttagaaatgtgaagaacatagaaggtggttataccgcatgggtggaaagtggtcttgccgtgaagaaatctcaagcacaagatgaactatgatgtgccctatcctgttggttcttccttgctttgacgacaaccttcgaagaaaatagtaggtttaaatgagcaaaaatatacttccttggttatttaaatatatgacacagttgattttttcgaaaactttaaccactcgtcttgtttaaaaaatcgtcagttatcatttatttttgttgtaatttctttatcactcaaggtcgtttaagtagagatcacaa

SEQ ID NO: 100400 - DNA, 2818 bp, Zea Mays
ccgcggcgagcgagggcgtctgggcgagtgcgcgaggcaccgtcccgtactcccgtgtcacccttcgggtttttgtttttcttcttttctgttggctttggcctttgggcttcccagttcccccgccgcgccccgccgcgccccgcgagaggaaaggaaacaaaggcaggtccagcagcaggcaaacgaaccaaaccgacgtaaccgcggacatgacggccgcgtgacgccatgtcggccgaggagggcgcgtcggcgtcagcgtccgcgccggcggaggcgggggcaatggtggccgaggaggcggcggccaggaagcggtacgaggcgctggtgcaggtgcgcgccaaggccatcaagggcaagggcgcctggtactgggcgcacctggagcccgtgctcgtgccgccgcccgcgtccgggcagccgcccaagatggcgcgcctgcgctgcacgctgtgcgccgccacgttctccgcctccaacccgtcgcgcaccgcctccgagcacctcaagcgcggcgcctgccacaacttcacgtcgccgctggcagcctccgcgcctgtctccaccccgccgccgccgccgccgccgctctccatcgtcgcggcgtcctccgtcgtgcccatctcctccttcccgccgtcgtcgcagcgccgccactccaccggcggcggccgccgcaagcgccacgcgctggcagcggcgtacgcggccgtggaggcggcctcctcgcagcacgtggtggttggcgagccggccatctactccacgcctcccacgccaccggcgctgcccgcgccgcgccaccaggtcctctcgggcggccgaggcgacctaggtgcgctggcgcgcctcgaggacagcgtcaagcgcctcaagtcgcccgtcgggtcaccggggtcgatgctgccgcgccaccaggccgacgcggcgctcgcgctgctcgcggactggttcctcgagtcgtccgggagcgtctccctggccgcggcggagcaccccaagctcaaggctttcctgcgccaggtcggcatcccggagctgtcgcgcgctgacctaacccgcggacgcctcgaggcgcgcttcgccgaggcccgcgccgacgccgccgcgcgcgtccgggacgcgcgcttcttccagctcgccgcggacgggtggcgcgaccgggtagtcacgctcgccgtcaacctccccaacggcacgtccgtcttccaccacgccgtgcccatgccggcgccgccgtcgtccgactacgccgaggtggtgctgctggacgccgcctcgtccgtcgcagcctccgccgacctccgccattgcgccagcgtcgtcgctgaccgcttcggctccaaggctctgcgcgatctcgagagcaagcacccgtggatggtgaacctctcgtgccaggcccattgcttggcacgcgtggcgaaagacctggcgcgcgagctccctgtggtccattccgccgccaccaactgtgccaggatggccgcctacttcaacaccaccccggccgtgggggcgctgctgcgacggcaccaagtccaggagcttgggcacgctgggctcctgcgcgtcgcggctccgctgtcgaatggcgacaccgagatcagcgcggcattcgcgatgctcgatgacgtgctgacctgtgcgcggccgctccagctctccgtgctcgaggagccgttcaagctgctgtgcgtcgacgactctaccgcgcgggagatggtagacatggtgcacagcgcggcgttctgggccgaggtggaggcggcgcactcgctggtgaagctgatcaccgacatggtgaaggagatggaggccgagcggccgctcgtcgggcaatgcctcccgctgtgggaggacctgcgtggcaaggtcagaggctggtgccgcaagttcaacgtggacgaaggcgtcgccttgagcgtgctggagaggaggttcggtaggagctaccacccggcgtggtcggcggcattcatcctggacccgctgtatcttatcaaggacgtgagtgggcggtacctcccgccattcaaatacctcaccccggagcaggagaaggacgtggacaggctgatcacgaggctggtgtcgccggaggaggcgcacctggcgatgatggagctgatgaagtggcggtcggagggcctggacccgctgtacgcgcaagcggtgcaggtccggcagcccgacccggcgacggggaagatgaagatcgccaacaagcagagcagccggctcgtgtgggagacgtgcctgagcgagctgaagtcgctgggcaaggtggccgtgcggctgattttcctccacgcgaccgcgagggggttcaggtgcacgccgacgatggcgcggtggctgaccgcgcccggggcctcgttgcgaggcgtcgcccgcgcgcaacggctggtgttcgtggtggccaactcgaagctcgagcggagggagccgtggagcgacgacgaccgggacgcggagctgctcatggagggagacgatgacatgctgactgatccgaccaccgccatcgtggttccctcatcggtgtaacaggaaaaaaaaagatgtgttaattgttctttccttgtggattaatctccctgctgcttgcagttagcacctgtagaatctgatgatcctaggtctagattctttttcatttgatctttgtttcgtctcgtggccgtgcttgttgcttgctccctcctcttgttttggtggggcgggagtagccaggtaggaggagcatgagacgatggagatagagattgctgtttcgttatcaaagtgtggttaatcaatgaataataag

SEQ ID NO: 100401 - DNA, 195 bp, Zea Mays
atggcccagatcgaaccacactcaaccgatggcggagagaagtctccgtcgaggaattccatcgcgcttcgttcgtcttccctgctccagtggtcacgtgcacgatcaatcgccttcgggtatttctctggttatgcgcctgactacgagctaggagggatccttggaatcgcatctggcagccttggctcctag

SEQ ID NO: 100402 - DNA, 464 bp, Zea Mays
gaacacgacagaaaaataactccataaaagcatagcaagctgcaaaacagaaaagcaggacggcgagcgcggcgagagtggtgccgccgccgggtgaacagggcgggggccgtagttgcagaggacgacagcgtagtaggtgacgccgacgatcgcgaggacgagcaggatcatgatggaacctagcccacgcagagccgtgcagaaccggaacacgttccacgccatcgcgacccccgccgatctgtacatggtcgccccgccaccgccgcctcgggcaaccagggaggaggacgagcaacaaaccggcgtccctcgctggataatccaggaaaacgaggtgttggaggaggattcggaattcgagattaaggaagacgaagacacgggcgaccgagcaggtcagagctggaggtgcacggtgcacctcgccgcttgttctttgcttcagatttactagacgt

SEQ ID NO: 100403 - DNA, 335 bp, Zea Mays
cacacacacatacacagatacccggtagtagaaatggatctctctctctctctctctatatagtgtgtagcgtgtgtgtgaattttttacttatacggtagttattttcatatttatatatctttagatttagaatgtgtatggtttgacaaactgtatgtgcatagagtatatattatcgtattatattaagtatgattatacttattttataggctactataattatatgttacaaaaatatatattatatatatatggcaaattgcagaacggtatgtatgtgtgtgtacacacacatatatattgattttgacatctcaactttttggatt

SEQ ID NO: 100404 - DNA, 887 bp, Zea Mays
tacctgtgcccccatcctgctgctccttgcatcgatccctaccgaataatattctgcagtagtttctcgagctcctgtagcaagaaagaaaccatgtcgggggtatgggtgttcgaggacgggatcgtgcggcgtgcggacagcgacccgcccagcggcgccggcgccggcgggtcccggccgaacaaggtgctggtgcacgttcccagcggggaggtggtgacgtcgtatgacgtgctggagcggcggctacgcgagctcggctgggagcgctacctctacgacccctgtctgctccagttccaccagcgctccaccgtgcacctcatcaccgtaccccgtgacttctcccgcctcaagctggtccacatgtacgacgtcgtcgtcaagacccgaaacgtcttcgaggtccgtgacgccgcccctgcctgatggtcttcgtggcgacgcaagctgctgctgtgtgcctattagcttcgtgcaagctcgtcggaccggctggtactggagccctatcgccgccgtatcaacatacgtgcgcatgtattgtatgtttgtgattggtactgatcgagtacttacgtgtgatttgcatggcgcagcgcgttcgtgtggctgcttcttgcatgctgtcctactttgtctgccgccgaataaatgtacgcgagagcgccgccgccgtcgccgtcgccgtatgcttcttatatatccggatttgagggtgtgttctttgactctttagtattagtcactttctagaataccaaatgggttgaggatttctaggaactaatatttagttcctagagtttagacacgggtgactaaagaaatcaaacgttccatattgcttctctctatataaatatacattgatttttaagccc

SEQ ID NO: 100405 - DNA, 1046 bp, Zea Mays
gtactgcagctcgaaaaactccatagagtttacaactctggagttagggtgtttggcatgctctggccagctccttcttagagttttgctctggagtcatgccaaacacgcccttaaggggctgttggagttgggtttatttttttaggcttttatgcttttaggatgaatccaatatagagatattgggagcagaaatattagaagctattgttgatgctcttataccttattgccacgttttcatttaatggtttctaaccatgcagctaatcctgttggtgccgttagtgaattcattgctcagttgcagattttagagttgcttgacaatgctattttcactgccggctacaaagctgtgttgcatattcactctgttgtcgaagagtgtgagattgttgagctcatagaggaaattggcatgaagaaaaagaaagaagaagatccaaagaagaaaaagccaaagaggaagcctctttttgtgaagaacggtgcaattgttgtttgccgcattcaggtgaataacttgatatgcatagagaagttctctgatttccctcagcttggaaggtttacacttagaactgaaggaaagacggtagctgtaggcaaagttgttgatattccgcctgctggtagcccaacattctgagcttaagtcaattttgaacaggatggataatcatgaagcagtgcgttcgcttaagatacttttttttgggaagtgagattagttgttgaggttagattttttttcagtccatcttgagaatggtctatgcctttatggtttaggctagcaagtcttagattggttgcataaaattacatctctggttacatgtgaggttgtaaaatcagtatggaattatggatgagtgtaccaaccttaatgtacccgttcaagattatggtggtatctttgcgtacaatgctgtaactatccatttttttttgtgtgtgtgtgaagttaaatataagatgaccacacgtggacaggccgcattaggcctcattcgtttatgtgggattgtaccggaatc

SEQ ID NO: 100406 - DNA, 1188 bp, Zea Mays
ggtacaatgttaagaaagatgtgcaattcttgccaatatctggtcttgtgggaaccaatatgaaaaccaggatggataaaagcatttgtagttggtgggatggcccatgtctttttgaagttctggaccgtattgtagttcctttacgtgaccccaaaggttcagtaaggatgccgattattgataaatataaggatatgggcactgttgcaatgggcaaaatagagtctggcactatcagagagggtgacagtttgttggttatgccaaacaagtcccatgtgaaagtcattggtttgaacttggatgagagcaaagtacgtcgtgctggacctgctgagaatgtccgtgttaaattgtctggagttgaagaggaggatgtaatggctggttttgtactttcaagtgttgctaatcctgttggtgccgttagtgaattcattgctcagttgcagattttagagttgcttgacaatgctattttcactgccggctacaaagctgtgttgcatattcactctgttgtcgaagagtgtgagattgttgagctcatagaggaaattggcatgaagaaaaagaaagaagaagatccaaagaagaaaaagccaaagaggaagcctctttttgtgaagaacggtgcaattgttgtttgccgcattcaggtgaataacttgatatgcatagagaagttctctgatttccctcagcttggaaggtttacacttagaactgaaggaaagacggtagctgtaggcaaagttgttgatattccgcctgctggtagcccaacattctgagcttaagtcaattttgaacaggatggataatcatgaagcagtgcgttcgcttaagatacttttttttgggaagtgagattagttgttgaggttagattttttttcagtccatcttgagaatggtctatgcctttatggtttaggctagcaagtcttagattggttgcataaaattacatctctggttacatgtgaggttgtaaaatcagtatggaattatggatgagtgtaccaaccttaatgtacccgttcaagattatggtggtatctttgcgtacaatgctgtaactatccatttttttttgtgtgtgtgtgaagttaaatataagatgaccacacgtggacaggccgcattaggcctcattcgtttatgtgggattgtaccggaatc

SEQ ID NO: 100407 - DNA, 614 bp, Zea Mays
caatgatgattgttcagaacacttcacattatgatttgtgaatatgctaggctattttcactgccggctacaaagctgtgttgcatattcactctgttgtcgaagagtgtgagattgttgagctcatagaggaaattggcatgaagaaaaagaaagaagaagatccaaagaagaaaaagccaaagaggaagcctctttttgtgaagaacggtgcaattgttgtttgccgcattcaggtgaataacttgatatgcatagagaagttctctgatttccctcagcttggaaggtttacacttagaactgaaggtaaagcttcaagcttggaagttggaagcatattttcatttagtgtccatgtagagaagatcatctatgatgtaacgtatgagatcctatgtttccctttttgtctattactgcctccattcacagttattttagatacattattatttttactagtgcatagcagaagctatgtatccagaaaaaccaaaacgtcttataacttgtaatggaggtagtatttttttgtggtcatcagaaattccatgtcttttacttgttgattctacacttgtgtcatagaatggattatgatgcctttccta

SEQ ID NO: 100408 - DNA, 437 bp, Zea Mays
atgtggttttcattggccatgttgatgctggaaaatcaactaccggaggacaaatattgtttttgagtggtcaagttgatgataggaccatccagaaatatgagaaggaagcaaaggataaaagtcgggaaagttggtatatggcttacatcatggacacaaatgaggaagaaagggttaagggaaagactgttgaagttggtagggcccactttgagacagaacacacaagattcactatcttggatgcaccgggtcacaaaagttatgttccaaatatgataagtggtgcatctcaagctgacattggtgttctggtcatatctgctcgaaaaggtgaattcgaaacaggttatgaaagaggaggacagacccgtgaacatgtactacttgcaaaaactttgggtgttgctaagctggtagttgtaataaataag

SEQ ID NO: 100409 - DNA, 2904 bp, Zea Mays
tccgtagtccgtacacgtccacattggatattccctgccaagtgccaccgactgccaaagagcgcagccacacacctcgccatatgtacatatactgacccgcttctcactcggtagctcactcttaagaccaaaaaagaaacgagaaaaaaagaagagagctgctctgatggatcgctccacctccctgctccggctcatcttgcttgctcttggcgcagccctggtgctcctcgtcgtccgctccgccttccgcctcccacgtggaatcgacacacccaccacctcactcttcgatgacgaagccaccgcgggcagcagctgcacccggttcgcgccgtgggggtgccggcaagccgaccggattaagcagaagccgccgtcgcacgagaacgacgtgccgcggcacccgctcgacccactgacgatcagcgaggtaaaccgtgcgcgcgagctcctccgcgcgcacccgccgttcgcatcgtcgccgtcgtccatgttcgtgcactcgctcgcgctcgacgagccggacaagcccgtcgtcctgagctggcggaagggcgtcgacccgctgcccccgcggcgcgcggtggcggtggtccggttccgcggtgaggccttcgtcctggccattgacctcgccagcggcgccgtgactcctctgcctgtcccagcttccgggtacccgaccatgaccatggacgagcaggtgctcctctgctacacgcctttcagggacccggcgttcaacgcgaccatccagcggcacggcgtccgcctgtccgatgtcgcctgcctgcccatctcgctcgggtggtacggccccagcgaggagaaccggcggctgatcaagatccagtgcttctccgcggagggcaccgccaacttctacatgcgccccatcgagggcctcaccgtgctggtggacatggacacgagggaggtggtccgcatctccgaccgcggcgccggcatccccatcccgcccgccgccaacaccgactaccggtactcccgccacatgcaagacgaaggcgacgaccagcagacagcggggttccagaaggtgcgggcgccgtcgatggaaccggggccgtcgtcagggccgcgggtggagctggtggacggccacacggtgcggtggggcgggtgggagttccacctcaaggcggacgcgcgcgccggcatggtggtgtcgcgcgcacgggtgcaggaccccggcacgggcgcgcaccgggaggtgctgtacaagggcatggcgtcggagctgttcgtaccgtacatggaccccaccgaggcgtggtacttcaagacgtacatggacgccggcgagtacggcttcggcctgcaggccatgccgctggtgccgctcaacgactgcccgcgccacgcgcgctacctggacggcgtgttcgtggccgccgacggacggccctacgtgcgcgagaagatgatctgcgtcttcgagcggtacgccggtgaggtcgcgtggagacactcggagagccccatcaccggcttggacataagggagtcgcggccgaaggtgacgctggtggcgcggatggttgcgtccgtggccaactacgactacatcatggattgggagttccagatggacggtctcgtccgcattaaggttgggctgagcgggatcctgatggtgaagggcacgtcctactcccacctgagcgaggcccgcgggaacgagggcgacatgcacggcacgctgctctcggagaacgtgatcggcgtcatccacgaccactacgtgaccttccgcctggacatggacgtcgacggcgccgacaactcgttcgttcgcgtggagatggcgcggcaggagacgggccccggcgatgagtcgccccggaggagctacctcagggccacccgccgcgtggcggagaccgagaaggacgcgcgggtgcgcctcagcctctaccacccggcggagttccacgtcgtcaaccccgccaagaagacgcgcgtcggcaaccccgttggctacaaggtcgtccctgccggcaccgccgcgagcttgctggacccggaggatccgccgcagaagaggggtgctttcacaaacaatcagatatgggtgacgccctacaacaagagcgaggaatgggccggcggcctgttcgtgtaccagagcaaaggggaggacactctggatacttggtccgagagagaccgtccgatcgagaacaaggacctggtgctgtggtacacgctggggttccaccacatcccgtgccaggaggacttccccatcatgcccaccgtgtcgtcaagcttcgacctcaagccagtcaacttcttcgagagcaaccccatcctcaagcagcgcccgaccaaagaggatgatctgcccatctgtactgcctccaccgccgcgtagcctactaggagggccgggggcgaactgattaaccggagacccatcaatcagcttgcatgcattgctgtgtgttgtgctcttgctaagctttattagtacgtaccacgaacctaatgcatgggccgtatctcatagtactccgtcagttctattttatttgtcacggtttagtttaaaaatgaactaacgaacaacgaatattcgaaaacggttatgataaatgagaactttgttggtatgatcagctaatgcatggagctatcggttgtgatggactttggatgctcgctttcttttcgatctaacccgggtgttaaccctttagtcctggctggtgtaacaccaattgggactagtgcagaccttttagtcacgacgtctataaaacttgggtccgaaactaatactcacatataatcttggtcggttggaggctcgggattcagggaactaatactcacatataatcttggttggttggaggctcgggattcagaggg

SEQ ID NO: 100410 - DNA, 2011 bp, Zea Mays
atgcgcgcgaaggggcgcgtaagatactagtatttctctctctacgggagttccctctccttcggtccttcgcgagtccaatggccgcctcgccctcttcacccttgacagcgccgccagagccggtgaccccgccgtccccatggaccatcacagacggagccatctctggcacgctcccagcagccgaggccttcgcagtgcactacccgggctacccctcctctcccgcccgcgccgcccgcaccctcggcggtctccccggcctcgccaaggtccggagttccgatcccggcgcccgcctcgagctccgcttccgccccgaggacccctactgccatccagcctttggccagtcccgcgcctccactggccttctgctgcgcctctccaagcgcaaaggagctgcggcaccttgtgcccatgtggtcgctcgtgtccggactgcttactacttcgaaggtatggcagattttcaacatgttgttccagtgcatgctgcacaaacaagaaaaagaaaacactcagattctcaaaatgataatgagaattttgataagacaggacatgatgaagcagatggagatgtcatgatgttggtaccccctctcttttcagtgaaggataggccaacaaagatagcgcttgtaccatcgtccaatgccatatctaaaaccatgcacaggggagttgtacaagaacggtgggagatgaatgttggaccaactctggcgcttccgttcaacactcaagttgtcccggagaagattaattgggaagaccacattagaaagaattctgtagaatggggttggcaaatggctgtttgcaaattgtttgatgagcgccctgtgtggccaaggcaatcactttatgagcggttccttgatgataatgtgcatgtctctcaaaaccaattcaaaaggcttctgtttagagctggatactacttctctactggaccctttggaaaattttggatcagaagaggatatgaccctcgtaaagactctgagtcacaaatatatcagagaattgattttcgcatgcctcccgagctacgatatcttctaaggctgaagaattctgagtctcgaaagtgggcagatatgtgcaagcttgaaacaatgccatcacagagtttcatctacctgcaattatatgaactgaaggatgattttattcaagcagaaattcgaaaaccttcttatcaatcagtttgttcacgttctacaggatggttttctaagccaatgatcaaaaccctgaggttgcaagtgagcataaggctcctctctttattgcataatgaagaggctaaaaacttgttgaggaatgcccatgagcttattgaaaggtccaagaagcaggaagccctttcgagatctgagctgtcaatagaatataatgatgctgatcaagtttctgccgcacatactggaactgaggatcaagtcggccctaacaactctgatagtgaagatgtggatgatgaagaagaggaagaggaattggagggttatgattctccacctatggcagatgatattcatgagttcaccttaggtgattcctatgcatttggtgaaggcttctcgaatggatacctcgaagaagtactgcgcagcttgccattgcaggaagacggccaaaagaaattatgtgatgctcctatcaacgctgatgcaagtgatggagagtttgaaatttacgaacagcccagtgatgatgaagattctgatggctagttgtatctttttttgagctgtgatcttccttagcttcagttttctaaacacataggattggttcacatgtatgtaagaactgcatagatggcttatttgttaaattattttgggtactgaggagcttagtagttcaaacccatcagtggcactttggctattgaaaatcatagccccaccacaccgatgaggacagccacgctgccattggacttgtgcccgtaactgctgttgctcgctgcaaaactcgcatatgattttcc

SEQ ID NO: 100411 - DNA, 2017 bp, Zea Mays
atgcgcgcgaaggggcgcgtaagatactagtatttctctctctacgggagttccctctccttcggtccttcgcgagtccaatggccgcctcgccctcttcacccttgacagcgccgccagagccggtgaccccgccgtccccatggaccatcacagacggagccatctctggcacgctcccagcagccgaggccttcgcagtgcactacccgggctacccctcctctcccgcccgcgccgcccgcaccctcggcggtctccccggcctcgccaaggtccggagttccgatcccggcgcccgcctcgagctccgcttccgccccgaggacccctactgccatccagcctttggccagtcccgcgcctccactggccttctgctgcgcctctccaagcgcaaaggagctgcggcaccttgtgcccatgtggtcgctcgtgtccggactgcttactacttcgaaggtatggcagattttcaacatgttgttccagtgcatgctgcacaaacaagaaaaagaaaacactcagattctcaaaatgataatgagaattttggtagtgataagacaggacatgatgaagcagatggagatgtcatgatgttggtaccccctctcttttcagtgaaggataggccaacaaagatagcgcttgtaccatcgtccaatgccatatctaaaaccatgcacaggggagttgtacaagaacggtgggagatgaatgttggaccaactctggcgcttccgttcaacactcaagttgtcccggagaagattaattgggaagaccacattagaaagaattctgtagaatggggttggcaaatggctgtttgcaaattgtttgatgagcgccctgtgtggccaaggcaatcactttatgagcggttccttgatgataatgtgcatgtctctcaaaaccaattcaaaaggcttctgtttagagctggatactacttctctactggaccctttggaaaattttggatcagaagaggatatgaccctcgtaaagactctgagtcacaaatatatcagagaattgattttcgcatgcctcccgagctacgatatcttctaaggctgaagaattctgagtctcgaaagtgggcagatatgtgcaagcttgaaacaatgccatcacagagtttcatctacctgcaattatatgaactgaaggatgattttattcaagcagaaattcgaaaaccttcttatcaatcagtttgttcacgttctacaggatggttttctaagccaatgatcaaaaccctgaggttgcaagtgagcataaggctcctctctttattgcataatgaagaggctaaaaacttgttgaggaatgcccatgagcttattgaaaggtccaagaagcaggaagccctttcgagatctgagctgtcaatagaatataatgatgctgatcaagtttctgccgcacatactggaactgaggatcaagtcggccctaacaactctgatagtgaagatgtggatgatgaagaagaggaagaggaattggagggttatgattctccacctatggcagatgatattcatgagttcaccttaggtgattcctatgcatttggtgaaggcttctcgaatggatacctcgaagaagtactgcgcagcttgccattgcaggaagacggccaaaagaaattatgtgatgctcctatcaacgctgatgcaagtgatggagagtttgaaatttacgaacagcccagtgatgatgaagattctgatggctagttgtatctttttttgagctgtgatcttccttagcttcagttttctaaacacataggattggttcacatgtatgtaagaactgcatagatggcttatttgttaaattattttgggtactgaggagcttagtagttcaaacccatcagtggcactttggctattgaaaatcatagccccaccacaccgatgaggacagccacgctgccattggacttgtgcccgtaactgctgttgctcgctgcaaaactcgcatatgattttcc

SEQ ID NO: 100412 - DNA, 1348 bp, Zea Mays
actcgcccccgtccctgcagtcgcccgtgctccgcccgctccaccagggcgcctcgccctaggggatggtctccgaccacctcccttcaccgccgccacgtgctcagtgacgcctaggtcatcggcgctgaagtttggaggccctgtacgtgcttcacagagatcgccgaccatgggctacgcagagatcgccatccgcccctctgggagcggcaagaaaatacagaggcagggtggcctatctcgaagattttcaaatgtgtcctattacggtctcacaaccccgccatataaactggatgctctggaaccttatatgagcaagaggacagttgaacttcactggggtaagcaccatcaagattacatggatggcttgaataatcagctggctaccagccctctgtatggatacactctggaggatctgataaaagaagcttataacaatgacaatccattaccagaatataacaacacagcacaggatgataagctaacatatgtcacaaacttcatggaccatcttgtctcttggcatactgtcactctacgcatgatgcgtgcagagtcttttgtgaaccttggtgagccaaatatcctagaggcttgagctacagatacaccctagttatcataatgaggcattcttcggatacatcggatcaaatcctgctggaggagccagagagttggaaaatctcatgtctcacaagaaatgcttatcaccccaatgtcatatacgccaagataagctgctgggatttcaccattgcccttggatattgctacaaggaaatcactagtcagcatccagtttgaagacatgcaacaaaacaactctagaagctatggagctggtagattctggagttggcagtaaggcagtgatccaacttgggctttgaagccatggtgctttctctagacggctattatgtctgtagtgttgttagaataatcctggttctgtgttttcataacttcatcatgctagtgttctgttgtagcggaacacagaatggaacggaacgatattcttgttttactggttgagcactacacgacgattgtttttctagggtgttctggacaaagaaagcttgtaccttaaaacaggaggatacaagaagctggagtggttgtctgaaggcttttgaactgcttgaagcattaggttagctctggagattttgtgaatgatctagctagctatctgtaaatgatctagttgtgaatgatattataattctgatgcttttgtgaatatataattgtgtttgtgtatattgattaactgtgtatgtctttatgatttgtgtataaaaatctgtgatttgtggtgctt

SEQ ID NO: 100413 - DNA, 1487 bp, Zea Mays
cacgccgtccctgtctcctcccaacatcgccgtcgtcgcccactcgcccccgtccctgcagtcgcccgtgctccgcccgctccaccagggcgcctcgccctaggggatggtctccgaccacctcccttcaccgccgccacgtgctcagtgacgcctaggtcatcggcgctgaagtttggaggccctgtacgtgcttcacagagatcgccgaccatgggctacgcagagatcgccatccgcccctctgggagcggcaagaaaatacagaggcagggtggcctatctcgaagattttcaaatgtgtcctattacggtctcacaaccccgccatataaactggatgctctggaaccttatatgagcaagaggacagttgaacttcactggggtaagcaccatcaagattacatggatggcttgaataatcagctggctaccagccctctgtatggatacactctggaggatctgataaaagaagcttataacaatgacaatccattaccagaatataacaacacagcacagtgaagagaaatgagagaaagcttttggttgttcatacacgaaatgctatctccccacttgcttttggtgacattcacgcttactacttagactacaaggatgataagctaacatatgtcacaaacttcatggaccatcttgtctcttggcatactgtcactctacgcatgatgcgtgcagagtcttttgtgaaccttggtgagccaaatatcctagaggcttgagctacagatacaccctagttatcataatgaggcattcttcggatacatcggatcaaatcctgctggaggagccagagagttggaaaatctcatgtctcacaagaaatgcttatcaccccaatgtcatatacgccaagataagctgctgggatttcaccattgcccttggatattgctacaaggaaatcactagtcagcatccagtttgaagacatgcaacaaaacaactctagaagctatggagctggtagattctggagttggcagtaaggcagtgatccaacttgggctttgaagccatggtgctttctctagacggctattatgtctgtagtgttgttagaataatcctggttctgtgttttcataacttcatcatgctagtgttctgttgtagcggaacacagaatggaacggaacgatattcttgttttactggttgagcactacacgacgattgtttttctagggtgttctggacaaagaaagcttgtaccttaaaacaggaggatacaagaagctggagtggttgtctgaaggcttttgaactgcttgaagcattaggttagctctggagattttgtgaatgatctagctagctatctgtaaatgatctagttgtgaatgatattataattctgatgcttttgtgaatatataattgtgtttgtgtatattgattaactgtgtatgtctttatgatttgtgtataaaaatctgtgatttgtggtgctt

SEQ ID NO: 100414 - DNA, 1681 bp, Zea Mays
gagcgcgcaacggggggccgtgccgtcctgactgcgctgccctagtgccctccatccccattccccgctctgctgtgctccggccctctaccacacgggacacggccaacaccgcacagctaccgtccaaatcgccgcatataatgtagcctggccatggatactttccctcctcgcctccccctcttcgtcagccccgcatctggcccggattagccgcctccggctccctcccggatcgccccaccaacagccagcctcgccagctgatctaagccaggcgcaactgtgaaacaatggcgacatccaagaaggatccccccaatcctagcagaggcaggacgtcacccaacctcatgtcgtccagcagtgagtcctctgggcacggatatggtgctaggcgggctcggtctgtaccgagttccgcgcaccgcaaatttggctcatcgtcgccgtctgtgtctgcctctggctccacagacgtgcatcattcatcattgttcaacgctggtaggtccatctcatcacggaccatgggctcttccatccagggcaccaaggcccagccattcccatctgcagcctcaaaacctacactggcaaaggagaaatccgacaaggtcagcaccaccttgcagcggcctccagtgcttgctgtgccggcagctaaggcatcgccatccaccttgccgaggagtaagccatctccaaggcctagttctgacagttgcaaagcggcagcatcactgaaacctagcagtcagagggtcatgttgccaggtgctgctcaaggagacaaagttcagccactgtctaccgcacagtcacctggtgcagctgcaaggaagagattggatactgttaatggtgctactaccaactcaaaggctaaaagtgtttctcagaaggcaatgggggcatcttcagccaggaaggagaaacataaggacccatcaatgcagattaagggaactgagtgcataaacaccaccacgtctatagaagagcacttgcacaaggagctccccgacccagttgatctgaaatccatggagatgactgtacctgatcagcatgagccatctttcaatgaaccagaacatgtactcaaagacgatgagaaatccgagggtcatttctctgaagagaaagtagatgcaggagctaatgagattcataatggagggcaagatgacaatggtggtgtcaagactatatatgaatgtgggattgttgagaagaaggctgaccggagtgtggataagacagtgccgaagactgaagtggctcaggtatggaggaaggatgatccaaagggcaatgacgtgattgaggaaaccaaaagcaagctcctgctggagaggaagagccgggtgaaggccttggtgggggcctttgaaactgtattgtcgttcaaggagtagtcctcaatcttgtcttctggtctcttgtgcccatctcaatattgagtaatatatatgatgacttccttggctcgttgtactctatatcgtatttcctttttctgaatcatcgttgcattcgatgtggatttgtctatttgttgctctttattgatgtagaattaaattaaattccggtgcttatggcgagaacatttggattctgtgaggaatattcttacttgcaatttttaatatctttcaaatttgtgcgctat

SEQ ID NO: 100415 - DNA, 2160 bp, Zea Mays
ttcttaaatctcatattgggtcatgcctacaagggagaagtttcatacccattatgaattgtacaatagtgaactagctgtacacttttgtaaagttcttacatcagtatttagtctacttggcagttagccccttctaaatatgttcacaacatctacaaataaaaaataaagggtataggttacaactacataagtcgctgaatctctggcatgatacaatgcatttggggatcttttcaccatgtgatacaccttgtggtctggatggcttgttgtcaaggactccagcttacgtcccttaatataccactgttgcttaatgcttagaaaacataaggccagtatcttgtggaggtctgctgtatgcatgatcatctgagaaggttttcgatctctttgatgcagatagagatgcaggaaaatagcattatgaaattggaagtttgcatttcataatgctcctgtcgtgatcttttgacaattcataaaaaagatgttgatagacagatagggaatagatctagggaggcggatctatttggaattattgcaacacatctcactatgtacatggctctattaatagttgtagttagttgatgtaaataattcattcccaactaatagagaagataccatacagtcccatttgaagtgataagcctcattaagccttgccatagcaccaactgtcagtattactactgtttacacatgaatattctcatatagctattgaagtgcttgacaaatctattgtacagcagttctagtgaggcattggttgtcaggttattactgccgacataacaagagtgaccgacatttaaccacttagttccttgatttattgttactgagttgctctcctaggtgttatgcacagcacagcaatcctgaacattctgtatcttgatatgatagactaataaaacaagaggctatggcatgagggtgtgtactaagaaggtttgctgtagccctcctgtttgtacgatttcctttcttagagcaagtacaataatgatcttatagccaagctaatgctgatgttgagaagagaagaggcaagagcttatttctcatgcaagtgacttgctgggcacgggagcttatgcgtagtgggcccaagtagcaagtgtattgagaagacagaaaagagaatttgagacattgtaccacataataaaaaaacctttttatataaacaagagacgactaatgtagtaatgtataacatagctcttataacttgacctatagccaagcacttgactgtaccattgaccttgcttttaatgaaatgccatgcagccttcatgcgttgttcgataaaaaaatattaaatagggagttagtaaatttctgtttcatgtttaagggattattctcttttctgaggatgtagcgctagtaatgatatttagagtattacctcttgagtaaatgtaccctagagattggaccattttttatgcatcatttgtttaaagcccacttattgataaacaaatgatgtttataaggcatgcaatgtttgagtctttgtatacatgccctcagcttgattaatcttttgtaccataatacaaggataaacatctgcgttacatttggtgaagaacattactcgtgaagttttatacgtgtctcaattttctttcaagcttcaagcattatatgctgatgataccaatctgtagatgggttatgtccaggtttgggtgtcacggccccacaaagctttcctctgcaattgatacaaagatagggtagtgtgaaacaaagcctggtggctgtttcttcgtgctgtttgcccgagcgttggcaaagcatttgttcttaatcatggtttattggcacgctcagtgttgcgtccccaggcactctccttacagaagtgcaataatgcggacaaaccactccactggtttttctatgttgattgttgtgtaaacgccgattgatttgtacaagtaaatcaatgtatcatgtctaaataactcatacatagtgttggtttcatgttttagttcccaagttttgcaaatatatgtttacggtattatgtttgtataaacaagttttgtgacgacacttctcgattcttcatgactacttgcattgtaatgcaataaagtcgtcatagtatccaca

SEQ ID NO: 100416 - DNA, 2494 bp, Zea Mays
gcgctcgtaatgcatttagatgtgttatagacctactagacaagtatttagagctagcaaaactaaaatgacaaaggaacaaatgacaaaaaaaaatccgtaaaagaagactgcagggcaggcagccagtgaagaagaagggaggggcgagtcagagagaacaagtacaacaacatcgagaccgagacggaacggagaacggccgcagctcaaacaccaggcaagcccaacccgacagcagtcagcaacctcgcaccaccacctccgtcgcagcatcaggccagcagccgccggcgccgggagccgtcgcgaagcaccccaggccttgccccctcctgcaaacgaagtgttccgtgagagcacgcttcggcgacatagcggccacagctgcagcatcctgtggagaccggcgagaacagcaccaggagctgctcccgatcactcctgcaacacacggcctcgcccgtgcctgcgcgcgcgcagaagtagcaaagtgattttccatgattggcagtgtagtatcggattcagagttcttcgtggtattctactttgcagttcagttgtagatatatggaattcttttcctgagaaatgccgtcctctacaccaccatcagtacaacccactccaagccttcagacattaacatctcctgcagtagcccagaatactcatattgatgttagtgagatcaagtccaagatttttaagaggataggacatgaacgaggaaataaatactttcagcacctggaaaggttcttatcttcaagattgagcaagaatgaattcgagaagctctgtcttgtggcacttggccgtgaaaacctcccattgcacaaccaccttatctgttccattctacataatgccagtcgagcttgtggcccacctgtaattaatgaccctaagctggtcagaggtgccaccacttctggccatgcagttgttcctcctgtctgggacaatggtggtgccttgaacctaaatgccaaagagaaaaaaccattaatcagaagggaaaatgtactaacccaaaagtcatcactgaatcattgtgagactattatgctggagaatggtgttcatcatttgagtgatctgaagagatgtacacaatttcaaaaaaaagaccatgtagagctgctcatcaagcgaccgcgtgtggagaaggaaccagtcagtttacataattctctacacagcaataggttttctaaggcttcaagagaaaacctgggtcaagaaattatacaccaattccaaggtccagttcaagcaccacttggcattcagttacgtcatggcagttttggtgtggcccaaatacctttaccccttgcttctgtgagttcaaaggatacctctgatacttgtattgaagatggtgaactctgtgatacttcgtcagtgaagaaaaggatggacaaagtggcaggagcaaatgggttggaaggggtctcgatagagtgtgctaatttgttgaataatggcattgatgttttcatgaagcagttaattggatcttgcattgaattagttagagcaaggtctcgacatggcaaactaaggcatgagacattgaagcagcagctgtgccgaaagctaataaatggtgtatcagtgcataaccatgttcctgggcagagttctgttatacctccagagacaaattccatctccatgcaggacttaaaggcagtaatagagttaaacccttgtttgcttgggattaatgcatcactgctacacgaaaagatcaattcatatgactagtaggatggagctagttgtattcatctcgtcacaagatcctatgatcttgatggtctgtcttgtttcatggctgttgtaatcaagccataagtttattgatgggtggcggtgaaggcaagcgcattctgtgcagtaccctgattgttttgcatgtcatctccagtgcaatcttccagaatgaacaaaaaactgtgtacctgctgggtgcagtactaaaataattcatttcatccacctaaggagtaaggactacgatgggcgaaagtgctccagagataactatgttgctggactccagacaaattgaggaaccatatcaaagatttgatctgtaagtttatcataactaatatgtgcttgtgcatttcaacttttacatttgtagcatagatacaactgtttctagttatttatttgcactcagttttgtttcaatgtcacaataaatagaaactttttataagtcatgtcgggaacacttgtagcgttgatgtgtgagtatattttcatcagaactgatggtaacaaagactaaactgacactagtcatgtccaactattaagacaacaattgtttctcaaagatgaacagtggaaacacccttttgtaagatagtagattctgttgagctcttggccccaattatgccaataacactctgtttatattgtggtacttggcacacgattttcttataatcatctgctgttgctg

SEQ ID NO: 100417 - DNA, 439 bp, Zea Mays
ataattttttagcagaataatgattctaatgccttgctatacgcaacttgattcaggtctgtgcagaggtggtaggagatgtaaatctacatggccatcgtcgtggctgccataacgatgctgtaattataccgttgtacatgtatttccaattagcttaactcgattgctgttgtatttcagaaagttgacgatgctaatccttttaaagtcaaaagttactttttgttgtatacttcacctttccgtacaagctgtcgatgatgcaagaagttacacaggcgaatggaattgcctgggcttgcttttacacttgtgaaaatcgtgtattttattttcctgctctcgtctgaggttagtgtaataattcaacgtttggagtttcttgttttaactgtattttacatgaaataccacctcaaaatcctgttgtggaatc

SEQ ID NO: 100418 - DNA, 2700 bp, Zea Mays
ctccctctctctctctcttggagttgctgtgaaaatacgacctatcggggacagctcgatctccctcccttggctggagcctggagccgacggagcagaacgacggttccttgcggcggcagcgacctcgagctgagggcggcgagaaggcgggaacaactcgatctccctttgctagctagctagtcccgatggagccgagggttccttgcggcgacggcggccccgaacctagggccgcgagaacgcatcgacgggagggcgagcgaaaccacgtcctcgatgcgcgaatcctggagcctcagcgacagagatcgaatccaatcaggaacatctttcatctattaactcaacgagaggtctcacctcgattgaaacaccatgctaaaagaatgtggaatgagtccccaaaatatgatcctgattcaattgagttaaggtctgcagatgctaaacttgatattttttcatgggcagaatcacagtccctgcatagctggtctgccaagtattgccctcttttgccacctcctaggtcaactattgcagctgctttcagtccagatggaaaaacacttgcgtccacacatggtgaccataccgtgaaaataattgactgccaaacagggaaatgtttgaaggttttgactggacatcgacgcactccttgggtggtcaggtatcatccattacattctgacatcctggctagcggaagtttggatcatgaagttcgtctatgggatgctaatacttcagactgtattgggtcacaagacttccatcggccaattgcttccattgcatttcatggaagtggggagattttggcagttgcatcaggtcacaaattgtacatatggaactacaataagagagatggcacttctgtaccagccatcatactaaaaacccgccgctcgctgagagctgttcattttcatccgcgtggggctccatatcttctaacagcagaggttaataatatagaatctgcagactcaccgctgactctggcaagatcctctggatatctaaattacccatcggccctgctggtgacaaacactaattctagattctgtacacttcctgagtccaatgtggtgtcaccttgcttactgtggcctgcatacctcagagatggtggaattttacatgtgctcggcaatgacagtagttcaaccattgtgcagcagagatcatcattagttcaaccttccacatcagatactgcaaatgtacagcttgaacagtttgctacccctatggatgtatgtccgggagagccaacttcatctaatgacatacccgatgcagtaactgttcctacttcaaatggaaatgaaatgcatggtgctggaggccagtctaactcaagactgcagggcagcagctctactagtaatcttgagaggttcagtgctagagatgatttgcaagtgtcttccctgagcaggactgacccaatcccattaacagcagggccttcaggatccgatttacaccgtgctatgccactaaatatgctcctcactggcggattagatgttcaaatgttcctaagaaatgtaggaagtggacagcaggatcattctctcttcggcgactcacgtaactgggaggtaccatttttgcagggtttcttgatggccccaaaccatgcaggtgcttcatcttcgattccccttaccactggcagttctaggggaccaaatcgacgctatgcttcacgctctgtacctggggttgggaatttgctcctaggtcctcaaattgacgaagctgaagctcatgctgtttcactaggtgctggttctgaaatcactgcgtccatgcttgctcctggtactgaattgccttgtacagtgaagctcagaatatggcggcacggtaccaatgaaccatgtgttcctttagaacctgaggcatgctgtctgacgatttctcatgccgttctctgcagtgaaatgggtgcccatttttccccatgtggacgatttctggtagcatgtgttgcgtgtttgttgccacaaacagaagacgaccgtggtagccaattgcctgtgtcttacgaaggggctggatcatcaccaactcgtcacccgcttccctctcatcgagttatttatgagctccgggtttattcccttgaggctgagacatttggggatattcttgcttccagagcaatacgggcagcacattgcttaacatccattcagttctcacctacatccgaacacatacttttggcatatggtcgtcgtcatagctcgctccttaggagcatagttgtggaaggcgaaaatggggttcccgtatatactattttggaggtatatagagtttcagatatggagcttgtgagagtgcttcctagcgctgaagatgaagttaatgttgcatgctttcatccttcaccaggaggtggccttgtttatggcactaaggaagggaagctcaggatccttcagcacaatggcgcagacatgacaaacatgggggtgggttgcttcattgaggaaaatatggttgagatccagaggtacgcattggaatgctgaagaagcttcaccacaccatgtgtttttaggcttacttccatggaatttttttctgcaggcttcatctgtgtgatccatccaaggggaaacattagatccatctctaactaagtgccttggggattggtatgtg

SEQ ID NO: 100419 - DNA, 303 bp, Zea Mays
ccttaactatggtacaattcactctttattaatactttgtatgtggaagcattctattattttaaggggtaaaataaaaaataaatttagagttgcatcattctggatttttgtttgtgcatattgggatttattacctaaatttggatttgaattcaaagtttgaaatttaggagggaaagaccttgattaagaaaattacctttccataggtaagacaatattaagtaaaataaataatattgactcagcagaaagaattgcatccatactgaaaattttatggtacatataaatgtgaag

SEQ ID NO: 100420 - DNA, 823 bp, Zea Mays
atggcccccgtcctcccagttgcccagggttgcggcaagcacatcgtgctcgtccacggcgggtgcctaggcggctggtcctggttcaaggtggccacggcgctccgcgcagcggggtaccgcacggacaagccggacctggcggcgtcgggcgtggacccgcgggcgctgcgggaggtgcccacgttccgggactacacggagccgctgctgaagctcctggcgtcgctcccggacggggagcgcgtggtgctcgtgggccacagcctcggcggcgtgagcgtcgcgctggccgccgagacgttcccggacaaggtcgccgccgtggtgttcctctgcgccttcatgcccgactgcgcggcgcggccgtcgcacgtgctggagaagttcgtggaggggaagtggctggagtggatggacatagaggtgaaaccccaggacggcgaaggcaagctcaccacctctatgctgttcgggccccggatcatccgagagaagttcacccagctctgctcgcccgagggttcctcccttcgattgttttggcgcagatatactcgatgctgcggaaaatggcgtgcgctacccgtgtgctgaaggaggtttgtttctccctccgatatttttttggcgcggatatactagatattgctggcgtccgctactgtcctggagaattggttatcgctccgttttttttgctgcagataggctaacatctactatatctatatccatatctatttaactacgaggaggaggtcttttacaattctgtgcaggtatgttcgtcttcaattttccatgttttttccaaaaatgg

SEQ ID NO: 100421 - DNA, 2328 bp, Zea Mays
atgtcctttccgctcccgccccttccgcttccgtcccttccgctcccgtcccctgccctcccacctccggccgacgccccagcccctccaacccacagcctcacgccggtcatcctcccatggtcggcggccacccaacctgctaccccggcgtcggtttcctctcctctctccgcccagtctgtggctgatattcctggtggccgttcaaaggcgcagcgatggtgtgaacaggagtttccttcggctgcttcccggagtgatttacgtcgctcgtataaggaggcgctagtggatggaaggttcactgccagcggcgctgatgatggtgacggtggatgggtgaaggttgtgggacgtcgccgtcgaagtccctgctcccctcttcccctgcgcccccccagacccgttcctgctgatttacgtgggagatgcttcaactgtttctcgccgtcccaccatgcggctgagtgtggcagtttggtacggtgttttcattgccgcctgcctgggcatcgggtgcgcgcgtgcccacgccggaagaggactctgcatcacccagcgaaggtgttggtgtggcgtctagttcccaggaaggtcgagcgtgtggcgtccagttcccaggaaggtcgagcgaaggtgttggtgtggcgtccaattcccaggaaggtcgtcccggaggaagtttctctctgcgatatggaaggtgtttcgcgggtcggcgatgatggtgatggtatgaaaaagacgaagcgcactcgacgtggacagaggcgccgtagaatggaccgggaggatttaggtgcacctgctcggggctcatcgttggcttcctccttgccttcggtggtccccccccctcgttcgtatattcttaagcgttcaaggttgattgaccaggcggaggaggattttcatcgtgctctgttcgtcaatgttcttggccaggagggttctgactgcgccgttgtgattttggaggcgctcgcctcgaagtatggccttgaggctgatgcgctccaaatccgacgtgctgcgtccaactcgtacctggttttcttcccctccgtggatcatgttgttcgtgccttggctggtggaaattccatttccataccccccctccggctgcatcttaggaggtggtcacgtcaggcgtcggcctctggtggaggtgccctccctgtacttatggatgttgaacttggcggaattccggcacacctctgggggattgatacggcagagcatctgctcggtggacactgcattgttcagggattacatccggatgctgttgatgggacggatttgtcagttctgaaactgaaggcttggggtttctctatggattgcttgccttctcgctgcgatctccacgttgaagagccgacgtctattggagaagatggatcctgcttccctcgcacattgatttactccatttcggtgaaagtgactactccggttgttttgccggttgaggagcagcctctgttctcctccccagatgatgatgatgatcgggatagcaagcatcagcggcagaggcagcatgttacggatcatcagttctcttcggtccggatctctgttcatgcacggttgggaccacgtattactcctggtgggggaggtggaacagttgatgccgctcctctcccgaattcctcggttgatgagttgcaggcgcctgttccctccttccctggctgtcccccgtctcctgtgttaggggcgccatttattgataataccggactccttcctgcttcagttggggtttctgatgtttccaccggtggaaaggctgctgacataacattggagcctttttctgggaatgcccttgttcctttggtttcatcgtttaatttggaggagcaatctgcgtcaagaattctggtttcttcttgggactataagatcagggccaaacctccttgcttcaaggtttatgtccgtaaaaaaatcccggttcagatagcactgtctgaggagattggaacttctactcctttgcaaaaatttaaagatggaattacaaaacagatcaatggaatcctaccggcacctattcaaccagtcaaacggaagagaaagctgattcctagcaatttcaacctaaggcgtagcaggagggtggccaagataccacctgagttaggctctccctctgctgctaaggtgtgcaagcttctgggtttctgtgatgagagagagaatatttccttcacggatgcaagaagatatgctaaattgtttgattcacctctttctagagagcatattaccgcgctggcagccctaggacaattgcccgattaa

SEQ ID NO: 100422 - DNA, 697 bp, Zea Mays
ggcccttcatatgagatggctgtggttgcacaaaactgatccatctcgtccctaggcgcatctcccttttcatgtgccgaataagattcgggctttcttctccactgttctagtttcagaagttggcaatggtgccaacacccttttctggactgataaatggatctcagggtagagaatttgtgatatcgctccaaggatttttcagtgtattcccaagaggaacacaaaaagaactgtgcaagaggctctcctaaatagaagatggatctcagatattaagggggccctctcggtgggagttttggtggattaccttcagatttggaaccttatgtctgagatagtgctgcagcctactattgaagacaaacatgttttcagtattgccccagacggtatctattcagcaaaagtggcttacgaaggattcttcatgggatctaccttttccgccattattccagggtgtggaggacttgggccccgcctaaatgtagattttttctttggcttgttgcgcacaacaggtgctggaccgctgacagattagctagaagagggctggatcaccctccgatatgccctctgtgtgatcaagaggaggacttgggccccgcctaaagggctttcctatctgtctccccccttcttgaggtttagcctcgaaggacgttttttcttcagtagtttgttg

SEQ ID NO: 100423 - DNA, 388 bp, Zea Mays
cggtgttcagataaatcaaaattgatcggtgaagaaaaaaaaattcaaaaaccaataactttggtatcatcttaatcgatttggtgttcggttttcactgaggttcatgcttggaagctccaggcactcgtcgcgctgccgctctaggcgctcgccgctttgccacgccgctgctccaggcactcgccgcgccgccatgccggacactcaccacacctccgcccccatgcatggccatcaggccatgccctcgcccagtgctccagatgctcgccgcttcgctcgctcgccgcgcgctgggatagtggatgcttgggaatcaacgaatcgtgaatggcggttggcgtgggatggtgggagtagggaggagactgaccgattagttagg

SEQ ID NO: 100424 - DNA, 238 bp, Zea Mays
tcaaccaaacacacgcttacacaaaatcaacgcacgtggtggctgttggggcgaaggcaaagacgccacccttcgctcgaagccttcgctgcagccgctgctctgacagagacaaaacaggcagggacacacttcgcttgatcggcaccagacgaagaccggcgacggagtcatcccacagtgcggcctcgtccagctcagaggcccacgtgcgatccggcccattgtaacgggtcct

SEQ ID NO: 100425 - DNA, 1963 bp, Zea Mays
gtacacgtagttaccatatcaatggaattctagggttcaaggggatcatctgcagttgtttgaatggttgaaataaatcttctcttttataattcagggttgaattttatgtctttaagagtgggtgttgttagaatacaagtgaattgcccatctcttctatcagcttgagcttttgggttgaattggttggataaaagattgaagtctcgagttcgaatcttggttagcgcaattaaataaaataattgttgcttgcttttattccacgtctgaggcttgagagagcctcggcatcaggagtgttagaatacaagtgaattgccatgacttaatttgtgtaggggcaggaggtataaatctttgctcgttcagaagaaagctgttaggttgagagtgaggaggaagttttagttacatggtggatatgttagttccttggaggaaattgaagtcacacaaacgttagatgagatatgagcatatgacatttctttttgttttgaagcttatgccttctgcagttttatgttcacctacctactgggcagcgattcttatcaaaagcatggtggatatgttagttccttggaggaaattgaagtcacacaaacgttagatgagatatgagcatatgacatttctttttgttttgaagcttatgccttctgcagttttatgttcacctacctactgggcagcgattcttatcaaaagcagaagtattgcactttgttaataagggcatggtttctacatgtgatatggatgtgctgtgcgacactagcactgatgataatatacttgctcatgtggaattcaatcctgatggtttaccagatggatgggtgaaagaaacgatatctagaaagttcaatgatggaatcagaaaagaccagtactataccgatcctgttagtcaccgtgtatttcgcacgcttaagtctgtattgagctaccttggaaccggagaaatatctaggcattcctatttaccaaggagaaatgtcattgacatgtattcatttgataagtgtgcagatctgcccaaaagcatggtgaaaagattgaaagcaaaaggacaagcaaagaaaaaattcatgagagcacaggttttagacaaggacttatctaatgggcagacttcaaatcactgtgaaggtgctattgggttaactcaatctgacccggaaggagataagtttggatctatggaagcggcatgcgaaaaggggaccagttcagagactatgaaacagcgaatagggaggccaaagaaaatcttgaagcaaacaaatgatagcatttcggatcgtgacaagggttcacatcaggagcacatcgaggccaaagaggaagttgatatctgtggtgggaaagacttgacgcatttgaaaactctggagcgtaccgaggctcagaatagcacaatgataaccaaggaagtaaacaacaacgacacagcagagaaaaacctatccaagatagagggagacaactcggatctggtaaccggcacgggtttgcacaagcaagagaatagcagattaactgaagttagtgagaaggcaacattctccacaggttacaaattttacaagaggagaagttgcaataagacatgaggttcaagaaaagcataaaattagatcaagttatctggtgagttttatgggtcgccgcccaaaagttgtatcatacttcttcagggaacaaatggaaccaaagttgatctggtgtgtccaggttttcatttttttcgttttgtttattcccttctgcatgcttctgcttctagttgatgtggagggtgtctagtggaagtaatctgtttgattcttgtatcataggaattaatactggttgtagagagcaggatttaacacttgacagcaggagcatcaaaggaatcaaatttaagaagctttcgttaacctgagggctgagacataaatgccgtcaa

SEQ ID NO: 100426 - DNA, 1823 bp, Zea Mays
gtcactcctgccggcgccgggcgtcctatggtagagactcgccgctcagcgcggaggagcggcagcggttcgctcccggccgacggagcgccgtccgagccggcctccgacctctcaggggagaataatggcctggttatctctaatgacaacacattgaagcagaccgtggaggtagaaaaacaggggaggcaaggtaaggaggtcttagtggttcatgaattggatgagtcgaatgaggattctgggtcattggatgagccgccgggttggcttcctgacggttggactatggaggtttgtcaagaagacaatggctccatctacaagtactacacttccccaatgtccggatacatgttcacatcaaagatggagacattgcattatcttttctcaggggtggaagaacgcatgttggagttgcaggcaagcgccgaggacaacgagcttcatgagtcacatacatggcttccacgtgggtgggtgattgaagtcagagccggtgggaagaaaatggacaaaatgtacaagttttatgttcacctacctactgggcagcgattcttatcaaaagcagaagtattgcactttgttaataagggcatggtttctacatgtgatatggatgtgctgtgcgacactagcactgatgataatatacttgctcatgtggaattcaatcctgatggtttaccagatggatgggtgaaagaaacgatatctagaaagttcaatgatggaatcagaaaagaccagtactataccgatcctgttagtcaccgtgtatttcgcacgcttaagtctgtattgagctaccttggaaccggagaaatatctaggcattcctatttaccaaggagaaatgtcattgacatgtattcatttgataagtgtgcagatctgcccaaaagcatggtgaaaagattgaaagcaaaaggacaagcaaagaaaaaattcatgagagcacaggttttagacaaggacttatctaatgggcagacttcaaatcactgtgaaggtgctattgggttaactcaatctgacccggaaggagataagtttggatctatggaagcggcatgcgaaaaggggaccagttcagagactatgaaacagcgaatagggaggccaaagaaaatcttgaagcaaacaaatgatagcatttcggatcgtgacaagggttcacatcaggagcacatcgaggccaaagaggaagttgatatctgtggtgggaaagacttgacgcatttgaaaactctggagcgtaccgaggctcagaatagcacaatgataaccaaggaagtaaacaacaacgacacagcagagaaaaacctatccaagatagagggagacaactcggatctggtaaccggcacgggtttgcacaagcaagagaatagcagattaactgaagttagtgagaaggcaacattctccacaggttacaaattttacaagaggagaagttgcaataagacatgaggttcaagaaaagcataaaattagatcaagttatctggtgagttttatgggtcgccgcccaaaagttgtatcatacttcttcagggaacaaatggaaccaaagttgatctggtgtgtccaggttttcatttttttcgttttgtttattcccttctgcatgcttctgcttctagttgatgtggagggtgtctagtggaagtaatctgtttgattcttgtatcataggaattaatactggttgtagagagcaggatttaacacttgacagcaggagcatcaaaggaatcaaatttaagaagctttcgttaacctgagggctgagacataaatgccgtcaa

SEQ ID NO: 100427 - DNA, 2091 bp, Zea Mays
agaagatgcagcactgtagactgaccaaattccccccgcgggcgacgaagaacatcactgtagggctgatttggtgaccggggatcccgaggggaagaaatcctcttgctattcaaaattgaattgcaaggggattcctcccccatggatcccctagggatccctaatcaccaaatcagcccgtagactgaccaaattccccgcgggcttgcggccaaacctttcaccgaggccgcaccctcccgtgcatgtcactcctgccggcgccgggcgtcctatggtagagactcgccgctcagcgcggaggagcggcagcggttcgctcccggccgacggagcgccgtccgagccggcatccagctcccctgcaacctccctccccccgcgggagaataatggcctggttatctctaatgacaacacattgaagcagaccgtggaggtagaaaaacaggggaggcaaggtaaggaggtcttagtggttcatgaattggatgagtcgaatgaggattctgggtcattggatgagccgccgggttggcttcctgacggttggactatggaggtttgtcaagaagacaatggctccatctacaagtactacacttccccaatgtccggatacatgttcacatcaaagatggagacattgcattatcttttctcaggggtggaagaacgcatgttggagttgcaggcaagcgccgaggacaacgagcttcatgagtcacatacatggcttccacgtgggtgggtgattgaagtcagagccggtgggaagaaaatggacaaaatgtacaagttttatgttcacctacctactgggcagcgattcttatcaaaagcagaagtattgcactttgttaataagggcatggtttctacatgtgatatggatgtgctgtgcgacactagcactgatgataatatacttgctcatgtggaattcaatcctgatggtttaccagatggatgggtgaaagaaacgatatctagaaagttcaatgatggaatcagaaaagaccagtactataccgatcctgttagtcaccgtgtatttcgcacgcttaagtctgtattgagctaccttggaaccggagaaatatctaggcattcctatttaccaaggagaaatgtcattgacatgtattcatttgataagtgtgcagatctgcccaaaagcatggtgaaaagattgaaagcaaaaggacaagcaaagaaaaaattcatgagagcacaggttttagacaaggacttatctaatgggcagacttcaaatcactgtgaaggtgctattgggttaactcaatctgacccggaaggagataagtttggatctatggaagcggcatgcgaaaaggggaccagttcagagactatgaaacagcgaatagggaggccaaagaaaatcttgaagcaaacaaatgatagcatttcggatcgtgacaagggttcacatcaggagcacatcgaggccaaagaggaagttgatatctgtggtgggaaagacttgacgcatttgaaaactctggagcgtaccgaggctcagaatagcacaatgataaccaaggaagtaaacaacaacgacacagcagagaaaaacctatccaagatagagggagacaactcggatctggtaaccggcacgggtttgcacaagcaagagaatagcagattaactgaagttagtgagaaggcaacattctccacaggttacaaattttacaagaggagaagttgcaataagacatgaggttcaagaaaagcataaaattagatcaagttatctggtgagttttatgggtcgccgcccaaaagttgtatcatacttcttcagggaacaaatggaaccaaagttgatctggtgtgtccaggttttcatttttttcgttttgtttattcccttctgcatgcttctgcttctagttgatgtggagggtgtctagtggaagtaatctgtttgattcttgtatcataggaattaatactggttgtagagagcaggatttaacacttgacagcaggagcatcaaaggaatcaaatttaagaagctttcgttaacctgagggctgagacataaatgccgtcaa

SEQ ID NO: 100428 - DNA, 2064 bp, Zea Mays
agaagatgcagcactgtagactgaccaaattccccccgcgggcgacgaagaacatcactgtagggctgatttggtgaccggggatcccgaggggaagaaatcctcttgctattcaaaattgaattgcaaggggattcctcccccatggatcccctagggatccctaatcaccaaatcagcccgtagactgaccaaattccccgcgggcttgcggccaaacctttcaccgaggccgcaccctcccgtgcatgtcactcctgccggcgccgggcgtcctatggtagagactcgccgctcagcgcggaggagcggcagcggttcgctcccggccgacggagcgccgtccgagccggcatccagctcccctgcaacctccctccccccgcgggagaataatggcctggttatctctaatgacaacacattgaagcagaccgtggaggtagaaaaacaggggaggcaaggtaaggaggtcttagtggttcatgaattggatgagtcgaatgaggattctgggtcattggatgagccgccgggttggcttcctgacggttggactatggaggtttgtcaagaagacaatggctccatctacaagtactacacttccccaatgtccggatacatgttcacatcaaagatggagacattgcattatcttttctcaggggtggaagaacgcatgttggagttgcaggcaagcgccgaggacaacgagcttcatgagtcacatacatggcttccacgtgggtgggtgattgaagtcagagccggtgggaagaaaatggacaaaatgtacaagcgattcttatcaaaagcagaagtattgcactttgttaataagggcatggtttctacatgtgatatggatgtgctgtgcgacactagcactgatgataatatacttgctcatgtggaattcaatcctgatggtttaccagatggatgggtgaaagaaacgatatctagaaagttcaatgatggaatcagaaaagaccagtactataccgatcctgttagtcaccgtgtatttcgcacgcttaagtctgtattgagctaccttggaaccggagaaatatctaggcattcctatttaccaaggagaaatgtcattgacatgtattcatttgataagtgtgcagatctgcccaaaagcatggtgaaaagattgaaagcaaaaggacaagcaaagaaaaaattcatgagagcacaggttttagacaaggacttatctaatgggcagacttcaaatcactgtgaaggtgctattgggttaactcaatctgacccggaaggagataagtttggatctatggaagcggcatgcgaaaaggggaccagttcagagactatgaaacagcgaatagggaggccaaagaaaatcttgaagcaaacaaatgatagcatttcggatcgtgacaagggttcacatcaggagcacatcgaggccaaagaggaagttgatatctgtggtgggaaagacttgacgcatttgaaaactctggagcgtaccgaggctcagaatagcacaatgataaccaaggaagtaaacaacaacgacacagcagagaaaaacctatccaagatagagggagacaactcggatctggtaaccggcacgggtttgcacaagcaagagaatagcagattaactgaagttagtgagaaggcaacattctccacaggttacaaattttacaagaggagaagttgcaataagacatgaggttcaagaaaagcataaaattagatcaagttatctggtgagttttatgggtcgccgcccaaaagttgtatcatacttcttcagggaacaaatggaaccaaagttgatctggtgtgtccaggttttcatttttttcgttttgtttattcccttctgcatgcttctgcttctagttgatgtggagggtgtctagtggaagtaatctgtttgattcttgtatcataggaattaatactggttgtagagagcaggatttaacacttgacagcaggagcatcaaaggaatcaaatttaagaagctttcgttaacctgagggctgagacataaatgccgtcaa

SEQ ID NO: 100429 - DNA, 989 bp, Zea Mays
cccatcagtgggtttgtaacacaaatggatgaagtgaggagagttaacaaatggatgaagtgaggagagttagcagaagatgcagcactgtagactgaccaaattccccccgcgggcgacgaagaacatcactgtagggctgatttggtgaccggggatcccgaggggaagaaatcctcttgctattcaaaattgaattgcaaggggattcctcccccatggatcccctagggatccctaatcaccaaatcagcccgtagactgaccaaattccccgcgggcttgcggccaaacctttcaccgaggccgcaccctcccgtgcatgtcactcctgccggcgccgggcgtcctatggtagagactcgccgctcagcgcggaggagcggcagcggttcgctcccggccgacggagcgccgtccgagccggcatccagctcccctgcaacctccctccccccgcggtgcgtccctgatgcttccccgcctcaactggctgaccatactagggagaataatggcctggttatctctaatgacaacacattgaagcagaccgtggaggtagaaaaacaggggaggcaaggtaaggaggtcttagtggttcatgaattggatgagtcgaatgaggattctgggtcattggatgagccgccgggttggcttcctgacggttggactatggaggtttgtcaagaagacaatggctccatctacaagtactacacttccccaatgtccggatacatgttcacatcaaagatggagacattgcattatcttttctcaggggtggaagaacgcatgttggagttgcaggcaagcgccgaggacaacgagcttcatgagtcacatacatggcttccacgtgggtgggtgattgaagtcagagccggtgggaagaaaatggacaaaatgtacaaggtaggttggagatttgttgcacaataacatctagggatgcaaggaggcttgtccgtgaacccactaac

SEQ ID NO: 100430 - DNA, 114 bp, Zea Mays
caatactataatgttgtgcctaacaagactcggctttgggttggtgattaagaaaacattcagcatttctttttatttatattgtaacgacatatacaaacctaaatttcacat

SEQ ID NO: 100431 - DNA, 773 bp, Zea Mays
gtccatgacttgttggaaagcagctattcaatagatttgctctccgtgtaggttgctatttttctgattcagaggaataggcatgctttaattggccgggccattgatgatcatgacatgcagcgagtccttgaatttcttaagtctgatcaggtcgtagatgctctttatgattgcaaaagcgaggtgattgggccaggattttttagattcaaggctgaaattgatttcaatggagttgttctggtacaaaattatttggaaaggactggacgtgggacttgggcaaaacagttcagggaagctgcaatgtccaaggatgatacggaattactaagggtcatggctaactacggtgaggatgtagttgaagctctgggatatgaagtggatcggctggagtctgagatcaaaaagcttgtgcctgggattaaacatgttgacatcgaggcacacaatccagaaggacttactcttagagcagaagttttgtagattacctatgtacattgcatttgatttaaacaacttacacatagaacatctgtatactactaaacagaaaccacacaactagagagcatgcatgaacaacataagagagcggctacacaagttgcataaaatccacacgactttacatatacatatacatcacacaatcagtaaatatagagatgactggattgctcgacttgttggatagacatctcatgtaaaatagctatatgcctatatcaagaatgaacaagatgctgtcttgttacacacag

SEQ ID NO: 100432 - DNA, 1377 bp, Zea Mays
gatatctcaccccgtttgagtcacttagaaatatgacaagctgtttcaccactatctgtttgatagaaaaacctaaaaaagctgcttcaccacgatctatttgataaaaaaacataaaaaatgtgttgggacagaagttataccaaatttcgatttttaattaatagcactaatagaaaacgacactttctttctcataatgtgttggcaatcccctgtgcacgagtccctcccacgaatggtgggagctgcagtgctgcaccccacccgcggcagcaccaccggcgacgccggcacgcctaaatgcatcctcccctcgcctccgcggccctccgcctcctctccttcacctcccgtacccgcctcctctcgcactgcccatttttcctatcccgccgtgacgacgacggcggccgcgagggcccctcgtcgccgctgcccccgctctcgccttctggctcgactttctggccccgctcgctcctcttgtctgcgtcagatgccgcgggcctcttcagcctccgtggcgggtggcggagacgggctcttcctcccgcggcgtcacggccccccggcgccgtcactgacgcagctcccgtccggctcaccgtctcccgcaaatattctctgcgtgtggccaaggggaagaagaaggcgcattttgacgatgaacacagccatcgagcggttaacatggcactatggtgcaactttctcgtcttctctctaaagtttggagtgtggatttcaacttcaagtcatgttatgctagctgagctagtgcattccattgcagactttgctaaccaggctcttcttgcttatggtttgagcagctcaagacgtgctccagatgctctacacccctatggttattcgaaggaaagatttgtatggtctctcatatctgcagttggaatattttgcttgggttcaggtgctaccatagtgcatggagttcaaaatttatggaattgtcaacctccagagaatattcactgggctgcattagtgattggtgggtccttcctaattgaaggtgcttcactgcttgttgctataaacgctgttaggaaaggtgcagaagcagagggaatgggtatttgggactatatctggcgtggtcatgatccaacttctgttgctgttatgactgaagatggtgcggctgttacaggccttgctattgctgcaacatctttggtagctgttcaaatgacaggaaatgctatgtatgatccaattggttcaatcattgttggcaatttactagggctgcgaagcaaaaaaccacgtctttcacaatttggaccatctctaattgccacactgaaacttgttacatggcatataatagaaggggtgtttggttcttga

SEQ ID NO: 100433 - DNA, 3238 bp, Zea Mays
gggatgcgggcgggggcatacactatccaccagtcgctcaccgccgaggcggccgccgtgctcaagctcgcgctcgcgctcgcgcgccggcgcggccatgcgcaggtcacgccactgcacgtcgcgttcgcgctgctgaccggccccgccgcgtgcgcgcagcctctcgcggccttctcctcacccgcgtctccggcggtgccgtacggtctactcaaacgtgcctgcttgcggtcgcacccggcgcccggtccggcggcgtgtcacggcgcgccccagcacccactgcagtgccgcgcgcttgagctgtgcttcaatgtagcgctcaaccgcctgcccgcttccggcccgcagtcggcgccctcctcgacgtcgccattcacgtcgccgcttatccagcccagccccacactctccaacgcgctcgtcgccgccctcaagcgcgcgcaggccaaccagcgccgcgggtgcgttgagctccagcagccgccgccaccagcaaatgcgccgccagcacagcagcaggcgctcctcgccatcaaggtggagctggagcagctggtcatctccatcctcgaagaccccagcgtgagccgcgtcatgcgggaagccggcttctccagcgccaccgtcaagagcaacctcgaggaggagagcgcgctcatgccgccgcgttcctcgtcgtccccaccgctgccgctgccgccgccgcccatccctccccacttcttcatcgaccccagcattccctccagcggcaaagctggtgaccgcttcgggctctggccggcgcacttcttgtccgcggcgccgggcccgggcgcatgcaacgacgacgtccgcgcggtcctggaggtgatggtccggaagcaggagcggcgaagcaaccccgttgtggttggcgactcggtgtccatggcggaggccgtggccgacgagctgctccggcgcctcgagcgcggcgacgtcccagaagagctcgccggcgcacacctcctcaaactgcagctctcctacgtgcacatccgcctcatgagccgcggcgacgtgaacgcccgggcctccgagctccgccgtagcgtggacgccgtccagctccagcgcggcggcgggctggtggtctacgtgggcgacctgcggtgggcgctcgacgaggaagcccacgacaaccacgcggtctcgtcgtacagccccgtggagcacatggtcgccgagctcggccgcctcctcgacgacctccgagcttcctgcggccgcgcctggctcgtggccactgccagctaccagacgtacatgaggtggcagcagcggcgccggcggccgctggagtcagcatggacgctgcaggccgtggtggtccccaccggcagcggcaccggtctgtccctcaacagcctcggttcctcatcgtcttgttcctccctccaaagtgccagtgcaggggtgcctccgccaatgctgacatcccagccgcttgggcagaatccttttccagaggtcggggcggcgacggcgtttgcaggcagagatgagcaggaggatgagatgcagctggcgctctgcaccgagtgcaccaagaactacgagagggaggcgacgctcgtgaaggcagaggctgatgcggagggcccacgtgccagcctcccgggctggctggtgctggacagaccaccggcagaccaaacaccacacgagaagtatctgaccgtgttgaagaggaaatggagccggctgtgcaggaagcttcacctctgctctgatccaggctcccctcagtgtccatggtggtctggttcttgctcgcaaccggccagcaagggtaagccaagcgagccgaggttcttgggcttggatggcttgatggggcaacacacgagcaggaggtccccgccgtcaccatcgaggagtcctcgttgggctccgagtccaccgatggggtcgggatgccagggcgtgggaactacgcttgctctcgccagccacctgctctcggactcggcgacctccgacagccgcgccccgggaagcggtgatggatccgcggcggcgcgcgagctggagcagaggctgcgcaggaacatcccgtggcaaccccgagccatcgtcgcggagattgccaatgcggtggtcgctagccgagagagcgacgacggggcgacgggcgtgtggctgtacgtgaaggggagcgaccacgtcgccacgcggcgcgctgtcacggtgatcgcggagacgcgctgcggctcggctgaccgcgtgatctgcgcggacccgagcaagttcagctccgcagagaggttgtgctcagatgttgtctccagggcgtccgcgatgggtggcaagatggtggtggtggtcgtcgacgatgtcgagaacgcgtcacgcgacgtcgccgactgcctagtcgccgcatcgaagagcggttctctgaaggatcgtcagtccggacaagcactggatctctccggctgcatcgtgatcctgctagcatcgaagtggaccggcggctccagcgaccagatcagcctgcgtctgtgggcggagaacgaggcgtcgtccgccgctctcaagaggaagacggagtcaccgctgcgcgagagcaagcgagcacggcacgacgccgggctgggcggccttgatctcaacctctgcgccgaggatgacccagcagacgaagacgacgaagcccttcccagcgacataaccgacgaaggcgactctagcgacacgagtgagcacggacaaccccacggcctcctcgaggccctcgcggcccgcgtggtcaccctcgacaatgacgacggcgacggcgacgccacagcctccatccgcgcgaggcttgccagggccatcggccaaggatggacacgtgtggaggagacggcggtgcaaatgcttgcagcggcgtccggacagttcctcgaggacgagtttgagagttggacgtcggaggtgcttgaaccggcagtggcgctggcaacggtcaaaaatggcgggaaagggaaggtgatagtacttggattggggccctgtggcgagagccgggagacaccagggtttatgggctctgtccttccaagtagggtccaggtggactgagctgtgtactgttttttagttctcatttttttagaggggaagtggtttgtatgtatggtatgtaaagcgtgggattggggcctggaaatgaaagggatcaaatgtactattattatatataagtagttttgcaggattaatt

SEQ ID NO: 100434 - DNA, 1014 bp, Zea Mays
atgggagaggtggaggctggacaatcagcactcttgccgcctgaaaaggagagaaatccctcatcaaagccatcacaaaagcaaaaagggaaaaattttagcgtggatgaagataggcttattgtgtcagcatggttaaatgtcagtatggatccaacacaaggaacaaatcaaacaaaagatacattttggagaagaatccacaagtactatgagagcaatagaggaactttaccagaacgtagtcagaattcgttgttgcatcgttggagttctattaatgatgctgttagtaagttttgtgcttgtgtaacccaaatacacaatagaaaccagagtgggatgactattcatgacagggtggaggaggctgaaaagcttttccagtctctagacccccaaaaaaagtcttttcagtttaggcattgttggctccagctcagaaatcagccaaaatggcatgacaagctgcagcaaatggcagctgtaaaaacaagcaacaaaaaacagaaggtagccaaagatttgagtccgggattagttgatcttactactcaagttgggaatgaagtttctcctgtacagattgtccctccaaatatagctgcaccagaaagaccaatgggtaagaagaggtcaaaagaagcaatgtgtaaagggggttttgatgcatgttctgatgcattggacattttgtgggaaaagaagagacaggctgatgtagagaaggagttaaagagagaggagaggtatgcacaagcatatgctctagataaagagaggcttgagctggaacacaagaggcttacaattgaagaacagaagcatacaaatgaacaaaaaaggcttgatcaagagaaagagcgcctagccaatgaagcaaacaacctttacattaagcggattgaagaagaacagaaaattatgagtatagaccttactactatgagtgaattgcaaagacaatactatatgtgtttgcaggctgatatcgttgcacgtcgcatgaattag

SEQ ID NO: 100435 - DNA, 1164 bp, Zea Mays
agctcactcaaggacaaaaaaaaaaaaacagagcgcagcattggaggcgaggaagagctgtcggccggagatggacaagtactgggaggagacgcagcgctacctggagtacgaggagctcagcatctacttggaggcgcaggaggacgccatgtcttgctacgactccagctcgccggacggctccatctcccactcgtcgtcgtcggcggcggcgtgcggcaacaagaacatcctgatggagcgcgaccgccgccgcaagctcaacgacaagctctacgcgctccgcagcgtcgtgccgaacatcaccaagatggacaaggcgtcgatcatcaaggacgccatcgagtacatccagcagctgcaggtggaggagcggcgggtgctgcaggagctgcgcgtgctcgacgacgacaccgccgccgccgccaccgcgcaggtggagtgctgcgacgtcgacgggggcctgctgcgacgggaagccgagcgcgcgaagaagatgaagcgcgcgcagtccgtcgccagcggcgcgcagtctgctccgcctccgcccccgccgccgcacgtcgaggtgctggagctgcgcgtgtcggaggtgggcgaccacgtgctggtggtcagcgtgacgtgccgcaagcgacgcgacgccatggccagggtgtgccgcgccatcgaggacctccggctccgtgtcatcactgccaacgtcacctccgtcgccggctgccacgtgcacaccgtcttcgtcgaggtagataaaatcgaccacatccaagtgaagaacatgattgaggctgctctcacgttgctcgacgcccccggaagcccccacagctcgatgagctattacgagacctaactatgttgagcaatgcttttcggacgtctactaggtcaacaactcagtccacaattaaccagaaaggagtatgtcgtgttttgctacaatgtgcttgttgtgttttttttcaacatcacccctaagagatgatggttgtttcctctaagatgcagctagtgtaccaagcaatgtttggacttcgtgtcatacatcaccacgagagtgacatgtatttgtgtactataacatgtatatgctaaagaaaataacaaggggacttgtctttcgaatgaagagctatcaaatatgctatgataatataa

SEQ ID NO: 100436 - DNA, 2345 bp, Zea Mays
aaggccccacacgtcagcgtcaagggtcggagcctataaagaggctcgagagagacgagcaagcaggcaagctcactcaaggacaaaaaaaaaaaaacagagcgcagcattggaggcgaggaagagctgtcggccggagatggacaagtactgggaggagacgcagcgctacctggagtacgaggagctcaggtacgagtacgaactacgaacgaacgaaccaccaagtccgcgcgccgccgatacaatgcgcgcgccgaccgagcattcattcatctatccattcctccgtcggtggtggttgcagcatctacttggaggcgcaggaggacgccatgtcttgctacgactccagctcgccggacggctccatctcccactcgtcgtcgtcggcggcggcgtgcggcaacaagaacatcctgatggagcgcgaccgccgccgcaagctcaacgacaagctctacgcgctccgcagcgtcgtgccgaacatcaccaaggcaagcggcggtcacgcactcacgctgcgaccgaccgacggtcgtctgtcccgtcgtcgtccgtgctctcggcattatattatattgcatgcatgcagatggacaaggcgtcgatcatcaaggacgccatcgagtacatccagcagctgcaggtggaggagcggcgggtgctgcaggagctgcgcgtgctcgacgacgacaccgccgccgccgccaccgcgcaggtggagtgctgcgacgtcgacgggggcctgctgcgacgggaagccgagcgcgcgaagaagatgaagcgcgcgcagtccgtcgccagcggcgcgcagtctgctccgcctccgcccccgccgccgcacgtcgaggtgctggagctgcgcgtgtcggaggtgggcgaccacgtgctggtggtcagcgtgacgtgccgcaagcgacgcgacgccatggccagggtgtgccgcgccatcgaggacctccggctccgtgtcatcactgccaacgtcacctccgtcgccggctgccacgtgcacaccgtcttcgtcgaggtacgtcgccggtggcatggcatttggcatcacatgggatcgggatactctgtttttttttctccttttttcatccttgacgatggatatgactgacatgacatgggcgtcgtgctgatgtcacgggccggccgaatacgtgttgacactgacgctgacttttaccacggcaacacccactgttcactacgccttttcgtttccggttttcagtgtggaaatggaaatctggatagtcacgtgctcgatcagtcgatcggatccccacattcacatggcgtactgtagtagtactagcaaccactttttgcctttttttggtgattcagacttgatgaaaatgaaacagattaagcgcgtgggggaggacatttgtaagaaatggacttagcggctgtttgtttaagatcataatttaacttagggctagtttggtaactctatttttttaaaggatttctatttttctaagtaaaaataaactaatttttcttggaaaaattaaaaattttgggaaaatggggttgccaaactagcccttattttgagctaagtgtcggtttgtttgagattatataatctctataggttatataatctaacttattttaatctagcacttaattcaaaataagttatattatataatctggacatattagaatcctgaacaaacaaactctaagcgtaagttaaaaataagttataaactacataatctaagcaattataaactcaaacaaacaagcatcatagggaactcaaaaccccaagttatcctcaatgggttttgtagtttcattttttcgacgtaacaaaaaaaagcaacaaattaaaactcactatggttagacagaaacatcatcttgaatacggtatggacgcttactctcaatgcactgtctgtatattcaggtagataaaatcgaccacatccaagtgaagaacatgattgaggctgctctcacgttgctcgacgcccccggaagcccccacagctcgatgagctattacgagacctaactatgttgagcaatgcttttcggacgtctactaggtcaacaactcagtccacaattaaccagaaaggagtatgtcgtgttttgctacaatgtgcttgttgtgttttttttcaacatcacccctaagagatgatggttgtttcctctaagatgcagctagtgtaccaagcaatgtttggacttcgtgtcatacatcaccacgagagtgacatgtatttgtgtactataacatgtatatgctaaagaaaataacaaggggacttgtctttcgaatgaagagctatcaaata

SEQ ID NO: 100437 - DNA, 543 bp, Zea Mays
atggcggcggaggtggccggaggaggagctgttggtgcgccgtcgtcgtccccgcggcgcgtggtggtggcggtggacgagagcgaggagagcatgcacgcgctctcctggtgcctctccaacgtcgtctcggcgggcaaggccgccgtggcgccacccccgtccgtggtgctcgtccacgctcggtccccgcgcccgctctactacccgaccatcgatggcaccgggacagggtacgtgatgacccagcaggtggtggactgcatggagcagtacatggcctccgccgccgacaccgtcgtcaccaaggccaagaccatctgcaccgccttccccgacgtgagggtggagacgtgcgtggagaagggcgacccgcgcgacgtgatctgcggcgccgccgagaaggccggcgccgacatgctcgtcatgggcagccacggctacggcttcctgcagtgggcgctcatgggcagcgtcagcaaccactgcgtgcagaactgcaagtgccccgtcgtcgtcgtcaagaggcccgactctgcttga

SEQ ID NO: 100438 - DNA, 1206 bp, Zea Mays
aacttcgtctgcccgcgagccgggaaacatttccctcagatccaccggccctggagctcccgccgctccactgtaagacccgcccttgcctccgcgaaatcctgcgacatcacagacgagccgggggtggtggtgggggtgggggagcggaggtaggtcgcagcagccatggcggccgcagaggagaacagctcgctgttcctgattttcgtcctcaccatgatcgcgctgcccctcgtgccctacacgatcctgcgcctgtgtcgcgctgcctccgagaaggtcaagaccatccactgccgctgttcgggttgccaccgctccggcaagtaccgcaagtcaatctacaagaggatatccaacttgtccacgtgcagtaacctaacaatccttctgctctggattgttatgatattgctggtttactacataaagcatgttagccgcgaggtccaagtttttgagcctttcagtattcttggactggaatctggggcatctgaatctgatatcaagaaatcatataggaggctttctattcagtaccatcctgataaaaatcctgatccagaggctcataagtactttgttgaatatatatccaaggcatatcaagcattaactgatcctatatctcgagagaattatgaaaaatatggtcaccctgatgggcggcaggggttgcaaatgggcattgctttgcccaagttcttactaaatattgatggtgcatctggtgggataatgcttcttggaatagtcggattttgtatattattgcctttgatgatagctgttatttatttgtcaagatcgtcaaaatatactggaaactatgtcatgcatcaaactctgtccacttactactactttatgaagccatctcttgctccaagcaaagttatggatgtcttcatcaaggctgcagaatatatggagatgccagttcgacgcagtgatgatgaaccccttcaaaaattgtttgtagctgttagaagtgagttaaatctggacttaaagaacattaagacagaacaagcaaagttctggaagcagcatccatccctagtaaagatggaactgctgattcaggcacatctcactcgtgagtcatttgctttgaccccagcacttcttaaagattacagacacatgcttgaacttgcacctcgtcttttggaagaactcgttaaggtaattgtttga

SEQ ID NO: 100439 - DNA, 345 bp, Zea Mays
atggaaccgccgccgttcctggttacgttccacttgagcacagatcacgttccagccatgaaatcattgtcattcttgatcacgttccactcaagaatagatcatgttgcgactatggaatcgtcgtcgttccgcatggttcccatccctcaatccggaaccacattccacgaaacgtggaaccccatatggttccgggttcccggcttcttagcgtacactcgcccatctgcctgcacattgcacgcacccttcgctccctacctgccacatggccggcttcatctgcctgcacggttgggctggttccaatcctacgggtctacatctaccatcagctactga

SEQ ID NO: 100440 - DNA, 672 bp, Zea Mays
gaatgatgttgagaagccctacaatcatgaaaatatggcaatgtcttctattaatgttaaagaatccaaacgtttccaagcttcaatgaatgtaagtgctggaacttcacaggttgaagatcttgacagggataagattttgatatccataaaaaggtcctgctgtagtgctaataaatttaatactggtactgatgttggagatggaaaatgcaaattaaacattgccgccagtatacagaggggacttcaagtcattgaaagtcaccaaaataatagtgcatggaagagagcatcggttggattaaatgctagaatcatggatattcaaccttgcaaggttgatgttgcaattcagactgatcctgaagaatacgaaactagagataaccctctagctctggttcctagttgtctgcttgaagcttctgcaaatgagagtagggatcccagtacttgcagggacctacaactagtaccagttgatgtgacagtaccatctgatgaccaaaagcagcgacattttctgaaagctgtggagaaggtcttggctggagctatcaggcgagagatggctcgtgatgaacagtgtgcaaagcaagctgcagaaattcaacaactgaatcgtctggtgcaacagtacaagcatgaacgcgaatgtaatgctgtaat

SEQ ID NO: 100441 - DNA, 1218 bp, Zea Mays
ttgagccatgtccctcttgtcgcggcacgcgcgtcaccccactacgccgccgcccgcctctttctccggcggcgttgagaccccacctcgtcgccgcgtccccaaagagaacgttgacccctcctccccggcgcgcaaccaccactctgccctcgaccacggcgcctcccccttccgctccccgtcctccgcggccaagccgctctccgcccgcaaccgcttgccaccgcgtccgccgtcctctaatccactaaagaggaagctcgaagtctcccctgcagcggccgcggtgggctccgcgcacgatgccgcacccgggctcgactccggcgtccaggtggtggtgaggatacggccgtcgtgctgggtcgatgaagaggaggcaggcgaggatgggaggggaccggaggcctgcgtgcgcaagacggcggccaactcggttgcgatccaggggcaggacttcacgtttgatgctgtcgctgactcggtctccacgcaggaggatatcttcacccttgttgggctgccacttgttgaaaattgcttatcaggtttcaacagctccatatttgcctatggacagactggcagtgggaaaacctacactatgtgggggcctctatctgcattgtcagaagattcattgagcagcgagaggggcttaacacctcgtgtatttgagcagttgttctcccgcattaacgaagaacaagttaaacatgctgacaaagagcttacttacaattgtatctgctcgtttctcgagatctacaatgaacagataactgatttgctagatccctcgcagaagaatcttcaggttagagaggatgtcagaactgcctgtgtttatgttgaatcattgacaaaggagttggttttcaccttgaaggatgtaactcagttgttggttaagggcctggcaaaccggaggactggggcaacgagcgcaaatgctgatagctcacgctcgcattgtgtttttacgtgtgtcattaagatggattctaagaatccagaggatggctcaagcatcacaagatcaagtaggataaacttggtagaccttgctggatcagagcgacaaaaactaacacatgcagctggggatcgactgaaagaagctggaaacataaaccgttcactttcacagctcgggtaaagttctgtttgtactttcaatgaaaagtaaaaaaagttcaaggatttaagcaaggt

SEQ ID NO: 100442 - DNA, 2205 bp, Zea Mays
tcgcccggcgcatgtatgctccgcagagccgcgccgtccctcgctttctggaggtggcggccgcaggacaacgatgcgggccggaaactggccgcgcagctcctactacagcctctttcccacacctcattggcagtgccagaccgcatcgctcagcagcgagccacgcaggtttccttccctcgcggccgcacccgctacttgttcgacggaacgcgtcatcgggatgcgatctcttggaacgccgtggtctctggccatgcgaggcacggtaacgtcccagacgcgctggacaccgcggcgcggatgcatagctcgggagtgccgttcactgaggccaccttcgcgtcggtggttggcgcctgcgcacgcgggcggatgttctgcgcggggacgcaagcgcacggccaagtgatcaagtccgggtgcgagggcttcgcggtcaccggggcgtccctcctcgacttctactcctcgtgcttcgacctccgtgcaactcgcactctctttgagtctctgcgtccgaagaacgagctgctgtggagcccgatggttgttgcgcttgtgaggttcggcttgctggctgaggccttggacttacttcaaaatacaccagcgccacgtgatgtgtttgcatggacagctgtcatatctggctatgctaagggcacagatcagtgctgtggcaaggcgctgcagctgtttgtgaagttattggctgatgatggtgtcatgccgaatgagtacacttatgacagtgttttgagggcatgcgtgaggctgggagcattggattttgggcgatctgttcatggatgtttgatcagatgtgggtttcggtctgagcagttaatcactagtgctcttgttgatctttactgcacttctgatgctttggatgatgcactgctggtctacaatgacttggataggccatcctcgatcacatccaatacactgattgcagggcttatatccatcggtaggacagagcatgctaagatggtattctcgcagatgccagagcaggactcaggttcctacaatctgatgattaaagcatacgctatggaaggggagcttgaacattgccgaaggatatttgagaagatgcctcggagaaacatggtgtctttaaactccatgatgtcggtattgcttcagaacggaaggttggaagaggggttgaagctatttaaacagattaaggacgagagagacacaattacgtggaattctatgatttcaggttacattcagaatgacaaaccttcagaagctctgaagctatttgtggtcatgtgccggttgtctattgaatgcagcccatctacattctctgctctattgcatgcctgtgcaactattggaactcttgagcaaggcagaatggtgcattgtcacctctgcaagacttcgttcgactccagtgatcatgttggaacagcccttgctgacatgtactttaaatgtggttgtgtgattgatgcacaatctgcatttacctatgtcacatcgcctaatgttgcttcatggacatctcttataaatggtcttgcacagaatggtcactggttggaggcactgtcacaatttgggaggatgctgaagcatcatgtcaaacccaatgaaatcacttttctgggtcttcttatggctagtgctcgtgctggtttggttaataaggggatgaaaatcttttactccatggaaaactttggactagttcctacagtgcagcactgtacttgtgttgtcgatctccttggtcgaactgggcgtaccagagaagcagagaagttcatctatgaaatgcctttgccagcagatggtgttatctggggagccctacttactgcctgctggtattcgatggacctagagatgggtgagaaagttgcccagaggctgtttttcatgggcacaaaacataggtctgcttatgtcgccatgtctaacatctatgctaaattggggaaatgggaagatgttgtcaaggtaaggacatggctgaggagtctaaatgctgaaaaggaaccaggttgcagttggattgagatcaagggtatagttcatgtattccttgtggacgaccagaatcatccggagagagagactatgtattcaatgctagaagctttagtatctcatatatcattacattcaaaacctgatgatatggttattcagagcctgaattcttga

SEQ ID NO: 100443 - DNA, 786 bp, Zea Mays
tttttttttcctctttcattcctggtactgttattgttcaatttcaggcactcgtcgttttcttcattacgatatgcgcctactcagatgagaaaagtgagatgcaggaactgtcaatggtagcactgtccggttgcatttggttacaggcttttgttgtgacaatggatacaaactcattcacttgcccgcaaatccttctcatctggggaaactttgtggccttctacatgatcaacttaatactcagtaccgtcccaagtctccaactgtacacaatcacgttccgcctgtgtagccaaccttcctactggatctccatggctctgacggttgcagtaggaatgggaccggtggtggctttcaggtacttgaagaacctgtatcagcctagcgccgttaacatactccagcaggtcgagcagcgcaatggatctatcagaacttctgggaatctggagtcggcgggagccaatctcactaatctactgactggctcacgtaaaaacagggattctaattatcgccctctgctttcagagtctgcggagtctgtaagtgcaagcggcagctaagaattgtctaggctttccgtactagcatgacagtcatacactcatacagacggcagaacagtgaactgtaacagaatcatgcttgtactaaaaaatatttcgtcggggtcaaagccaataattgttttgttggcctaaatttgatcatttttctcagtctgcgctgtggcaccgtctgtgctgtccgctgtcgcacgtagggatggtaata

SEQ ID NO: 100444 - DNA, 1837 bp, Zea Mays
tgaacaggacaacaaatacagagatatcttgaagcagtagaaatgtattctcagttgggattgcgaaccttatgtttggggtggcgtgatttaaaagaaaatgaatataaggaatggtccaaaaactttcaaaaggctagctgctcattggacaatagagagtttaaaattgctgaagtttgtaatagcttagagcaagaccttcaaattcttggtgttactgctatagaggatcgtcttcaggatggtgttcctgaaaccattaaattgttgaggaatgctggaattaatgtgtggatgctaaccggtgataagcaaaatacagcaattcagattggacttctctgtaacctcataacttctgggcccaatagtcaattgttatctatcagtgggaaaactgaagaggacgtgctaagaagcctagagagggcattatttattatgaaaaatacatctgaaacaaagggtcttgcatttgttttggatggttgggcacttgaattaattttgaagcattccaaggagtcttttactaggttggcgatgctgtcaaaaacagcaatatgctgtcgaatgacacctttgcagaaagcacagcttgttgctatcctaaaatccgttggctacctaactctagcaattggtgatggtggtaatgatgttagaatgattcaagaggctaacattggagtagggattagtggtagggaaggactgcaagctgcaagagctgctgattatagcattgggaagttcaagtttcttaagagattgatacttattcatgggcgttattcatacaatcgaacagcatttatttcacagtactccttctacaagtcacttcttatgtgctttattcagattctgtttgcctttttgtcggggctatctgggactagcttattcaactcaattagcttgatggcttataacgttttctatacaagtttacccgtcatgactataatctttgacaaggatatctctgaaacaacggttatgcagtacccccagattttactgcattctcaagctgggaggcttttaaatctcactacattttgcggatggtttgggcgctcgctatatcacgcactcgtcgttttcttcattacgatatgcgcctactcagatgagaaaagtgagatgcaggaactgtcaatggtagcactgtccggttgcatttggttacaggcttttgttgtgacaatggatacaaactcattcacttgcccgcaaatccttctcatctggggaaactttgtggccttctacatgatcaacttaatactcagtaccgtcccaagtctccaactgtacacaatcacgttccgcctgtgtagccaaccttcctactggatctccatggctctgacggttgcagtaggaatgggaccggtggtggctttcaggtacttgaagaacctgtatcagcctagcgccgttaacatactccagcaggtcgagcagcgcaatggatctatcagaacttctgggaatctggagtcggcgggagccaatctcactaatctactgactggctcacgtaaaaacagggattctaattatcgccctctgctttcagagtctgcggagtctgtaagtgcaagcggcagctaagaattgtctaggctttccgtactagcatgacagtcatacactcatacagacggcagaacagtgaactgtaacagaatcatgcttgtactaaaaaatatttcgtcggggtcaaagccaataattgttttgttggcctaaatttgatcatttttctcagtctgcgctgtggcaccgtctgtgctgtccgctgtcgcacgtagggatggtaata

SEQ ID NO: 100445 - DNA, 244 bp, Zea Mays
ggtgcaaagaagctgtccttgcttactgcccccatcccaggtctacctgttagctagatagctatagtgctgttttggtagcagtgttttttgtcatggatggtttcatttatgcttgttattggccgccgtagggcggccttatttgtatcttggggtccttttggacctttttccccttcttaatatattttcgcgcagctctcctgcgctttcgagaaaaaataatgatgcagttctcctg

SEQ ID NO: 100446 - DNA, 312 bp, Zea Mays
cagatactgttattaataattttctatacttatttgatctctgattttaaaatatttttttataattggttgtaggttactcttgatttggctaaaggtttgtatgcaaagtttattgactgggatgagcaaatgtttgattgggaaacaaatacacctgctcattcagctaacacagctattagcgaggacctcggacagattgaatatattttgagtgacaaaactgggacactcacagagaataaaatgatcttcaaacaatgctgcataagtgatactttgtatggaaatgacaacggagatgcatta

SEQ ID NO: 100447 - DNA, 1069 bp, Zea Mays
caaagcttgcaatggcacaatagtgacatcttgggaaacaatgaaacgttttgtctatatcaatgatgattcgtgccggtattcctactgtgacaaccggatatccaataccaagtatactctgtggaattttctcccgaaaaatttatgggagcaattcaggcgtttcatgaatcagtattttctactaatagcctgccttcagttgtggtcccgtatcacccctgtcagccctgcaactacatggggtccacttatcatcatcttcattgtttctgcttcaaaagaggcttgggatgattacaataggtatctttctgacaagaaagcaaatgagaggaaaatatggttggtaaaggatggcgtccgcatacagatcaaagcacaggaggtacatgttggagatttagtgtggctccatgagaatgatgagataccatgtgatcttgttctcattggcacttctgatcgacaaggcatttgttatgttgagactgctgctttggatggtgaaactgacttgaaaacaagaaccattcctccaatttctgctaacttgtcagtagagcagctaggaaaagtcaagggtgtaattgagtgccccaacccagacaatgacatacggaggtttgatgctaacatgcgcttgttcctccctataattgacaatgaaaaaagtcctttgactatcaacaatacacttcttcagtcatgttaccttcgatacactgaatgggcttgtggagttgcagtttacacaggcaatgaaacaaaatctggaataagtaggggagctgcggagcccaagttcactgctgctgatgtaataatagacaagctcactattgcaatattcatgttccaagttgttgttgtacttgttctgggttattttgggaatacttggaaggacactcaggggcttaagcaatggtatcttatgtatcctatggaggtagagggcccatggtatgatttcttgattatcccgttacgctttgagctgttgtgctccataatgattccaatctccataaagtcctgtttggttttggcctccagttactaa

SEQ ID NO: 100448 - DNA, 891 bp, Zea Mays
agaccaccacctgttcattatagcaaaccatcaagaactgacaggaaccgtaactaccgaggaaactaccaggatggcccccccacagcaaggaaattaccagaacaaccgtcctccaccacaaggtggttaccacttaccagaacaacccgccgcagcaaggaaactaccagacataccgctcgcagcaagatggaagaggctatgcccccacagcagaattatgcacaaggtggtcaggatggtagaggttttggaaggaaggaatgattacacagatcgttcaggctacaatagaccacctgattttcgaagtcaaagtcagtaccaagggcatgtaaatccagctgggcaaggtcaaggttacaacaaccccaagagcgtagcaacttctcacaagggcaggcaggagaacatctattgctccttcagcacctgggtcttatggccaaccatcagcacctggatcttatggtcaacctaatacacctggtaactatgggcaggtacatccatcagcgaatcctggtggtaacagagttcctggtgtgaatcctagttacggtggggctagaccaacatatggtggagaatcctagttacagggggctggaccaacatatggtggagataactggcaaagaggttctggtcagtatcctagcccaggtgaaggacaaggaaactggcaggtatgagagcatttgatatacacatttcacttttaaaatgccattactgtttgaattgaaatacagtagtttaaagttaaactgggacatcatttgtttgaccagttctagattgaattcataaactgagcgtgccgagtttcagatgtacgactacagtttttctccctgttaaatgttttttagatttatgagctaa

SEQ ID NO: 100449 - DNA, 390 bp, Zea Mays
atgggaaaatacttctcacgcttcttttccctctcagtcttcaaggagagctggtacttggtgaggcgcctgcgaatggcgcgggtcttcttggggcggagatcgagcgggagaagcttcttcttcttgtacgcctcacgcagcgccgacttctgcttctgcgagatgacggtgagcacgcgagcgatggaggtgcgcacgatcttgcttttggagagcttgttgggagccccgccggtgaccttggcgacgcgtaggagggagagctccgatttaagctccttgagctgcgcttgcagatccgtcttgctctttccgcgcagctcgtgcaccttgatccgggccatcgcgagtgacgagcagggggtgccgcggcgccgaatgagatga

SEQ ID NO: 100450 - DNA, 802 bp, Zea Mays
gttcagaagcacaaacatcagatgggcaatgtaaacatttcaagttcggttcacacagcgcagtttcgtattccaaacgtgagcaagggcctctgtaaagaaaatggccattaacataattccagtttatggcgaccaaaaatcaacggtaactaacaatcatctagaagctgaattcacgaacattcaaatggcatacaacaaagtgggggcaagataagttcatgtcgttggagcattcccaggtaagtccaaaattttcatggtaaaattcattcaactacagctaacaagtctgactcacggcagaagcagtgcttctcatcatcggtaccaaggtccacctacaacactctttgctaggaggagttgctctaggaaagcaatattgtgaggttgttgtgaatgttgtgctgaaaagggatgcccttctacctcgcccatatggttatttggaggagatgggtgatgttgatcggatgtcgatcgcatggccgtacaagagagtaataagttatctctttgttgttttttcatatatggtgattgcatattttctaactaatggtttctatgattatatagctaaaggtgagcaagacatcaaaatcatctcagagtgctacaggagggaggtcctagaggtagtaagtcacttgtttactccatgatgacaatagcaagcagatcgcggtggtgcctatggatgctacaacaagaaagatcaaaagttcttttggatggatgcagctagatattttgttttgtattttctccaaaagagaaatttgcaagtgaactt

SEQ ID NO: 100451 - DNA, 1360 bp, Zea Mays
agttgattctgaccttcgatcaataagttggccatttatttcatttgtgtgttaagcaacttccctttacaaaacggtatgtgctttgtttgttactaatgcggatacctgatgtttagactcgggtttaacttgttcctgctaattgctcctacttttgcagtgactgatgtggcaggagtcgtggctgatgttggtccaggaatcaatgggttccaagccggagatcaagttgttgctatgctcaactcatttgtaagcacatgctcttaactatgtatgttaagtgcatcacatcagtcggcctccatatgttgtgttcgaacggaggtgggcttgcggagtatgctgtggcatcagaaaatctgaccgtcaagaggcctcctgaggtatctgctgccgaaggcgcagggctgcccatcgccgccggcactgccctccaggcgctcaggaccatcggcgccaagttcgacggtactggaaagcccatgaacgttctggtcaccgcggcatcaggtggcgtcggcctctacgccgtgcagctcgcgaaacgggctggtctccacgtcactgccacctgcggcgcgcgtaacgtagagctggtgaagagcctgggcgccgacgaggtgcttgactacaggacgccggagggtgccaccctgcagagcccctcgggcaagaagtacgatggcgtcgtccactgcactgtcgggaccagctggtcgacgttcgagcctgtgctggccgccacggggaaggtgatcgacatcaccccgaacttgactgccatcctcaaatcggcgctgcacagtgtgaccttcgccaggaagcggctcgtgccactgctcctgtcgcccaacaaggcggacctagagttcctggtcgggctgctgaaggacggcaaactcgagacgctgatcgactcgaggttcccgctgagcgaggtgagcaaggcgtgggagaagagcatcgagggccatgccactggaaagatcattgtcgagatgggagactgatctgggacgcgtccattgccgatagagacttgcagtagcatccactaggctgttggacactacagggttaaagtcaacatatacgaagtagtactagtatctgagtttggtcgtcgtacaaattgttcgtgagtggtgagccagtttataggcttgtttttcttttgttttcagctataaacttgaacttcttgtacagtttagggttttatggggttgcatgatagatccgcaaagttgcattgtaattacatatttgggacttgggagttgctatatttctgcttgaaacttcagaaatgtttagacaacataactacttaaggacacctcacaagaagaaa

SEQ ID NO: 100452 - DNA, 1389 bp, Zea Mays
tagacttctagagtgtgtcacggtcagctagtctttgctgccgagaagaccactgctgatttccacttggtgtctactgcagattttttttttaatcttgcccagaagtggtcatcagcatgtggaagttccggtcccttcggcgaaaaagaacgagcttctgctgaagctggaggcagcaagcatcaacccagtggactggaaggtgcagaaaggcatgctgaggcctttcctgcctcgtaaattaccttttatcccagtgactgatgtggcaggagtcgtggctgatgttggtccaggaatcaatgggttccaagccggagatcaagttgttgctatgctcaactcatttaacggaggtgggcttgcggagtatgctgtggcatcagaaaatctgaccgtcaagaggcctcctgaggtatctgctgccgaaggcgcagggctgcccatcgccgccggcactgccctccaggcgctcaggaccatcggcgccaagttcgacggtactggaaagcccatgaacgttctggtcaccgcggcatcaggtggcgtcggcctctacgccgtgcagctcgcgaaacgggctggtctccacgtcactgccacctgcggcgcgcgtaacgtagagctggtgaagagcctgggcgccgacgaggtgcttgactacaggacgccggagggtgccaccctgcagagcccctcgggcaagaagtacgatggcgtcgtccactgcactgtcgggaccagctggtcgacgttcgagcctgtgctggccgccacggggaaggtgatcgacatcaccccgaacttgactgccatcctcaaatcggcgctgcacagtgtgaccttcgccaggaagcggctcgtgccactgctcctgtcgcccaacaaggcggacctagagttcctggtcgggctgctgaaggacggcaaactcgagacgctgatcgactcgaggttcccgctgagcgaggtgagcaaggcgtgggagaagagcatcgagggccatgccactggaaagatcattgtcgagatgggagactgatctgggacgcgtccattgccgatagagacttgcagtagcatccactaggctgttggacactacagggttaaagtcaacatatacgaagtagtactagtatctgagtttggtcgtcgtacaaattgttcgtgagtggtgagccagtttataggcttgtttttcttttgttttcagctataaacttgaacttcttgtacagtttagggttttatggggttgcatgatagatccgcaaagttgcattgtaattacatatttgggacttgggagttgctatatttctgcttgaaacttcagaaatgtttagacaacataactacttaaggacacctcacaagaagaaa

SEQ ID NO: 100453 - DNA, 1714 bp, Zea Mays
acgcggcagaggccaacccagaaacatagaaaaggcgtgtacaccaagaagaagccggccaaccaaccgactcccccgaccctcctgatcgatcgagggccccttgttctagccagttgtccccttccctctcgccggcgttgctcctgcctgctccaatggccgccgcctccacgaagacggcgaacatccccgcgacgatgcgggccgtgcagtacgactcctgcggcgggggcgccgctggactcaagcatgtggaagttccggtcccttcggcgaaaaagaacgagcttctgctgaagctggaggcagcaagcatcaacccagtggactggaaggtgcagaaaggcatgctgaggcctttcctgcctcgtaaattaccttttatcccaggtaatcatgctcactactcatttcatagtagttgattctgaccttcgatcaataagttggccatttatttcatttgtgtgttaagcaacttccctttacaaaacggtatgtgctttgtttgttactaatgcggatacctgatgtttagactcgggtttaacttgttcctgctaattgctcctacttttgcagtgactgatgtggcaggagtcgtggctgatgttggtccaggaatcaatgggttccaagccggagatcaagttgttgctatgctcaactcatttaacggaggtgggcttgcggagtatgctgtggcatcagaaaatctgaccgtcaagaggcctcctgaggtatctgctgccgaaggcgcagggctgcccatcgccgccggcactgccctccaggcgctcaggaccatcggcgccaagttcgacggtactggaaagcccatgaacgttctggtcaccgcggcatcaggtggcgtcggcctctacgccgtgcagctcgcgaaacgggctggtctccacgtcactgccacctgcggcgcgcgtaacgtagagctggtgaagagcctgggcgccgacgaggtgcttgactacaggacgccggagggtgccaccctgcagagcccctcgggcaagaagtacgatggcgtcgtccactgcactgtcgggaccagctggtcgacgttcgagcctgtgctggccgccacggggaaggtgatcgacatcaccccgaacttgactgccatcctcaaatcggcgctgcacagtgtgaccttcgccaggaagcggctcgtgccactgctcctgtcgcccaacaaggcggacctagagttcctggtcgggctgctgaaggacggcaaactcgagacgctgatcgactcgaggttcccgctgagcgaggtgagcaaggcgtgggagaagagcatcgagggccatgccactggaaagatcattgtcgagatgggagactgatctgggacgcgtccattgccgatagagacttgcagtagcatccactaggctgttggacactacagggttaaagtcaacatatacgaagtagtactagtatctgagtttggtcgtcgtacaaattgttcgtgagtggtgagccagtttataggcttgtttttcttttgttttcagctataaacttgaacttcttgtacagtttagggttttatggggttgcatgatagatccgcaaagttgcattgtaattacatatttgggacttgggagttgctatatttctgcttgaaacttcagaaatgtttagacaacataactacttaaggacacctcacaagaagaaa

SEQ ID NO: 100454 - DNA, 1522 bp, Zea Mays
acgcggcagaggccaacccagaaacatagaaaaggcgtgtacaccaagaagaagccggccaaccaaccgactcccccgaccctcctgatcgatcgagggccccttgttctagccagttgtccccttccctctcgccggcgttgctcctgcctgctccaatggccgccgcctccacgaagacggcgaacatccccgcgacgatgcgggccgtgcagtacgactcctgcggcgggggcgccgctggactcaagcatgtggaagttccggtcccttcggcgaaaaagaacgagcttctgctgaagctggaggcagcaagcatcaacccagtggactggaaggtgcagaaaggcatgctgaggcctttcctgcctcgtaaattaccttttatcccagtgactgatgtggcaggagtcgtggctgatgttggtccaggaatcaatgggttccaagccggagatcaagttgttgctatgctcaactcatttaacggaggtgggcttgcggagtatgctgtggcatcagaaaatctgaccgtcaagaggcctcctgaggtatctgctgccgaaggcgcagggctgcccatcgccgccggcactgccctccaggcgctcaggaccatcggcgccaagttcgacggtactggaaagcccatgaacgttctggtcaccgcggcatcaggtggcgtcggcctctacgccgtgcagctcgcgaaacgggctggtctccacgtcactgccacctgcggcgcgcgtaacgtagagctggtgaagagcctgggcgccgacgaggtgcttgactacaggacgccggagggtgccaccctgcagagcccctcgggcaagaagtacgatggcgtcgtccactgcactgtcgggaccagctggtcgacgttcgagcctgtgctggccgccacggggaaggtgatcgacatcaccccgaacttgactgccatcctcaaatcggcgctgcacagtgtgaccttcgccaggaagcggctcgtgccactgctcctgtcgcccaacaaggcggacctagagttcctggtcgggctgctgaaggacggcaaactcgagacgctgatcgactcgaggttcccgctgagcgaggtgagcaaggcgtgggagaagagcatcgagggccatgccactggaaagatcattgtcgagatgggagactgatctgggacgcgtccattgccgatagagacttgcagtagcatccactaggctgttggacactacagggttaaagtcaacatatacgaagtagtactagtatctgagtttggtcgtcgtacaaattgttcgtgagtggtgagccagtttataggcttgtttttcttttgttttcagctataaacttgaacttcttgtacagtttagggttttatggggttgcatgatagatccgcaaagttgcattgtaattacatatttgggacttgggagttgctatatttctgcttgaaacttcagaaatgtttagacaacataactacttaaggacacctcacaagaagaaa

SEQ ID NO: 100455 - DNA, 1576 bp, Zea Mays
acgcggcagaggccaacccagaaacatagaaaaggcgtgtacaccaagaagaagccggccaaccaaccgactcccccgaccctcctgatcgatcgagggccccttgttctagccagttgtccccttccctctcgccggcgttgctcctgcctgctccaatggccgccgcctccacgaagacggcgaacatccccgcgacgatgcgggccgtgcagtacgactcctgcggcgggggcgccgctggactcaagcatgtggaagttccggtcccttcggcgaaaaagaacgagcttctgctgaagctggaggcagcaagcatcaacccagtggactggaaggtgcagaaaggcatgctgaggcctttcctgcctcgtaaattaccttttatcccagtgactgatgtggcaggagtcgtggctgatgttggtccaggaatcaatgggttccaagccggagatcaagttgttgctatgctcaactcatttgtaagcacatgctcttaactatgtatgttaagtgcatcacatcagtcggcctccatatgttgtgttcggtgtgctcatcagtcatccgttattggaacttggaaggggtgttctgacatgacgttaacaatgtcctctgtttcgccagaacggaggtgggcttgcggagtatgctgtggcatcagaaaatctgaccgtcaagaggcctcctgaggtatctgctgccgaaggcgcagggctgcccatcgccgccggcactgccctccaggcgctcaggaccatcggcgccaagttcgacggtactggaaagcccatgaacgttctggtcaccgcggcatcaggtggcgtcggcctctacgccgtgcagctcgcgaaacgggctggtctccacgtcactgccacctgcggcgcgcgtaacgtagagctggtgaagagcctgggcgccgacgaggtgcttgactacaggacgccggagggtgccaccctgcagagcccctcgggcaagaagtacgatggcgtcgtccactgcactgtcgggaccagctggtcgacgttcgagcctgtgctggccgccacggggaaggtgatcgacatcaccccgaacttgactgccatcctcaaatcggcgctgcacagtgtgaccttcgccaggaagcggctcgtgccactgctcctgtcgcccaacaaggcggacctagagttcctggtcgggctgctgaaggacggcaaactcgagacgctgatcgactcgaggttcccgctgagcgaggtgagcaaggcgtgggagaagagcatcgagggccatgccactggaaagatcattgtcgagatgggagactgatctgggacgcgtccattgccgatagagacttgcagtagcatccactaggctgttggacactacagggttaaagtcaacatatacgaagtagtactagtatctgagtttggtcgtcgtacaaattgttcgtgagtggtgagccagtttataggcttgtttttcttttgttttcagctataaacttgaacttcttgtacagtttagggttttatggggttgcatgatagatccgcaaagttgcattgtaatt

SEQ ID NO: 100456 - DNA, 1080 bp, Zea Mays
aagcgacccatacttcgtgacagacgtccgctcatacgacccgatggagagaggtcttggatggttttggagactgcagggggtcacggccgcaaccccaatggcatcctcggccttctatgccgggaacacttccctggacttgtcgagtacgccggagtgacgagcccagcatacaccttcgaccactacgccgtcgcccccgatgcagtagatcgggacggcagacaattcaacaacaaggcagagcgggtcaagcaagagctgtgggatttcttcaggtgcgatgctggatacgaggccagggcggatgtggtgtctacgacgtgctgtaagaagctcgtcgtggacatgcactacgaggcgcgcatccaggccatcgtcacttaccacggctccgtccttggggagaaggtgaacaagaaggacgcccgaaccatgtcattgactgcggaccagtacttgcagtgctgggagaagatggtgcagaggtggtgctcgtctgagtgggacgaggcgcacaacgctagccgggaacggcgtttgctgatgcaaggtccctcccaccatcaaggcagccgcagcctgggcaaatacgcggaagcatggtcggcggcacatggtggcgcgccttgctccacgttctcggcatatgccatggcccacaaggggaaggcgacgtccgacgtcacctacaacccggatgacgggcccgaggcgtacaccaaccccgccatccacagccgactcagtgagtacaccgcaatggccaaggaggtccatgggccagattacgatccgaggaccgaggacatcgacggagatgtcctcatgagggtcggaggaggcaagaggcatgggcggtactggattgccgacggggcaatcgactcgtcctccactcccactctctctcaggtgcgagcaaggagcacgagcgcgagcccagccatacgacctcggcaggacacctcacagcatcgtatccagcaactccagactcagctagatgatgagaggaggcaacgtgaggagctggagaagaggatggcggagatgttcgcgtacatgcagagcctt

SEQ ID NO: 100457 - DNA, 584 bp, Zea Mays
tgtaacctgagagggggcaataaagtagtgtggatgtcaattgtggtgcatgagcctgggtctagtgctacaaaatgtggaccacctattccaagttctgtcgtgggtttcgtgtgccttggcaaaagcgtttgcatcccaacacctaaagtggcggacattgcatgaggctgacttcatagagcagcgaataccacccgccaccaacggtggaaggataatgagccgctatgttgtaggccaattagggcacatgtgccctctctggtagaccactatctttttgctatttttcttatctacttttgttcctatgtaaccattacgagtctcgcaactttgttctgcatcttggaataaattaaaattcagatctcagatactacagctccattcatggtaagtgtgcaaaagaaaatttagtccctttattctcagatactacaactccattcatgcttagtatgtttttctccaattttctttaactcttttcttctatctagttctatttccgtgcaatcacgcctcattgaatgtttttcaaccgatcccgcgtctacatttttctctttacctttttt

SEQ ID NO: 100458 - DNA, 672 bp, Zea Mays
aaaaataaaaataaaaataaaaaatgttggtgaaaaatagaacaagtgtaagggtttacggagctagggtttgggctcaccaccacttaggggtgaaaacgggcggatacggacggatattagcttagcccgtatcctaccctaatgtatttaaaacggattcgggatcggatacggataactagaaacgggacggatacggatacagggaccggatatttatccgggcggataagtgacagatacggatattatttgatcggatatcggatacttgtcggataatggattaattggttatcaaaaaatattcttgttcgaccaagaaattgcaagtaaattaatactaataaacatttaataggagataatctcaagttcccacataaaaatggtaaagtgaagtattgattatgttgaaacttggatacttagagtgatttcacgtgtaactcacgcaataagtggaaataaaatagaagaaacgttgacatcctgtggattttatggtcccattatttttatgactatatgtggccatatgttgtaccttcgtataatttcatagatttctaaggctatttatacattattaatttctttctacataaaatcatcaaaatataattaaaattcataaatacactagttttgatcaaaattgcaaaaagc

SEQ ID NO: 100459 - DNA, 2213 bp, Zea Mays
agaatagaagggagctttgaaggctttcgaactgacaagcgaaacggcgctcacccccgaaaaaatttgtcttcttcctcgcttccttctccttttctgcctctcctcaccctctgaattccttgttcggttgttcctcttcccacttcccctctctctctctcgtgcgtgtgtactacttctgaggccgaaaggtcagaagagagtgtccacctttcagttcgattttcgatgatttgagtccttccgccgcggggaatttgagcgttttccttgagaaatttgagtttcttcgagagtaatttgtgtgttttctcttgagagattcgtgcaaggatgtcgccttcgaatccatttattgggtagtcaaattgttcctatatagcgtcaaagcatccaactttgacttctccgtggtggcttcttctatcgtgtgtcatccagacaatttgatctttatttaattgggttggatgcttgttcaggttaggtagttggaaagggtagcataagacaccatcaattttggtgattttggtttttctctgaataattgcgggtcaaattagtcatcttcagttatcacttctcgtttttattgggaggatttggtgaattttagtggcgggcagagctttcttcgatcctcggtcctcatttttatggatttggatggttggggacttgggggtatcttaactttatccttgttgaaaaaaggctataaacttgggagttcctgtgagatattcctttcttgggaggatttgatcttgcttctgttggttcctggtgagttggttgagatgaaaggagtactatgctaactcatcgaggaaagaacagtacagccagtactactctgaggaagagctgacatttctatgctttcctttggaggactgtggtctgttcctccaagaatctatgcaaaagtgctcctcatctaagtatatctatccagttcaagttgttgtggttcatcttatcatctgtgtatgtatctgtgtgtaatgcgcgcactctgcaagaaggaagaatttgtgtaaaacgggtggtagttcagaattttctttgcacaggagaagctcagttgcgccttgcagatccaaattggccgatggcgcaacctgaaattcctgcatttgaggattgggaaaccacaggaaacaccccttacacacaaaagttcgaggatgtacggaagaacaagaaaacaggaattcctgcacagacaaatgatccaaggaggaacccggaacatcctcgtaagtcccctttgcatccaacggcctacaaaaccgatcctcaagaccaaggtccaaggaacccaccacatcgaccgagacctgaaactgatcaacaaagacactccgaccggcctactcaccgtgagcctgcaccacgaagacatgcaaatcctcacagagaacaagggagtaatgctgtggcaccaagaagcccctacaggacagctgctgggtctgcttcgccaatgcagtcaaacaaccaatcaaagccgaatcatagatcgactgcgacgcaggctccagagagaaggcattcttcagaggggcatagccagcatacacctggaaggagcaggatgaagcccggtagttatgagcctgaagaagtggctgtaccaccctttggtgaatgggatgatgcaaatgcagcatcaggtgaaaagtacactggtatcttcaacagggtaagggacgataggttgtcacctacctcttctgctaggcaaccatctaccgcccgtagggaggagaataaggtgcaacagaaatgttcttgctgcatactttgagaaaatgaggacatgatctcaaagagtttggacagcatcctattgtgcttctgtagtgagcaccctatcgtgtaactcttcttggctagttgtcatgtatgttattgtcggtgtgattatgtatctgtaattggattgttccatttaagctcttcaattacaaggaacatatatatgataccatatagatttgtaaagtatggagtgagcaatttccttgtgataataaaaggtttattgaatggggtctagatttccatagttaatgtggatttcagctagacaccaacaatgtggctttcaatttttttatttaaaaaggaaacgaaattgtgctcccttgtaattctcaatagctatgataatattacaaacagaaaaatctataaaatta

SEQ ID NO: 100460 - DNA, 2004 bp, Zea Mays
agaatagaagggagctttgaaggctttcgaactgacaagcgaaacggcgctcacccccgaaaaaatttgtcttcttcctcgcttccttctccttttctgcctctcctcaccctctgaattccttgttcggttgttcctcttcccacttcccctctctctctctcgtgcgtgtgtactacttctgaggccgaaaggtcagaagagagtgtccacctttcagttcgattttcgatgatttgagtccttccgccgcggggaatttgagcgttttccttgagaaatttgagtttcttcgagagtaatttgtgtgttttctcttgagagattcgtgcaaggatgtcgccttcgaatccatttattgggtagtcaaattgttcctatatagcgtcaaagcatccaactttgacttctccgtggtggcttcttctatcgtgtgtcatccagacaatttgatctttatttaattgggttggatgcttgttcaggttaggtagttggaaagggtagcataagacaccatcaattttggtgattttggtttttctctgaataattgcgggtcaaattagtcatcttcagttatcacttctcgtttttattgggaggatttggtgaattttagtggcgggcagagctttcttcgatcctcggtcctcatttttatggatttggatggttggggacttgggggtatcttaactttatccttgttgaaaaaaggctataaacttgggagttcctgtgagatattcctttcttgggaggatttgatcttgcttctgttggttcctggtgagttggttgagatgaaaggagtactatgctaactcatcgaggaaagaacagtacagccagtactactctgaggaagagctgacatttctatgctttcctttggaggactgtggtctgttcctccaagaatctatgcaaaagtgctcctcatctaagtatatctatccagttcaagttgttgtggttcatcttatcatctgtgtatgtatctgtgtgtaatgcgcgcactctgcaagaaggaagaatttgtgtaaaacgggtggtagttcagaattttctttgcacaggagaagctcagttgcgccttgcagatccaaattggccgatggcgcaacctgaaattcctgcatttgaggattgggaaaccacaggaaacaccccttacacacaaaagttcgaggatgtacggaagaacaagaaaacaggaattcctgcacagacaaatgatccaaggaggaacccggaacatcctcgtaagtcccctttgcatccaacggcctacaaaaccgatcctcaagaccaaggtccaaggaacccaccacatcgaccgagacctgaaactgatcaacaaagacactccgaccggcctactcaccgtgagcctgcaccacgaagacatgcaaatcctcacagagaacaagggagtaatgctgtggcaccaagaagcccctacaggacagctgctgggtctgcttcgccaatgcagtcaaacaaccaatcaaagccgaatcatagatcgactgcgacgcaggctccagagagaaggcattcttcagaggggcatagccagcatacacctggaaggagcaggatgaagcccggtagttatgaggtaacagcaccttactatccttcagtttttcaataatattttaatgaatgtaggctagaaatgcctttacggggcatttggatcccttcattttagaggaattgaaattcactcaataaagtaacttatttagtttggattttgacattccaccactttccaaatttcatatataatactatctcaaattcatagggtagaggatgggaaatggttttatgcattagtagaatttgtttctactctgtaaattacataacactcttcgtctcactcctctatagtaaaaatgtagcacataaatatcttcgatatcttgctaataatagtatacaaatatattttatataaaaccgaattatcttaattgatatatg

SEQ ID NO: 100461 - DNA, 1749 bp, Zea Mays
atgagatcagctgcaccctccacttcagaaaataatcgttcaaagaagataaaagtcccttccccacaagtcctgattgtgtcaagcagatcaaagactaataatgatgtcaagtcaaagatcattatgaacacaagctcacccaaacagaggacacccagaaaatcccagaaattgaatatccgttgcatcccctatgatgtcattgtgtcatcttggataatgagcgatcgacagcgtgatgctgttgctaggttgggatttcaaagtatatttgatttgcgtaccgatgtgttagagagcaggtctctcataaggtggttgatggataagctggatccagatgacatgacaatacgcccaggggctggtaaagaactcaagatcacaaaagagacggtttgtcgattgccaagtgctggaggtggcagggagttcacttgttgttggcacaagaggaatagaacaaacattactgcaacagtatatggatgttcactcattgttcttatatattatcttgaccacttacaccaccctgcatcacctgagaacaagtatggtactccccgcatcaagtattttgacaacgagacaataagagatttggctaggggtgacagacgtggccctcgccaaactggggaaccatttggtcatgcaaagcatcggcccatgtttgaatcaatgtttgatgcgcatgacaaagaggtggataagtattgtgcttctcttcagcagagccatcggatgcttgttgctaagcagattgaactatctgagacatttggcgaaatgatcgacgaagttctaagggctgccacgcagcgtgatactcaacaagaagataacccacccactacctcatcgcccccgacaaatgaccctgtatccactcctcctgttcgaacctctgatcatcagcatcacgatcagccaacccatgttcctactgatgataataaagtatcggaacaggcaactcttgaactggttgcaaggaatatttccactaaatctgctgttgctgaacctccccatgtatcacgtgaagaatgtgctcaccaattatttaagttcatttgttcaggacaactagacccgagcatgtctatcattgattttggaggatatggtggttctgtcttggatgttgtccaatcttttggccctaataaatgccttgagaactttttcatgcagggattcattgactgtattcgtgacgatgatatattatacaatccagataccataagcaacacactcatactaaatgtcaatgttgggcttcgtcgaatagacattttagattcaaatccttatgagccattgcttggtggcacttcctggaaacaaatccacaatgataaatttttgataaatggaacgaaaataccttggtccagattaataatgagaagacttagcattgcgttacatgaagctcgaccagattctagtttatcaaagtttggcaactacaagattgggcttcttcccaactgtccaaccatgttacgaggctccaatgattgtggtttttttgtcgctaacttcttccgatgctacgactttgatgatggcgacatctcagaatttgttgtaccggatgaaccattggaccaacgtgcgtttgttctgcattacctgacctttcatcgcaacaatagggtttaacctttccctgcagaactgctgcctttcaagtatgttccaaggaaacgacgttgtttaaaagccaagact

SEQ ID NO: 100462 - DNA, 2786 bp, Zea Mays
cattcttaaacccctacctaagctgcatagctagggtttccacgcatggcgaccacgacgccgcctacggcgatcctaggcaccctcgtcgacttcacatcgcgggagaactgggacaagttcttcgcgctccgcggcacgggggacagtttcgagtggtatgcggagtggcctaacctccgggccccgctcctcgacctcctcggggaccgcggcgccgcagcgggggcggcccaggagatcctggtgccagcgtgcgggagttcggtgctgtcggagaagctctacgacgcggggttctgccgcgtcaccaatgttgatttctcccgcgtcgtcgtcgccgacatgctccgccgtcacgcacgcgcgaggccagagatgcgctggcgtgtcatggacatgaccgacatgcagtttgcagatgggtcatttgatgtcattcttgataaaggaggactggatgctcttatggagccggaggctgggacaaaactggggataaaatatctgaatgaggtcaagagagttatgaaatcaggagggaagtttgtgtgccttacccttgcagaatcccatgttttagcgcttcttttgtctgagttcagatttggatgggatatgagtattcaagctatagctagtgaatcctctgaaaaatctgcgttccaaacattcatggtggtcatggtaaaagggaagatgggtgtagctcaaacaataaaatcatcattggatcaatctgctgaatactgtaacatgagacaggcaaatgctgtgattcgtgctcttgggaacgagaacatcatccgggagtcatactcgtctagtgttgatgtactgctctcattgcgagatcttcagctaggagctataggagatctgaaagtgattgtcccaggacgaaggaggcaattcattcttggtgaacaggaaacttcgctatattgctacaaggctattttattggatgccaagaagcaaacagaaacctttgtatatcactgtggagtttttattgtccctaaggctcgagctctggaatggctattttgttcctcagaaggacagtggcatgttgttgaaagtgcaagggctgcccgtctaattatggttttcttggatagcagacatgcaaatatcgacatggatattattaagaaggatttatctccccttgttaaggatttagaacctggaaatcctgaagaggaggctcctataccgttcatgatggcaggtgatggtgttaaacaaagacatactctgcaagaggtaacttcagaaataactggtccaatggttgtggaagatgttgtctatgaaaatgctgatggagatcaaggttccatgtctgagaaaatgttccgtcgtcttatttttggaagaagttctggtttagtgcaatctgaagcgttgttaatcagagatcctcccagtgatgaggtagacaaaaagaacaaaagtgcagctgcaacatctaaaaaaagaaggaaccataaaaggggatccaagaacagtctgagaattgaccataaatttcttggtagctcatatcacagcagtatcatatctgggctttctttagttgcatcttctctgagtgctgctgcttcatctggagaaaaagtcagcatcaccgttgtaggccttggtgctggttgtttcccaatgtttctccgtggatgtctgcctttcgtagatattgaggtcgttgagttggaccccttggtggctgagctagcaaagaaatattttggcttttcaatggatgagcaattgaaggtccatttgggagatggcatcaagttcattgaagacagtgttgctgcaaatcagtcagtaaatggcagtaccagaaatgcattcaaaatacttatcctcgatgttgattcatctgatctaagctctgggctgtcttgcccaccagaaaactttgtcgaagatcctttccttctaatagcaaaggagttccttttggagggcggcctttttgtcatcaatttagtctcgcggtcaacctcagtgagggaaacggttgtttcaagactgaaagcggtcttcgaacacctgtactcactgcaacttgaagaagacataaatgaggttctgtttgcatcaccgagcggaagatacctagaaatcaatgacattagtgcaggagcctccaaactgcaggacttgctcaaaattccggtggatgtagaatcagatatacagaagttgcagaaactccagtaacaatctcacctgacgcggagcaccatccatttgcatccacttgatttaggtgctgttcagttctcaccccagcagggcacaccaaaatgtcctttgttttgctcgtggaagccaaattaggaccagctgttttgtacaccagaattttgtctaactgcgctatagaaaaattttggcctgccagaatgtcttttacaaccaaagaggtgaaaaatctggcttgacctgattgggcctagaacaggctagagcgcatttcaaacttttaaacgtccacaaattggccgtgttttcccatatgtttgcctcgccaactctgcatgggtaaaacagtgcagctgtacagatttagaggatgtgtggaggaaacagaatgtgcatcatgcttggtctctgatggtttacaaatttcagcgaatatattgatcagaattcaggctgtgttatgatagctgtagcgtgtttggcaatgtgagtgtcgggtaggctctcgggaccctcgtaagcattcacacctcccgtcctagcagagtagcagcttcatgtac

SEQ ID NO: 100463 - DNA, 1251 bp, Zea Mays
ggtgaagcgaggggttggctcgtgtattttcgcaaatatctcctatcccttttctccctcccgcgatctcctccgctcgacgcctgtaccccgccgtcccgcgtccccgctccagctcgaaaccctagacctgtgcggctgtccctattctctccaacggaaagatgtactcggaccagatctccaccgggcgcaagcgctccatccacgaccgccttgacggcgacctccccgccggcacgggcgccggcggccgtgttcgtcacacggtgtccaagaggcaacggcagatagatgaaaaatggaagcatgatctgtatcgggaagacgatgaaccagcttcaaaatcaatagatccgaaggatttgcgattgaagcttcagaggcgaagttcacaacaaagctttaccagcacaaggagttctggtgtgcgtgatttacgtgagaagctatctggtataatgcacccacagccatcaaatgctgatccaaagcccaagccaaagccagtatcagaggttgttaacatctcaaggcgtcaaactgctgatgaaatgcctgcacgtcaaagcaagagagcaccaaaacagacttcattgaagaagacatctcagccaaaggttgaaagtccactcagcagtttcctgagttcccttgggcttgagaagtactcgattaccttccaggcagaggaggttgacatggcagccctaaggcacatgacggagagtgatctgaaagctttgggcattccaatgggtcctcggaagaagattatccttgccttggagccaagagcataagggaatggcaagtgtaggaaggtgggagggatttgctaggcatgctcatgtgcaagttcgataaaactctgtaaccacatcttggaaagggtaacaacgacaatggtttgtgggcttcttgtaacacgtatgctgccctgttgagcatgttcaacgaagtttaggatgttagaaggcaggccacgccgtgtattgatgcaacttctatttctgtgttgattaaatggtgctgtatacatgttgggggtctttgggttggtcttagaatgctatatcctataactacacttttcttatccacagggtatgctatatttgaagctaggtggtttggggatatgcacatcagcaatggttgttctgggccctggtttcagtgtattgggctcttgtttaagactcggcatacttgctttggattttggtttatttgcttcaagttagaatg

SEQ ID NO: 100464 - DNA, 642 bp, Zea Mays
tgtagatcttactggaaacaagtaaataagagtagctatgatacatgaacttcatccattctgctgatgaattgtatcactttgtacacgctcacaagctttttgcttgaagaaatgtgttggtgtgtgctaagctattggagtttgctatccctttggcatttacctgataggtagataataacaaaccagagtagtttaatctattcatctgaataataaattcgaacttatgatgattggcgtgcgttctttcagggtcctcggaagaagattatccttgccttggagccaagagcataagggaatggcaagtgtaggaaggtgggagggatttgctaggcatgctcatgtgcaagttcgataaaactctgtaaccacatcttggaaagggtaacaacgacaatggtttgtgggcttcttgtaacacgtatgctgccctgttgagcatgttcaacgaagtttaggatgttagaaggcaggccacgccgtgtattgatgcaacttctatttctgtgttgattaaatggtgctgtatacatgttgggggtctttgggttggtcttagaatgctatatcctataactacacttttcttatccacagggtatgctatatttgaagctaggtggtttggggata

SEQ ID NO: 100465 - DNA, 693 bp, Zea Mays
gcgcgaggcaaggtgtcgtgcagctctagcaagcgtcacgaaggaatggccatgacaaggggcgcaataaagatgtgcactcaaccaagggcgacacgcgaggtcaacaatgacacctgccactactgtggaaagtctaggaactaggcccacgagtgccgaacaaagaagcacgatgaggcatagacaccaacaaatcaagcataggccaacctcactaaagcagaggaggattcaccttttctattcatggtggtggtgtggccgttagagagagttgttcacaatgtgaattgcatcgagcatgtcttcgtcaacaagcgcaaggtcgtggcggacatcgacaatagtggtgaccatcaggagatgaagtggtacctccacattgaagcatcgaatcacatgacaggtgacatggccatcttctctgagctcaaccatggtgtcattggctctatgtgtctcagtgatggttcactagtgaagatcgtcgggcgcgacatgatcctattcgagtcgaaggatggtggtcacagggcattccatgttgtgtaccacattttgcatctctagagcaacatcttgagtgttggatagcttgattaaaatggatgcaagatcgacatcactaatgacatactatggatgagggatcaccgcagccgagagctcctcgccaaggtatagcgtaca

SEQ ID NO: 100466 - DNA, 1758 bp, Zea Mays
accgggccggtccaggtccaccccacccgagacagagaccaaccgccgctgccccatctccggagtcccgctcctaaaaccccgccagccagcggtgccgccgccggtgacatggacgacggcgacactcccagacgcaaatccgtcccagattggctgaacagcccgatctggtctgcgcctccgccgtctccacgccacagctcccttccccccacggcaccgtccccccctcagccgccaccatctcctctgccccctccccagccacggcgggatccgactcccatccctcctcccaacgccccacgcgacgccgatgtttcagacgacgaaggcaagggcgcgggcgccccgtcgtgcgcccacctcgtcgctgagttcaaagtcgcgctggataggaaggtggtggatctggcagagctccggaggctcgcatgccagggcgtgcccgacgccgctggtattcggcccatcgtctggaagcttctcttgggatatgtgccaactgatcgtgctctatggccgtatgaactggagaaaaagaggtcccaatactgtgatttcaaagatgaacttctggttaatccttcagaagttactcgaagaatggaggaaatgacagcttctgaaagagaggaacataatgctgaaggcaccggtgtgctaccaagggcggaaatcgttcgtgatgagcatcctctaagccttgggaaaactagtgtttggaaccaatacttccaggagtctgagattgtagagcagattgatagagatgttaagcgcactcatccggagatggaatttttcaatggggactcttcagattcgctgtctaatcaggagtcactaaagcgtatacttacaatatttgcaaaattgaatccgggtataagatatgtacaaggaatgaatgaggttttggcacctctctattatgttttcaagaatgaccctgaccaaagtcaagctgctttagcagagccagatgccttcttctgttttgtcgagctgcttagcgggttccgagacaacttttgcaagcaacttgacaacagcgtggttggcatacgctccacaattactacactatcacagcttctgagaagacacgacgaggaactctggcggcatttagaagttgtaaccaaggtcaatccacagttctacgcattcagatggatcaccttgctgctaacgcaggagttccagttccgtgactgcctcagcctgtgggacacactgttgggcgacccagaggggcctcaggctacgttgttgcgggtctgctgcgcgatgctaattcttgtccggagaaggctcttggctggcgatttcactgcgaatctcaagcttctccagaactacccacccacaaacatcgaccacatcctacacattgctaacaagctgcgaggaccgcttcctttctgaccagttggatcccttgcgtactttgttaccgtatacggttttgtgctagactatgtttatccagggaaagaaagctgcgttaagaactcttttaaaatgaacctacaaagcaacagttggttctcgtgtagtttccgttccggctttatgccggaatctggatgcccgtgcggctttgctgtttgtgaatgtcgactgaacgagtgccctgcacctctcaacttcagtcgaagtccgtggccacagggcaacatcaacacaagcatgtagcagcgcagtgttttgtgcaccaaactaaccctctctatactcactttccggtgc

SEQ ID NO: 100467 - DNA, 1693 bp, Zea Mays
accgggccggtccaggtccaccccacccgagacagagaccaaccgccgctgccccatctccggagtcccgctcctaaaaccccgccagccagcggtgccgccgccggtgacatggacgacggcgacactcccagacgcaaatccgtcccagattggctgaacagcccgatctggtctgcgcctccgccgtctccacgccacagctcccttccccccacggcaccgtccccccctcagccgccaccatctcctctgccccctccccagccacggcgggatccgactcccatccctcctcccaacgccccacgcgacgccgatgtttcagacgacgaaggcaagggcgcgggcgccccgtcgtgcgcccacctcgtcgctgagttcaaagtcgcgctggataggaaggtggtggatctggcagagctccggaggctcgcatgccagggcgtgcccgacgccgctggtattcggcccatcgtctggaagtaaaacaaaatctcagaacaaactgctagtgtttaggtaaactggatggacatttgcctggtcttgtaggatgcttctcttgggatatgtgccaactgatcgtgctctatggccgtatgaactggagaaaaagaggtcccaatactgtgatttcaaagatgaacttctggttaatccttcagaagttactcgaagaatggaggaaatgacagcttctgaaagagaggaacataatgctgaaggcaccggtgtgctaccaagggcggaaatcgttcgtgatgagcatcctctaagccttgggaaaactagtgtttggaaccaatacttccaggagtctgagattgtagagcagattgatagagatgttaagcgcactcatccggagatggaatttttcaatggggactcttcagattcgctgtctaatcaggagtcactaaagcgtatacttacaatatttgcaaaattgaatccgggtataagatatgtacaaggaatgaatgaggttttggcacctctctattatgttttcaagaatgaccctgaccaaagtcaagctgctttagcagagccagatgccttcttctgttttgtcgagctgcttagcgggttccgagacaacttttgcaagcaacttgacaacagcgtggttggcatacgctccacaattactacactatcacagcttctgagaagacacgacgaggaactctggcggcatttagaagttgtaaccaaggtcaatccacagttctacgcattcagatggatcaccttgctgctaacgcaggagttccagttccgtgactgcctcagcctgtgggacacactgttgggcgacccagaggggcctcaggctacgttgttgcgggtctgctgcgcgatgctaattcttgtccggagaaggctcttggctggcgatttcactgcgaatctcaagcttctccagaactacccacccacaaacatcgaccacatcctacacattgctaacaagctgcgaggaccgcttcctttctgaccagttggatcccttgcgtactttgttaccgtatacggttttgtgctagactatgtttatccagggaaagaaagctgcgttaagaactcttttaaaatgaacctacaaagcaacagttggttctcgtgtagtttccgttccggctttatgccggaatctggatgcccgtgcggctttgctgtttgt

SEQ ID NO: 100468 - DNA, 557 bp, Zea Mays
tgtttttttatttgagctttacttcccagttatacttctcattctttgggttttgtacctaatgacctgtatcgaaacatctaaggttactaaattgttcttaatcggatcaagtacaaacttgtcatcatggctggggacaaaacgggtgaaactgagtttgctatgtttggccggataacacagcatgtgagcatctcctgcggaaaatggctgcagtggtgtatgccctgtcaatagcatcagcggtaatagctgattgggggaaggagaaagcgttttgggctggacatgatctcaagctcgccatcgatgacttcgacgaggagttgatcgaccctaagctacgcttctcgttccagctcaacagcaaggtttgtggagtggacttgactgacaaagtagtggacataattttccatgtatttgatgctaattgtgatggtaacctgagctcagaggagttcttgaggtcgttacaaagaagagaaaatgacattcgccagccagcaacttctggttttctaggggagctggagaacgtgatcgacaactga

SEQ ID NO: 100469 - DNA, 2041 bp, Zea Mays
cgtccgtccatctccccactcgtgcgagatagcgatgctcctgagcagaagctccaaagcctcatgatggcagcaccggccagagccggcattcgcagcagctgatcgaccgagatcggacaggcacgccaggcagctcatcaatgggacgagcaggaggaggaagcaagaagaatcctgggagctcgcgatgccgaggtggggggacgcggaggaaggagcagctgctgacgaggctatcgcggcggcagcggcagtgaggctggccaacaagatccggaagcgccgcgcggtgtcgtcgtcggggggctcggacccggcggccgggaggcggctacggtccaggaggcccgcggtgctgctgccgcggcgccggaccagcgcgggcggggacatgtcggagtcgtcccgtggccggcattgccgcggaggcggtacccgcctcgccgacgggacatggccgtccgcgtcggcgaggaggctcgtcgacgcgttctggcaggatatggacagcgacctgcttgaaggggatgcggcggcggcggcggcgcgccggagcttggttcagtggagcggcgcctccacggagagatcgagaagcaagagcaagatcttggaggctgatggcaagggaagtcggcgcaacggccatgcccggtggctttcggcagatatgacgagcaacggccatgcccggtggctttcggcagatatgacgagcaacggcagcggaatggaggttggtaaattctcccaagacgatgtttcaagatgtcctgagaaaacagtgaacctacaggatcttcagaacagcttgattgcatctaaggagcttgtaaaagtacttgcccacatatggggacctggagaactgaatccgtctagtgtatcactcatctctgctctacgttcagagcttgatgttgcccgttctcatgttagaaagctaataaaagaaaagaagtctaatccctatgaaattgaggacttaaagaagcaacttgcagaagaaatggaatcgtggaaggtcaaacaaaaggagaaggttgcaaatgctctccaatttatagtttcagagctagacactgagaagaagtcaaggaaaagagcagagaagacaaataagaagttgagtgttgccttagccaacactgaagcctcactgcaggcagtgacgaaagaacttgaaagggagaggaaatctaaaggaagagttgagaagatctgcaacgagctcatcaaaggcattgacgaggacaaagctgaggtggaggcactgaagagagaaaccgagaaggcacaagaagagctccagaaagagcgtgaaatgcttcaacttgcagacgagtggcgtgaacaaagggttcagatgaagctgctagaagcacggcttcagtttgaggagaaaaatgcagctgttaatcagctgcgcgatgaactccaagcttatctggatactaggaaagagcaggaaccaatgaacgatccaatgcaactgtcccatgcgtctgaaaatggcgccaccgcagctgatgatgtagtccctgacagaaatggtggaaacttcagcgaagacgacgcatcggaaggcagtgacatacactcgattgagctgaacgtcgatggcgtcaacaggacctacacctggagctacactccttcctcgaaaggcaggcagaggagcgcatcgaggcatgaatcgttttcggatagagggatggacggcgtgaactcgtggcgtttagagcaaagctttcggggcatggatgaggagctggagggagactgggcagaagggtgtagcaacggaatactgaccatggatcacgacgaggagaggtatctggcaatcaagaatctcagagagcagatgctggccgggtcagggttcatcctatcacaaggtagagaaaatgctgaaagagagtgttgtggcttgtaagataaactgcatatgaagagaattttaaagtaatgtgtcatatgggtcgctgtttgatgctaagatccagctgttcgagaattttaaagttatgttcca

SEQ ID NO: 100470 - DNA, 2913 bp, Zea Mays
atgtaccagtggcgcaagttcgagttctttgaggagaagtctgccggccgcggcggcggcgggggttcagccgccgccgtgccggccgagatcgcgggccgagtcacctgctgctcgggcggccggggccgcgtcgcggtggggtgcgacgacggcaccgtgggccttctcgaccgcgggttccgcctctcctatggcttccaggcctacgcctcctcggtcctcttcctccagcagctcaagcaaagaaatgttcttgtcacggttggagacgatgaccagtcatcttctcaggcatcagcaatctgtctaaaggtttttgacctcgataaagtacaagaagaaggatcaagcacaacaactcctttctgtgttcaaattttgcggatcttcactgatcaatttcctcaagcaaagattacatcatttatggttctagaagaagcaccacccatactgatgattgccattggactggacaatggtttcatttattgcatcaaaggtgacattgcacgtgagcgtattacacgtttcaagttgcaagttgaggctgcttcagatggcagcactagtttgcctattactggtcttggttttcgagttgaggggcaagcacaccagctcttttctgtaactcctggttctgtaaccttgttcagcttgcatattcaaccaccaaggaggcaaacacttgatcagattggttgtcagacgaatgctgtagcaatgagtgaccgtatggacttaattattggtagacctgaagctgtatatttctacgaagttgatggtagaggcccttgctgggcatttgatggtgagaaaaagtttgtaggttggtttcgaggctatttactctgcattattgaagatcagagaacacataaaagcacacttaatgtttatgatcttaagaatcggttgattgcacatagcatgcctgtgggggatgtttcacacttagtatgtgagtggggttatattattctcataatgtcagacaaaaagattctgtgcattggagagaaagacatggaaagtaagcttgatatgttgttcaagaaaaatctttatacagttgcaatcaatcttgtacaaagtcagcaggctgatcctgcttccactgctgaggtgctgcggaagtatggtgaccatctgtatggaaaacaggaatatgatgaggctatgtcccagtatatccacactattggtcatcttgaaccatcgtatgttatacagaagttccttgatgcaaagcgcatctacaacttgacaaattatttagagaagttacatgatcgagggttagcatctaaagaccacaccacccttctgttgaactgctataccaaattgaaagatgtggagaaacttaaccattttatcaaggatgaagatggggttggtgagatcaagtttgatgtggaaactgccataagagtatgccgagcagctggatatcatgaacatgctatgtttgtggcaaaaaaggctgggaggcatgagttgtacttgaagattttacttgaggatcttggtagatatgacgaggcactgcaatatatatctggcctcgaggcaaaccaggcaggtcttactgtaaaagaatatgggaaaattcttgtggaacataggcctgctgaaacagttgaaatactgttaaggctctgtacagatgttggagatcctacgtcgagaagaggttcaaacagtatgcacttgcttatgataccatccccaatggactttgtgaatatatttgtgcacagcccgcaatatctgatgggatttctggaaaattatatcaaaacagtaacggactcacctgcgcaaacagaaattcataacacccttctggagctctatatttcaaatgatttgagcttcccgtctatctctcaagaaaatgaatatgagaatcactatatcaaagaaataaaaggtaaagaaactgctaatgtctataggtcaggaataaaggaaaaaactggtcttggaaaagaagatcctaaagtagcaaagaatattgttgataggagaaggaaagggcttgcgttactcaaatctgcttggacatctgagatggaagatcctttgtatgatgttgatcttgctctcattctttgtaacactaatgcattcaaagatggtttgctatttctatatgagaaactaaaactttacaaagaggttattagttgttacaagcaagcacatgatcatcaaggtttaattgcatgttgcaagaagttgggggactcatctcaaggaggggatccttctctctggggggatctattgaagtattttggggatcttggggaagattgctctaaagaagttaaagaggtcttgacctacattgagaaagaggatgttgtacctcccatcgttgtgctacagacactatcaaaaaacccatgcttgacactctcagtcgtcaaagattacattgctcgcaagcttgaacaagaatcaaagctaattgaagatgatagaaaatccattgataagtatcaggcagagacagagttgatgaaaagggaaatacaagatctcaagacgaacgcgaaggttttccaactgagcaagtgtagcgcgtgcactttcacccttgatctacctgctgtccatttcctgtgcatgcactcgttccaccttcgctgccttggtgacaacgaaaaagaatgcccagaatgcgcgcctgaatacagatccgtcatggaggcaaagcagaagctagagcaaaacgccagggaccatgatctctttttcaggcagttgaggggttccaaggacggcttctctgtcattgcagactattttagcaagggcatattttggaaactttggtctcagccaaagtttttctctgcaaagagagcgccagctgggtcccgctctggctga

SEQ ID NO: 100471 - DNA, 209 bp, Zea Mays
ttttctttttttttttactcgaaaattcatagatatttttgagttgggatttttaacgatgattaaaggttcgacgcgctacacgactacgcatattattttctcagattttgaaatagggaaccgaattggctagcaattgttccggtttttgtttgtttaaacagccggcctcaagtagcatatttaccgaatttatagagattgcg

SEQ ID NO: 100472 - DNA, 501 bp, Zea Mays
atgaactccaaaagccacgacgacgatgtggttctggagcaagcgaccttgcgcaccgtcgaggtcacggaacagcggcacacagcttggcgacgggataagcagcagggcggggtcgtcgaccggcaacggacatggcagatcggcgctcgcaacggagttcgcgcgcacgcagagaggaaccttggctgggcgcgcacacaagggagcttcgcaagcttgaggggcacaacaccatgtggcgagctggaactggacagagcgcggacgggcgggattcgagcggaggccagagatgcgcgcgcacggaagctggagggcgagcagggaggatcttggggaggaaaccgcggccaaggagaggcggccgagctgaaggagcggcgcgccgaggaccgggaccaggggcgcagacggcggaactccggctgggcgcttctgctggtgagcagggagcaccagggagcagcggcgtcaggcgctgagcaagagctcgactag

SEQ ID NO: 100473 - DNA, 1392 bp, Zea Mays
attacggacacacgggcaccccgtctcctcttctttctctgtgtctctgtctcctcaccaaagaaccgcaactaggaacggctcgccacagaagaacgtacggctatgaagacgaggcgcggtgcctgctactcctgccatgcggcgccgggcgagggcccggaggtgcaacgccggaagaggcgcaggacggcggccgaggcatcgccggcggctgccgaagatccaggtgtccgcctgggcgccagagacatgttcgaggatctgcccgacgatctcgtcgtctccatactgagggacgtcgccgcgtccgccggctcgccggccgatctcgccggcgccatgctcacgtgcaagagattcagggagctagtagcgcggagcaaggtggtggtgctcgcgcgggcgtcgccgcggtgcctctcggtgcgcgccaaggcctggtcggacgaggcgcaccggttcctgcagcgctgcgccgacgccggcaacctcgaagcctgctaccttctcggcatgattcggttctactgcctggggagccgcggctcgggcgcggcgctgatggcggcggcggcggtgggcgggcaccgcgaggcgctgtactcgctggccgtgatccagttcaacggcagcggcggcgggaaggacgaccgcgacctccgcgccggagccgcgctgtgcgcgcgcgcggcggcgcggggccacgtggacgcgctccgcgagctggggcactgcctgcaggacggctacggcgtgcgccggtccgtgctggacgggcggcgcctcctcatccaggcgaacgcgcgcgagctcgcggccgcctcggtggcgcacccgtgcctcctcatgagcgacctggggtgccgcgccggcgaggcgcacgcggccaaccggttcctggtggactggttcgcgtcgcggccgctgggcttgacgcccggcggcaacggcaacggcagcgccgggacggcgggctcgccggaggaggacggcgttggcggtctccggctgtgctcgcaggcgctgtgcgggcggcccgagacgcggcggcacgagttcaggcggtgctcggtgtgcggcgtggtgaactactgctcccgcgcgtgccaggcgctgcactggaggatggcgcacaaggcggagtgcacgcccatggaccggtggctcgacgcggtgcagcccaacgccatcgccaatgcggacgcggcggccccggcgccgtgacgttctccgttactatatatgtcagttagcggccggccgtttctctgttttgccttttgcgtcgttctctgaacctgcgtacgtacatggtttgttggcaaatgctgatgtaacgttcttctggcgcgggcgatacgtagaacataggcagtgaaatttttttca

SEQ ID NO: 100474 - DNA, 369 bp, Zea Mays
aaactgattctcgtgtggagccaaaagatcgggagtcgtttttgtgaagaaaggtgggatctaaaaaaacctgctccaccctcccttaaaacagctcctcaaccaactaaatatggacctccccttaaattttgatcgaaattacccgcaattgccattggacaaaaacataacgagccaatttatggattaaacatttgagaccattttatgcactactatgatgggaatattttatatgttattgtttcataattttttttccgtatatgcatcctacttattggtttgtaacaaagttgaactgcaaaaggtaaaacagacaatcgccacggaccaccaactttcagaagacaagaatcaatttac

SEQ ID NO: 100475 - DNA, 79 bp, Zea Mays
tctccaacccaaaccacaagggacaagtcaaccttgtatttgcaatcttcccttgatgagtgtattgtcaacaccacca

SEQ ID NO: 100476 - DNA, 1729 bp, Zea Mays
ccgacttctgcggcagcggcggcgacgccatgggcccggtgggcttggccgccgtcctgtgctacggggacaccgtgacgcagctccacatcgtgggcgccgcgggcgcgggcgcaccgcctctgcccaggaacttctccatcggggtcgtggtcacaacgctgtccaggctccccgacctcaaggtgctcacgctgtccgggctcgagctctgggcccgctgccgggcaagctcggtcgcctcgcgtcgctggagatcgtcaacatgagcggcaactatctcttcggcgaggtcctgcggggcgtgtcgcgcctcgccggtctccagacactggtcctcgatgacaacatgctgggcggtgaggtgccgacctggatcggcgcccagccgtcgctggccgtcctgagcctgcggaacaacacgttccagggcgtcgtgccggagtccctgggaagcgccccctcgctgcggtcgctcgttctcgcgtccaacaacctgtccgggaacctgccggacatgagccagcaggccaacctccaggtgctcgacgtcggcggcaactcgctcgagccggcgttccccaagctcgggaggaaggtggtcaccgtggtcctggctaggaaccggttcgtcgccttcctccagaacccgcagctcgtgcaggagttcaggcccgacaaacagtacaacatccacatgctccaggagcgatatcaggtccgggttcccccctactccctctgctcaagtcccgtttttgagacatgtatactttggttggctaggcatgcgggtttgtggatttccgtgtttattagatgttgttatgaaattatgaggttgtgcggtcattaaaaagtctcaaattgatttgctcatacatcggagcaatcttaggggctaggtgtttagttagcatatgatttggtcctagttgtacactatgttgcgaggaatcttgaattggctgaatggtgactttagctcccatattatggtaagtagattgtgagatgtgttttattggcactatctataatttagtatgttataggcattttagcacatgtgtcctagaatatagacatatgtagttcttcctattatcttagttgattcccttgtatcttatagtccaaaaagtgatttcgccattgtggctagttcaggtttatgttctttcaactctagcaagggacaattcacagtgagagttttctctgctggatcactgtagggaaaggacaatgcatattaaataggatcaaaattcagatgaaacattgaaggtgtgcatttttattgctatagcttgttttgtgataaatgctaatgaattgattaatccttgtttaccaatgtagatcggtcctgaccagattgaagctctgtatcagtgtgccaaatttcagtttgagtgtggtaactactcaggagcagctagagtgatgtagttgtgggcttttgaacaatagctggagtaatatgaaacattagtgatgtagttgtgggcttttgaactgcttcaagctggagtgatgtcgttgtggtgcttttgtgactgatcatctctggagcttttgtgaatgatctagctagctatctataaatgatctagttgtgaatgatattataattgtgatgcttttgtgaatatataattgtggtgcttttgtgtttatgtgatggatctatgactgtggtatactgattaactgtgtatgtctt

SEQ ID NO: 100477 - DNA, 1173 bp, Zea Mays
cacaaaccctatcctaatcggcccactaggggcccaacacctaaccctagcgcgcgccctggctcctccctgtggccgccgcctcctacttcctctccctcagccgccacccactctctcctcttccctctctctgcaccgacttctgcggcagcggcggcgacgccatgggcccggtgggcttggccgccgtcctgtgctacggggacaccgtgacgcagctccacatcgtgggcgccgcgggcgcgggcgcaccgcctctgcccaggaacttctccatcggggtcgtggtcacaacgctgtccaggctccccgacctcaaggtgctcacgctgtccgggctcgagctctgggcccgctgccgggcaagctcggtcgcctcgcgtcgctggagatcgtcaacatgagcggcaactatctcttcggcgaggtcctgcggggcgtgtcgcgcctcgccggtctccagacactggtcctcgatgacaacatgctgggcggtgaggtgccgacctggatcggcgcccagccgtcgctggccgtcctgagcctgcggaacaacacgttccagggcgtcgtgccggagtccctgggaagcgccccctcgctgcggtcgctcgttctcgcgtccaacaacctgtccgggaacctgccggacatgagccagcaggccaacctccaggtgctcgacgtcggcggcaactcgctcgagccggcgttccccaagctcgggaggaaggtggtcaccgtggtcctggctaggaaccggttcgtcgccttcctccagaacccgcagctcgtgcaggagttcaggcccgacaaacagtacaacatccacatgctccaggagcgatatcagatcggtcctgaccagattgaagctctgtatcagtgtgccaaatttcagtttgagtgtggtaactactcaggagcagctagagtgatgtagttgtgggcttttgaacaatagctggagtaatatgaaacattagtgatgtagttgtgggcttttgaactgcttcaagctggagtgatgtcgttgtggtgcttttgtgactgatcatctctggagcttttgtgaatgatctagctagctatctataaatgatctagttgtgaatgatattataattgtgatgcttttgtgaatatataattgtggtgcttttgtgttta

SEQ ID NO: 100478 - DNA, 1280 bp, Zea Mays
cacaaaccctatcctaatcggcccactaggggcccaacacctaaccctagcgcgcgccctggctcctccctgtggccgccgcctcctacttcctctccctcagccgccacccactctctcctcttccctctctctgcaccgacttctgcggcagcggcggcgacgccatgggcccggtgggcttggccgccgtcctgtgctacggggacaccgtgacgcagctccacatcgtgggcgccgcgggcgcgggcgcaccgcctctgcccaggaacttctccatcggggtcgtggtcacaacgctgtccaggctccccgacctcaaggtgctcacgctgtccgggctcgagctctgggcccgctgccgggcaagctcggtcgcctcgcgtcgctggagatcgtcaacatgagcggcaactatctcttcggcgaggtcctgcggggcgtgtcgcgcctcgccggtctccagacactggtcctcgatgacaacatgctgggcggtgaggtgccgacctggatcggcgcccagccgtcgctggccgtcctgagcctgcggaacaacacgttccagggcgtcgtgccggagtccctgggaagcgccccctcgctgcggtcgctcgttctcgcgtccaacaacctgtccgggaacctgccggacatgagccagcaggccaacctccaggtgctcgacgtcggcggcaactcgctcgagccggcgttccccaagctcgggaggaaggtggtcaccgtggtcctggctaggaaccggttcgtcgccttcctccagaacccgcagctcgtgcaggagttcaggcccgacaaacagtacaacatccacatgctccaggagcgatatcaggtttatgttctttcaactctagcaagggacaattcacagtgagagttttctctgctggatcactgtagggaaaggacaatgcatattaaataggatcaaaattcagatgaaacattgaagatcggtcctgaccagattgaagctctgtatcagtgtgccaaatttcagtttgagtgtggtaactactcaggagcagctagagtgatgtagttgtgggcttttgaacaatagctggagtaatatgaaacattagtgatgtagttgtgggcttttgaactgcttcaagctggagtgatgtcgttgtggtgcttttgtgactgatcatctctggagcttttgtgaatgatctagctagctatctataaatgatctagttgtgaatgatattataattgtgatgcttttgtgaatatataattgtggt

SEQ ID NO: 100479 - DNA, 131 bp, Zea Mays
atttccaaaaattcaaactaaactctttctgtgaatgtacttaatcaaagttttcttcctagattttgattttcaaattcaactccaactaaagttcaatcttcaaaattaagccttccaaataaataaac

SEQ ID NO: 100480 - DNA, 390 bp, Zea Mays
gtgtccgtaccgccggcgggtccggcaccggccggcgcgcgcccgtgcggatcgccacgtccgcgcgcaccgcaccgactggcaggtgatgaccacctgaccgtccgtcgcgccgacgccgacgccgacgccgatgcctcgtctcttcgcctctcctggacccgccggttctcccggatcatggaagaaggcggctctgtgcggcgcgcgggcgacctgctggcacaagggaatgacggcgcggagctcttgctctcttttttggacgaaaaaagatcagagattgagattgtagtagtatttgttagctagcgcgctggattgattagcaaaaattattgaaacgcgctatatttattttggatagcaagatgagttacgcaacgcaca

SEQ ID NO: 100481 - DNA, 237 bp, Zea Mays
atggtgacggcgatcgcggtggcgtcggcggggctcgggatgctggcgggcgtcgcgatggccaacaggtcttcgccgccgtccgcgggcgccgcgctgtggaggcccggcgggggccccgtgctgcgctggggcggaggcgccccgcgctgcgaggcgtgcggggggtcgggctatgaggactgccgcctctgcgcgcgctggtctaatgccggcgcccgcgggaaagaagattag

SEQ ID NO: 100482 - DNA, 1275 bp, Zea Mays
atggaaggttgcgcacaaggaggacgcagacgagcacagctggaaggttgcgccaaatcgtgcatccgccgcaacgcccgcggatggaaggttgcgccaccaaatcacgcggatggaaggtccacctcctcctcctctccccaaatcgtgcatctgtcgcgccctcaaatctcgcgggcgttcaactctttctcggtcaccgtcaatggaaggtcccagatctcttctcgccattaccgcgcccgccccgtcaattcccatatcccttctcgccattctctcggagcatccattgccattcatggacggcagacgattccatcctctcggttcatgaaggtgctcttcctacgcctcggcttctccggcgtcgcggatttgaagatccgccgctccgagtggggcggggccctggtcgcgccgcgaaggtccgggtcgctgtcggcacgcatcagcgccgcgctgtccggtggcctggtgctggcgccaccggcggtggaggagaaggtggaggtcaactccgccatattccccaagggcccgccggtgccactcccggttcagaagatggccacgcacatcgacaccaccgaggtgagcaggggccccgacgacctgccgggctactgggtcgtcaccggcgccaagctctgcatggaaggcggcaaggtcgccctcaaggtacacattgtcctccccatcgtccagaaacttgtatctatttataatgagaaacccggtatggacagcaaacttgtatcaaagatggtagcttatggcaatgaggaagcggatggaaagaagattcagatccagctgacagggttcatggaaaagaacacagtgaagttcatgaaggagctctggagccttctcctcagtgcgcagcagaatgccagtgggctgtgcaagggcgtgggttttgttcacggccgcggggtgctccaccgtgatctgaaaccgcacaacctgctcatggaccgcaagaccatggcactcaagatcgctgacctcggactcagtcgtgccatcaccgtccctgtaaagaagtacacgcacgagattctgacgctgtggtacagggcgcccgaggttcttcttggcgccacacactactccatgccggttgacatttggtacgtgggctgcatatttgctgagttggttactaatcagccacttttccctggcgactccgagttacagcagctcctccacatcttcaagttgctgggcaccccaaatgagtagatgtggccaggagtaggctccatc

SEQ ID NO: 100483 - DNA, 862 bp, Zea Mays
aaaagaccaaaccccaagtcctcgcagcatttgattctctgaccgattcagggacaccttcctcagagcaatacttaccagcgtgggcgtggctaccaaccgcagagtttccatgagcagatgcaaaccagtcggcggcgagagcccagcagcagacggacctgacccgcggcggccgatgtcggagacgccgtgttccgtgcagcccggggtcgtccctctcctcgggaagccatacttcacatgcatcctctgcaagtctcatgtcaaccagccgttccaagtgtgtaatgatcgaacattcgaagtcctttggtgcctggctctggctgcatgcaggtggtccccaagtcgctggcgccgttcctcccggggacgacggtgccggcgacggtgacgtggcacgggcggtcctgggagatgcggttcacgggggggcggcagatccagcgcctggaggccgggtggcggggcttcgcgctggacaacggactgaagctcggcgacgggtgcgtcttcgagctggtggacggcagggcggagcgcgtggtgttcagggtgcaggtgctccgcgccgacatccccgcggagatccgggagcgggccggcgggtacacctcgtccagcccaatcctcatcgactagctagctcattgctcacctcatcagctagcatgtatccccccgtgcggccgtctgccactgtcactgcgccggcctgaaactgaactgattcagctactgcagagtgaagtgcagcctaggcgtgttcaactggattgtggagtgtggacatttctgaaacctgatgtttagtgagaaactcctgtatcttgtcttcatctttgtttgtttctttctt

SEQ ID NO: 100484 - DNA, 922 bp, Zea Mays
actgtgatctcgtgagctaacctgtgtgactgtgcgtttcttccttcctcctaccctcccgtcctcacctcagactagctcggagtcctccgtcgccgagcaaaggttccaccaaaagaccaaaccccaagtcctcgcagcatttgattctctgaccgattcagggacaccttcctcagagcaatacttaccagcgtgggcgtggctaccaaccgcagagtttccatgagcagatgcaaaccagtcggcggcgagagcccagcagcagacggacctgacccgcggcggccgatgtcggagacgccgtgttccgtgcagcccggggtcgtccctctcctcgggaagccatacttcacatgcatcctctgcaagtctcatgtcaaccagccgttccaagtggtggtccccaagtcgctggcgccgttcctcccggggacgacggtgccggcgacggtgacgtggcacgggcggtcctgggagatgcggttcacgggggggcggcagatccagcgcctggaggccgggtggcggggcttcgcgctggacaacggactgaagctcggcgacgggtgcgtcttcgagctggtggacggcagggcggagcgcgtggtgttcagggtgcaggtgctccgcgccgacatccccgcggagatccgggagcgggccggcgggtacacctcgtccagcccaatcctcatcgactagctagctcattgctcacctcatcagctagcatgtatccccccgtgcggccgtctgccactgtcactgcgccggcctgaaactgaactgattcagctactgcagagtgaagtgcagcctaggcgtgttcaactggattgtggagtgtggacatttctgaaacctgatgtttagtgagaaactcctgtatcttgtcttcatctttgtttgtttctttctt

SEQ ID NO: 100485 - DNA, 968 bp, Zea Mays
ctggaaaggtattttctcgccttctcggcgcgctacgcctacgactgagctgaaagaagcggtagatcggcgttagcggcgagctagggttccggcgagtgcacccaatggcatcggaggcggcgcggcggcggcaggagatggcagaggaggggcaacggcacctggaggagactatcgcagcctcgttccagatcctcgtatcgatgaacgacgagctctgcaacgccggcctttggtcctcctcatccgtctcggccaccgctgcggctggctaccagcaccatcactctgctactcttccgaccccacactctgtagattccgacgccgccgacgcagggggcgcgcccagccccggcgggtcgctcgacgaggcgaggcaccgctacaagtcagccgtggcggcgctgcgggcatctatctctgccgtgtcgtcctgcgctcaggacattggatcaacagaatctgaagctgaccatgcagagattgagagattggaagagcatgcttctgctttgagaaaggaaattgaaagcaaaaacaagcaagtaaaactcctcattgatcagctccgtgacctaatagctgacatagcaatgtggcagagcccttgctcagtgtgaagtgtcgaagttagagaccgtagcctggacgtctggtataggcatactgtgcatgttggttaactgaccacttggaagggagcaatagatggaatatgactgggctgcacgggaaaagaaaatgaagctgtccaatgcagatagggatgtaatatgttggacatgaatgttattttggacacgactgtagatacacgtatctttttgaaacgtgtggattttcgctgtgacgaaagtcctgtaatgttttcttgtgtttccttgagaaaaacaatctagaatgatatttggattctcacatgcaatgcacattatttctgttaactgaaaaaggaagaaaga

SEQ ID NO: 100486 - DNA, 757 bp, Zea Mays
ataagtgagaagacggtaggcccaaccatttcttatcagtactctacacaagcagaagccggactaggcccatcaccaagacccactgaaccctcgccgtttcgtcgcacccaccaacacgagagatgagctccggcggcgcggacaagcccggcagtggcggcggcgcggtgaagacgccgtcggacttcctcaagtccatcaggggccgccccgtagtcgtaaagctcaactccggcgtcgactacagaggtatattggcttgtctggatggttatatgaacatcgcaatggagcagaccgaggagtacgtgaatggccagttgaagaacaagtatggcgacgccttcataaggggcaacaacgttctgtacatcagcacgacgaagcggacccttgccgatggcgcgtagccggattggagtccctctgtcctcctcccgtgtgtgtgccgtgcaacttcgaagccgttagcttcggttgcgctctgactctgatgcatcccttcaaatctctgtaccccccctgtctggaagggagttgggggggagagggaaagtgtatcgcacggtttcgtgggctttgtcagatgctattttgatgtaactgacatttgttcagcttcccatgttatgttatatgtggtgttgctttggggatatggataagatatcgtgttctcagcactgcgttatgtcctttcgtcgtcaatggtcggtatcaattcgtcaatgttttttgtgatctgctttgtgtt

SEQ ID NO: 100487 - DNA, 406 bp, Zea Mays
ggcaagaaggtgagcaaggcacctaagatccagtggcttgtgacccttgacccttcagaggaagcgcgctagaatcattgacaagaagaatatcgccaagaagtctgaggctgtcgagtaccaaaagcttcttgtctagaggctgaaggggaagggagacagccataacgagagcttggccaaaaggagatccaagttttctacctctgccaaggcttccgctggcacctctgcttaagaattttagtgctttgaaatgttttcaagacctatcttgttacagcttaagtaccttatgctgctctggctttgttgcaactgctcctgtacttgacatatttgtattagatactcagactatatagggtaagttcctaattgtgtccatgtactaaattatatattt

SEQ ID NO: 100488 - DNA, 978 bp, Zea Mays
atggacgcgaacggcgggacgcgctccgccgcttttcccccagctgttgtcaacgcgacccaccgtgcgaggtgctgtgtggagcggcttacagttgaagaatttgtgcaccacccatttctttctgaagatgctccagagaggaccttgagccggacattatctgaaataagagatggctttccaataaataatatcagtccaacaaggccttcaagccaaagttcacaagaagattgtatgccttttcctttggatgatgagtcaagtggacaggatgagggtccaattcctgacagtaaaagattggataaaacttcatgccagagtccatcaaaacataccagtctgttctccaggtatgtcttgggaaataatcatgcacctagtagccaacaccatggccatattgataaaatgaccaaggaaagcaagattcatgaagtgcaaggtccaaaaggtgtttatccagaagatttccctatcattgattcattagagtttgtagatcaggaatatgtatttgtgtctggaccacacccagagggatcatcgtcttcaacaaatgcctctcaacagcttaacttaccggcaaaatatgataatttgtctgtttcaccaccgaagttaactttcttgagtgcaccaaagccgataaacggtttgccgattaatagacaacaatctgctgggactggtagcttcgacagccactattctcctgcatctgtcacttcacagggatctgcggatataagtgatgccatggatcagcccccaactgattatctgacgaggattagattgttggagcaatatgcatcagccatagcagggttggtcagggatgagaacgttgacaaatatgcagatcagctgaccaagaatgaattatcatcaccacccaaaaagatgaagcacacccaggttagcaaaggcatgccagattctacatgttccaagaatgacaacatttag

SEQ ID NO: 100489 - DNA, 123 bp, Zea Mays
gctataacaagaaaaaaacaaaggaaaaacagacaaaacctattcttatctccaactttcacaacattaggcactaaaaatagctctgaccctagcaaagatagttagaagaccaagactctc

SEQ ID NO: 100490 - DNA, 564 bp, Zea Mays
attaagttgaatcatcataactttgtaactaagtaggcagccctgaatgttgctacctcgtgttactcttttctgacagataagaaggcgaacaagttgcccaaaaccactcgttgctcatgtaccatactatgaactacgaaggtccaagtccctccgagaccaacaataatttgtacgtccaccgaagattctgcagaggatttgagaacgaaagatccaagatgtccacgtcattcttctctgccaacgggtggcaatggcgaaagacaacaacgtccatatgttgtaagctatgtaattgtaacttaggtacaaagagtgggtccctctgccgtacggatgggggaaaaatagtctactggctgccctgttttaccctacacaagattgttctatatgatgtaccacaagatacatacacgctactattttgggtgtagtgaccttgttcccacttcaccttttgaaagttcgttccagagttgagtacccttttgggcactgagtcaatgtgaaatctaagttggttgatttccgaaacacagtcttctctcatttttt

SEQ ID NO: 100491 - DNA, 1119 bp, Zea Mays
cgatcgatacccgttcggcgttcgcatcagcttgttgctgctgctgaaggaaaagacaattttctccttacctcctgggctcaggcctcaggcgcacagccttctgcttctcttcctctcctcgcgtccccccaccaaaccctaacccgagcacccagcccctcctcgcgtctgctcgcgccggcctttggggctctcactctgagcggcagggacccgcagggctccggttgtgtccaggaaacatcccagttgttggcgagagaccaagaaatggcggagaaggagggagcgaaggttggagcggaagagatggaagagcgggagcaggaaggggaggcagaggaggtggaggtgaagtttcgtctcttcgatggctctgacatcggtcccgtgcgctgcaacgccgccgccactaccgtagccgccctcaaggatcgcgtcgtcgccgattggcccaaagataaatcaattatcccaaagactgctagtgatgtgaaactaataagtggaggcaaaattctagaaaatgacaagaatgttgcacagtgcagagctccttttggtgatcttcccagtagtgctatcacgatgcatgttgttgttcaaccatcgtcagcaaaatcaaaaccagataagaaggcgaacaagttgcccaaaaccactcgttgctcatgtaccatactatgaactacgaaggtccaagtccctccgagaccaacaataatttgtacgtccaccgaagattctgcagaggatttgagaacgaaagatccaagatgtccacgtcattcttctctgccaacgggtggcaatggcgaaagacaacaacgtccatatgttgtaagctatgtaattgtaacttaggtacaaagagtgggtccctctgccgtacggatgggggaaaaatagtctactggctgccctgttttaccctacacaagattgttctatatgatgtaccacaagatacatacacgctactattttgggtgtagtgaccttgttcccacttcaccttttgaaagttcgttccagagttgagtacccttttgggcactgagtcaatgtgaaatctaagttggttgatttccgaaacacagtcttctctcatttttt

SEQ ID NO: 100492 - DNA, 1028 bp, Zea Mays
cgatcgatacccgttcggcgttcgcatcagcttgttgctgctgctgaaggaaaagacaattttctccttacctcctgggctcaggcctcaggcgcacagccttctgcttctcttcctctcctcgcgtccccccaccaaaccctaacccgagcacccagcccctcctcgcgtctgctcgcgccggcctttggggctctcactctgagcggcagggacccgcagggctccggttgtgtccaggaaacatcccagttgttggcgagagaccaagaaatggcggagaaggagggagcgaaggttggagcggaagagatggaagagcgggagcaggaaggggaggcagaggaggtggaggtgaagtttcgtctcttcgatggctctgacatcggtcccgtgcgctgcaacgccgccgccactaccgtagccgccctcaaggatcgcgtcgtcgccgattggcccaaagagctccttttggtgatcttcccagtagtgctatcacgatgcatgttgttgttcaaccatcgtcagcaaaatcaaaaccagataagaaggcgaacaagttgcccaaaaccactcgttgctcatgtaccatactatgaactacgaaggtccaagtccctccgagaccaacaataatttgtacgtccaccgaagattctgcagaggatttgagaacgaaagatccaagatgtccacgtcattcttctctgccaacgggtggcaatggcgaaagacaacaacgtccatatgttgtaagctatgtaattgtaacttaggtacaaagagtgggtccctctgccgtacggatgggggaaaaatagtctactggctgccctgttttaccctacacaagattgttctatatgatgtaccacaagatacatacacgctactattttgggtgtagtgaccttgttcccacttcaccttttgaaagttcgttccagagttgagtacccttttgggcactgagtcaatgtgaaatctaagttggttgatttccgaaacacagtcttctctcatttttt

SEQ ID NO: 100493 - DNA, 872 bp, Zea Mays
cgatcgatacccgttcggcgttcgcatcagcttgttgctgctgctgaaggaaaagacaattttctccttacctcctgggctcaggcctcaggcgcacagccttctgcttctcttcctctcctcgcgtccccccaccaaaccctaacccgagcacccagcccctcctcgcgtctgctcgcgccggcctttggggctctcactctgagcggcagggacccgcagggctccggttgtgtccaggaaacatcccagttgttggcgagagaccaagaaatggcggagaaggagggagcgaaggttggagcggaagagatggaagagcgggagcaggaaggggaggcagaggaggtggaggtgaagtttcgtctcttcgatggctctgacatcggtcccgtgcgctgcaacgccgccgccactaccgtagccgccctcaaggatcgcgtcgtcgccgattggcccaaagataaatcaattatcccaaagactgctagtgatgtgaaactaataagtggaggcaaaattctagaaaatgacaagaatgttgcacagtgcagagctccttttggtgatcttcccagtagtgctatcacgatgcatgttgttgttcaaccatcgtcagcaaaatcaaaaccaggtgagttgcaagtttttgcactttgaggaaatttgttcttatggttttctgacttataccattcaacttattagacttgatataaactttttttatcagtatcatattatctgaaaattccagttctgctgataaaagcttcagtattttattgttatcactattgctttagttttcttaggctttattttctttccttatctaaggttcatgctttaccatgctgccatcatttttt

SEQ ID NO: 100494 - DNA, 1049 bp, Zea Mays
cgatcgatacccgttcggcgttcgcatcagcttgttgctgctgctgaaggaaaagacaattttctccttacctcctgggctcaggcctcaggcgcacagccttctgcttctcttcctctcctcgcgtccccccaccaaaccctaacccgagcacccagcccctcctcgcgtctgctcgcgccggcctttggggctctcactctgagcggcagggacccgcagggctccggttgtgtccaggaaacatcccagttgttggcgagagaccaagaaatggcggagaaggagggagcgaaggttggagcggaagagatggaagagcgggagcaggaaggggaggcagaggaggtggaggtgaagtttcgtctcttcgatggctctgacatcggtcccgtgcgctgcaacgccgccgccactaccgtagccgccctcaaggatcgcgtcgtcgccgattggcccaaaggtcttaaaagttccgtttttttgagttgaggaactcttgtgaggcgtaatgagccggccccgcccatgctgtgaagtcttgtgatatatactgctaaatttgcttatatttttgttgctattcttagtccctatgtctatgtgtcgcaaggaggaacatagggctttaaagggaatgagctcagattttcttattcgttgccttcattgtttggtgcctgatttagggaaaaggaagtgtgcctccattattagcaaccacttcttttgttgagattctaaatggattcaattgaaaatattcgaggcatagcagaaacggtatggaatatgctgcagcaaaaagataactaggaattggtttttccctacctctaagcttggtagatgaatggaagatttgagcttaattaattgttttgtggcctaacctcagtgttaaactatcctggtatttatgatggctataccaactagcttctcaaccagttataccgatcagaacattttttttgggaggggggagggcttgctttgctggtccgcgtttgaatcctggtacagcttcttaaggcaaaaacccaggg

SEQ ID NO: 100495 - DNA, 480 bp, Zea Mays
atggctccagagtgcacgtccggacgaaaattcctactttcgatcaagtctgacgtgtacagctacggggtgttagtgctggagatcatcaccggccacaagatctacactttcgaaggccaaaactctgaaggcctcgtcgaatacgcccttggcatcccttccctgaatcgaattgaattcagagctggtgtggcagcactggtccactggatagagaagagagcgagcgacgtcatggatgctgacttaggtgtggaagggcatgagcacgcgccacggcaagcgctgcggtgcgtgcacgtcgcgcttctctgcgtgcagtctgaccggtcgaggcggccaaccatggggcaggtcatcgccatgcttagcagtggcgacgacgggacagatgacctgccggagccatctctgcccgggtacgtcctccgtccaatggcggcgtcaggtgtccagctatgctttgggtgcaggtag

SEQ ID NO: 100496 - DNA, 2125 bp, Zea Mays
acgtgaaggaatggcgttgccgtcggccaccgtgctgtggacggccagcatcaccttccggcttgcacagaacatggtggtgttgttcttcctggcggcgctactggcggccccggcgcgttcgtcgtcgccgtcgtccaacaacggcgccggtcttcagcagcccaccctgaccctctgctccggtcactccactgtcgccaagagcggcgagttcgccagcttcctcgcagccgtgtgcgccggagcctacggcggcggcgtcgcccacatgtcccacagcatgtcctcgtacgtcgccgccgagaaccggaccatgtacggggtcgcgcagtgccgccccgacgtgtcggcctccgactgtactgcctgcctcgctgcagcctcgtccaagctcatcaccgggaccgcgtgcgcgacgtcggcggtctggcacgacgcctgcttcctccggtactcggaccgcgacaccggccggttccgcgaggacgaacacacggagaccgtgttcaacgcgagccgcgcgctgtcgtcgttgccgccccacgttggcgccaacaaagcggtggtggtgaggcgcctacttgccgccgtcgcggacagcacgaggagcggccacatgtgcagcgacatcggtgtcggcactggtgcggcaggcggcggccggatctacggactcacgcggtgcgccgccgagatctcgtgcgcagactgccgccgctgcctcggcggcgctctcgcggtggtagagcgcgagtacaacggcagcgcggggatgcaggtcctgcggctcagctgcatggccaggtacgagagctaccccttctacaacaccaagttcttgacccggcgattgctggcgtcggcgacgagcgggagcccccggccgactcatggaggaatcgtctttaactcttctatatcttttgggccttttgggctcgtgcactctggcggtcctaacccaccgccttcaccgccagtatcacctccaccaccagcattcacgaccatctccgtgcctgctagtgtgggcactgcacaacccaccccaccgccttcacggcctgcacaagcacagccatcaccacctccaccagcagcatccatgatcgtctccgggcctgcgactgcgactccgagggctgcacaagcacaacccaccccagcgcccccaggcggtcataacccaccgcctgcatcacctccaccagcatccatcatgaacatctccgggcctgcgactgcgactccgactccgagggctgcacaacccaccccagcgcctcctggcggtcctaccccacagcctgtagctgccgcaacgaatgaaaacaaagggaagggaacattgaatacaccaaaatggcagatcgtctctattgcaactgggttggtggctgctttcatcatcctcgcactcaccgtatggtgccgtcggaaacagcaactgtctcagagagaacatgtcatagaaccccatgttttgaatcatcaagcagatggagtgccaggtgagactatgcatcacctagaaaagaaacatttgggctccgaagaagacgacgacggaggaagaacaagctgccaactctacagctacctggttcttgaggctgctacatgtcgcttctcaagtagaaacaagctagggagcggtggatttggaacggtatacaagggcacgcttgagaatgggaaggacgtagcagtgaaaaggctcagggactccaagagggcgatacaagaactagagagggagatctccatcgtggctagcttgcgccataagaacatcgtgaggtttttagggtactgcttccaagaggaagggaggttcttcatctacgagtatgtgcttaacaacagccttgataaattttggtacaaagcatcttctcaatgccagaagctagagtgggctacatggttcaacatcatcttaggggttgctcgcggccttctgtttctccatgacatggggatcattcatcgggacctcaagccacacaatatacttcttgaccgtaacttcaacccaaagatcgctgatttcgatctcatgaggatgtatgatcaacagaaaactcacgagagcactgagaaggtcgctggaacattgtaa

SEQ ID NO: 100497 - DNA, 83 bp, Zea Mays
cagatgtattcctcacgctagaaaattacagctctacctcatgatacgaaagtatattgtgggtatgaatatacctcggtaag

SEQ ID NO: 100498 - DNA, 2471 bp, Zea Mays
tctctctccacatcagttttggtcccaaattcagcctgagagctgcagcagcgaagagccgaagaaagccagcctcgccttccccctctccccatactaatcatcatcaagggcctgcgattccaagttgcgtttcctgtctggggattcagggtggaaggagatgaaatcgccattgcgcaggttccggggcttcgcccttcatcaccaccaccaccacagggagaggaaggaccaccgcccgccgtccgccaagctcgacgagctcgtctacgccgcccaggaaatggaagatatgaggaactgttacgatagcttgctttcagctgcagccgcaacgacaaatagtgtatatgagtttgcggaagccatgggtgaaatgggaacttgcttgcttgaaaaagctgcattgaattatgatgatgatgaaagtggtaaagtgctgatgaagctagggaaggcccaatttgaactacaaaagtttgtggatgactatcgtacaaatattataaatacaatcacaaatccatcagagtcccttctgaaagagctacaagtcgtagaggaaatgaaagaccaatgtgatcaaaaaagagtggaatatgaagccatgcgagcagcctatggggagaaaggagggcgattgaggcacctaaaaaatgaatcattctcattgggacaactgcaaacttcatttcttgagtaccaagaggaggcggcattgtttatttttcgcttgaaatcactaaagcaaggtcaatttttaagtattttgacacaggctgctcgtcatcatgcttctcagttgagttttttcaggaaagggctgaagcatctagaggctttggagccttgtgtcaaagcagttgctgagaagcagcacattgactaccacttcagtggactggataataacagtgatattgatgattacagctcttaccaggataatcatagtgatggcagtgagttaagttttaactatgagataaatgacagggacaaggacctccccactttcagaagtccaatggatatggatcaagctcatccagtgagttccccaagacctctgaaggaacaggagcaggaaaatgctgaagaaataaaggcgactttaggagttcctcatatgaagcctgagattggtacccaatcagcaccaatttttgctgagaatgttcctgatccatctatgagattccggaaaatgaacttgttaaccagaactgttcactcctacaaactcccaacgccagctgatgacaagaaccctgcttcagtaattgccaacaaatcgcctcattcagatcaacccgagagtaaatctcacgtggcagtaaatttgtggcattcctctccactggctaaagattttatgccgaattccatgcacagtggacctgttaagatgccatcaagtaacgaaggggtatcactagcttattcctactccacgacagattttaagaaagtgaagagggaagctttttctggcccaatcccaagcaaggtaggattgagcacccccctgatttctgcgactgatcgcaaaccgtcagggaagcggccttcctatgtgttgccaacaaggcctcctggcccaggttggcagtcatctgtgcctccaaaagctacgcccagggtgacctcgctcccaacaacgactcccaggataagcgagctgcatgagctgccccggcctccagcaaatgctggtttggttggatattctggccctctggtttcaaggcggccgatgcctactgctgtatccaccacccgtgtctcacccccatcacatacggcgtcgccactcccacgaccacctgctgccatgactcgtagctactccataccttcaaacagtcaacggactcctattattaccgtgaacaaattgttggaggctaggcatagcagggagagtagcgaagtttcctcccccccagtaacacctatatcactggcagacgtttcccgcagaccaacaacagaagcagctgtttgacaagaaaaggataaaggaatccttgtgagcagttgcgcaactgaacatgttgataatcttaggaaattttgtatgtggttgactgtattctatgattccctccataatctctcgtgttccctgcgaaaggaaaaaaatgtaaataaggttccattatgttatcgccttgatatgcttgtccgaactacctcttggatatagtgtaatagtctacaagagagagtttagatatggacgctgttgattcagtggtcatctgagctaattttttggactctggtgtgtagctctacccataatactgcactgcccgaactgatatttgtattagcggatatctacaagtttaagttagaggtttgggtatgtgatatttctggcccaggtagattatgtgatattagtctaaggcagtggcaaacctagctgctatgtttagtgtgtgtcagaaaaaaaacaa

SEQ ID NO: 100499 - DNA, 1118 bp, Zea Mays
atgctctaccggagtagcgcaactccgcaagcaaatcctcctatctccaagcctccaatctgtgaacggtgaaccccaatcgaatgacgccgacggcgagcctcctcctcccggctcccccattcgtctctatctccgatgtgcgccgcctccagctccccccgcgcggcggccaccggcctcgcccctgctggaagggcttggagtgcggctccgtacagacgcggatggtctcttctttcgttgggagcagaacacgccgcagaaacgttatatgtgcttccctgttcggagttggagctcccgaagcactggtcattggagtagtcgccttgttggtgttcggccccaagggtctagcagaggtagccaggaatttggggaagactttgcgtgctttccaaccaaccattagagagatacaggatgtatcaagggagttcaggagcactcttgaacgagaaatcggaattgatgaggtttcccagtcgacgaattatacacccacgaccatgaataacaaccaacaacctgctgccgactcaaatatcaagcctgcacctgcaccttacaccagcgatgaacttgtgaaagtaactgaagaacaaattgctgcatcagctgctgcagcttggaacccgcaacaacctgcatcgtcgcaacagcaagaagtgtacactactccgagtgaggacgctcctacatcaggaggaagcgatggtcctgctgctccagctcttgctgcgagtgactcggatccaaagcaagtgaatctggacaaggcggaaacacagagatgactccgcttaacagcttgacactggatgggatgagcacactgaacacgtcaggacgagcagtcttattttaattttgtaggcgatggacttcagattaaagccagttatttggactgctgcagctataatctatagagacataacactgtaaaaatagtagaatccgttttagattaaagccaaacgagatgagagcgttttctgtgtttactaggcttgttctgtagcagcatgcatgggcaggttcatacaaaaaggctatgtgtatgcgtaacataaccacgagtttatatggattaaatatatttagccacgttg

SEQ ID NO: 100500 - DNA, 1115 bp, Zea Mays
atgctctaccggagtagcgcaactccgcaagcaaatcctcctatctccaagcctccaatctgtgaacggtgaaccccaatcgaatgacgccgacggcgagcctcctcctcccggctcccccattcgtctctatctccgatgtgcgccgcctccagctccccccgcgcggcggccaccggcctcgcccctgctggaagggcttggagtgcggctccgtacagacgcggatggtctcttctttcgttgggagcagaacacgccgcagaaacgttatatgtgcttccctgttcggagttggagctcccgaagcactggtcattggagtagtcgccttgttggtgttcggccccaagggtctagcagaggtagccaggaatttggggaagactttgcgtgctttccaaccaaccattagagagatacaggatgtatcaagggagttcaggagcactcttgaacgagaaatcggaattgatgaggtttcccagtcgacgaattatacacccacgaccatgaataacaaccaacaacctgctgccgactcaaatatcaagcctgcacctgcaccttacaccagcgatgaacttgtgaaagtaactgaagaacaaattgctgcatcagctgctgcagcttggaacccgcaacaacctgcatcgtcgcaacagcaagtgtacactactccgagtgaggacgctcctacatcaggaggaagcgatggtcctgctgctccagctcttgctgcgagtgactcggatccaaagcaagtgaatctggacaaggcggaaacacagagatgactccgcttaacagcttgacactggatgggatgagcacactgaacacgtcaggacgagcagtcttattttaattttgtaggcgatggacttcagattaaagccagttatttggactgctgcagctataatctatagagacataacactgtaaaaatagtagaatccgttttagattaaagccaaacgagatgagagcgttttctgtgtttactaggcttgttctgtagcagcatgcatgggcaggttcatacaaaaaggctatgtgtatgcgtaacataaccacgagtttatatggattaaatatatttagccacgttg

SEQ ID NO: 100501 - DNA, 931 bp, Zea Mays
atggggaaggaccgacccgagcgttctgtccggtacctgggtagtaagaagcaccagtcccttcctgctcccaagttcaaaaggacacaactgctgagattgctaagaaacaagagcaagaacaacaaaggtaggaaaaagcttctgaagttggttgatacaggctttgtagccacagtggaagtcttagccattctccgccaagtgccagcgctccctgaattgatgacaggcacaggagcaagcgatgacgagttacggaagaagctagataacaagttgaagacctgttccatcattactgaaaaggaaaaggaaaatgaaaaggaagaagaagaggaaaatggaaatgagaagagcaaggaaactggaaatgagactgaatatgaaaaggtgaagaacataaaactggttcacatagattatattttggagaaggctgaaactggcattcagttcgttggcaatgtcatgcgtagcagtagtcagataaggcgggcacactgttggtttccttgtgttgatagtgccagagaacgctgtccatttgatctagaatttacagttagcatggatttcattgctgtcagcaatggtgacttgctttaccaggtctctagtaaggaagatccttaaaaaagaacttatgtgtataaattgaacactccagttagtgcacagtggatatccttggttgttggcgcacttgaagttcttcctgacagaaatgacataaatgtctcacacatatgtttatcccctgctttggcaaagcttcagaacactattgcatttttccacaatgcatacagctgttatgatgactatctttctgcaccatttcccttaggtttatacaagcacatttttcttccatctgaaatgacaatattaccagcaagcttaggagcctccacatgcatcctcagtt

SEQ ID NO: 100502 - DNA, 2649 bp, Zea Mays
gagtggcgagacgttcacgggttagatctggcggtacggcgtcgcggatctgagcgaggtttcggtggagcgatcaggaggtggtcactatcttcgcctcatttcgagtagtttgggcgcctgtagtttgcctgtttccttttcggtgtctgatcaagaagatgatgtgctcagagggcttctagttgttgctgatatcttgtcttgtgttgtatcacccggaagctggaaaggagcgcatcactcctgctctccccttttactccttggttacttggtatttcttggatatccaggctggaaggggttagatccagttcctgcggccctagtaataaggtgcacttggggaaggtgccatgacctacttccccggtgaggtggtggagcacattttcagcttcttgccgtcgcacagcgaccggaacacggtctcccttgtgtgcaagttgtggtacgatgtcgagaggctgagccgacgaggtgtgttcgtggggaactgctacgctgtgctccctgagcgtgtggtgctgcgattccccaatgtaaaggcgctgacggtgaaggggaagcctcactttgcggacttcaaccttgtgccgcctgattggggtggctacgcggggccatggattgaagcaacagccaggagctgcctgagtcttgaggagctgcgcatgaagcggatggttatctctgatgagaaccttgaactgctagctcggacattcccaaaattcaaagtcctcgtccttatcagctgcgaggggtttagcacggatggtctagctgccattgccaatcactgcaagctcctgagggagttagatttgcaggaaaatgacgtggaggaccgtgggcccagatggctttccttccctgattcctgcacctcattggtttccttgaatttcgcttgcatcaaaggggaagtgaattctggtgcattggagagacttgtcgctaagtctccaaacctacgcagtttgaggttgaatcgctctgtttcagttgacacactctcgaagatactagagcgaaccccaaatttggaagacttggggacaggtaatttgacagatgagttccaagctgagtcctttgtcagacttactagtgctctggagaaatgcaaaaggctgaggaatttgtctggattttgggatgcttctcctatctttgttccgtttatctatccactctgtcatcaactaactggcctaaacttgagctatactcccacactggattattctgatctgactaaaatgatcagccgctgtgtgaaactccagcgtctttgggtactggactgcatttcagacaagggtttgcaggtggtggcctctagttgcaaggatctacaagaactcagggtgtttccatcagaatttaatgttgctggtgcttttacggtgacagaggagggacttgttgcaatatcatcaggctgcccaaaactgagctctttgctgtatttttgtcaccagatgaccaatgaagcactaactactgtagccaagaattgcccaagtttcatcagatttagactctgtatccttgagccaaagaagccggatgccatgacaggccagccgttagatgaaggctttggtgcaattgtccgtgactgcaaaggtctaagacgactgtcaatgtcaggccttctcacagacagggttttcatgtatatcagaatgtatgcgaaataccttgagatgctttctatagcttttgctggagatggtgataaggggatgatggatgtgatgaacggatgcaagaatctgaggaagcttgagattagagacagtccatttggtgattttgcactcttgggaaatgttgccaaatatgacacaatgcgatccctttggatgtcatcatgcaatgtcacattaaaggggtgccaagtccttgcatcgaagatgccgatgctcaatgtggagatcatgaacgaactagatggaagtagtgaaatggagaaccatggtaacctctctaaagtggataagttatatgtttaccgtacaactgctggagtgagggatgatgcaccaaattttgttcaaatattatagagctagctgcaattaccttggtatcttcccttcctacgagaatcgggaaaagccacactggtttgtgcccttatcctggagcaacatggccgggattcatcatcatctctgtaccaactgctcccctcttccagtgtctggtcatatggccacccaggccctttatcgccttgtgcattctcactcgagaggaggacagaatcagatgactttttttttcttcttttcacgccatgtaatctgtagtgtacctgtcttcatttgcttttcactttggcacggtggattgtgctgtcgcggtactgttctagtgttttgattcgtaaacctgagaactgtcgggacattccggtgacgatgatttctttcttgctcctgtgaatgcagtgtgtgtgcaaattttaggtttatactacatctctccacgtaaatttgctagatgtagccgactacccacgtagcggttcattaatgatcttggtttaattaatggctgagtattttttttctaatttatgtactttctctattttgtttacatattttattatattaggtttattctgag

SEQ ID NO: 100503 - DNA, 2551 bp, Zea Mays
cgagacgttcacgggttagatctggcggtacggcgtcgcggatctgagcgaggtaggctgtcgtttccccccctccggcgcctgttgcatttcccccctccggcgcgtgtctcgatatccttgcagttccctgtagttggcaagagctgaaggctacctaatctccatctgcaggtttcggtggagcgatcaggaggtggtcactatcttcgcctcatttcgagtagtttgggcgcctgtagtttgcctgtttccttttcggtgtctgatcaagaagatgatgtgctcagagggcttctagttgttgctgatatcttgtcttgtgttgtatcacccggaagctggaaaggagcgcatcactcctgctctccccttttactccttggttacttggtatttcttggatatccaggctggaaggggttagatccagttcctgcggccctagtaataaggtgcacttggggaaggtgccatgacctacttccccggtgaggtggtggagcacattttcagcttcttgccgtcgcacagcgaccggaacacggtctcccttgtgtgcaagttgtggtacgatgtcgagaggctgagccgacgaggtgtgttcgtggggaactgctacgctgtgctccctgagcgtgtggtgctgcgattccccaatgtaaaggcgctgacggtgaaggggaagcctcactttgcggacttcaaccttgtgccgcctgattggggtggctacgcggggccatggattgaagcaacagccaggagctgcctgagtcttgaggagctgcgcatgaagcggatggttatctctgatgagaaccttgaactgctagctcggacattcccaaaattcaaagtcctcgtccttatcagctgcgaggggtttagcacggatggtctagctgccattgccaatcactgcaagctcctgagggagttagatttgcaggaaaatgacgtggaggaccgtgggcccagatggctttccttccctgattcctgcacctcattggtttccttgaatttcgcttgcatcaaaggggaagtgaattctggtgcattggagagacttgtcgctaagtctccaaacctacgcagtttgaggttgaatcgctctgtttcagttgacacactctcgaagatactagagcgaaccccaaatttggaagacttggggacaggtaatttgacagatgagttccaagctgagtcctttgtcagacttactagtgctctggagaaatgcaaaaggctgaggaatttgtctggattttgggatgcttctcctatctttgttccgtttatctatccactctgtcatcaactaactggcctaaacttgagctatactcccacactggattattctgatctgactaaaatgatcagccgctgtgtgaaactccagcgtctttgggtactggactgcatttcagacaagggtttgcaggtggtggcctctagttgcaaggatctacaagaactcagggtgtttccatcagaatttaatgttgctggtgcttttacggtgacagaggagggacttgttgcaatatcatcaggctgcccaaaactgagctctttgctgtatttttgtcaccagatgaccaatgaagcactaactactgtagccaagaattgcccaagtttcatcagatttagactctgtatccttgagccaaagaagccggatgccatgacaggccagccgttagatgaaggctttggtgcaattgtccgtgactgcaaaggtctaagacgactgtcaatgtcaggccttctcacagacagggttttcatgtatatcagaatgtatgcgaaataccttgagatgctttctatagcttttgctggagatggtgataaggggatgatggatgtgatgaacggatgcaagaatctgaggaagcttgagattagagacagtccatttggtgattttgcactcttgggaaatgttgccaaatatgacacaatgcgatccctttggatgtcatcatgcaatgtcacattaaaggggtgccaagtccttgcatcgaagatgccgatgctcaatgtggagatcatgaacgaactagatggaagtagtgaaatggagaaccatggtaacctctctaaagtggataagttatatgtttaccgtacaactgctggagtgagggatgatgcaccaaattttgttcaaatattatagagctagctgcaattaccttggtatcttcccttcctacgagaatcgggaaaagccacactggtttgtgcccttatcctggagcaacatggccgggattcatcatcatctctgtaccaactgctcccctcttccagtgtctggtcatatggccacccaggccctttatcgccttgtgcattctcactcgagaggaggacagaatcagatgactttttttttcttcttttcacgccatgtaatctgtagtgtacctgtcttcatttgcttttcactttggcacggtggattgtgctgtcgcggtactgttctagtgttttgattcgtaaacctgagaactgtcgggacattccggtg

SEQ ID NO: 100504 - DNA, 537 bp, Zea Mays
atgatcactaaatcgtggacgctccatggtatatctctcagagagctggtgcccaacctgaaagccgatggcctcaatgcggcgggcagcaagctctggcttggcggcatagaggccaccgcagtagacagccaccatctccatgaccaccgcatcaacacagctctccgcgatagccatcaggtttatcaaggatgtcttcacgagaagggcgtaacttcggcgctcctcggcaggcacaagcggaggtcagcgcggagatgggtcaatttgcagctctggacgtcgatttggccggagacgggtcgaattgctatgcagcgcgtcgatctgctcggagacggctcgatttacggcgtacggcgccgattcgccgaaaccaagggtggcggagcacgtttgatctgcgtgggtgcctgccgtcttcttcctctccaccaatctactgcagatacttgggcctgcctgctgcccacggttggaacgaggacggaggcggcggaggaaggtacgggcgggacgggggacgggggctag

SEQ ID NO: 100505 - DNA, 3408 bp, Zea Mays
attcccactaccgcggcaggcagctaccccctccctctcgtctcctccgccacctcttctcgcgtctagggtgcgcccgcctcgctggcgtagggtcgggacggttctgccggtgcgagctccacgacccctctgcgggagacgaaacaaaggcgtgggcttggtagatacaggtctgggattgccttttcctagttcaacatggagggcgctcttgttcagtctgctattgttccagccgtttacagaagcagctcaggtcggttccgtgtgcgtgcaagggccagaacaaatgctacaatggtgcggaatacgccaacaaggactcttactcttggtggcttccaagggctgcgtcagacaaactttttggatacgaggtctgtaattaagcgtgactttggatcaatcgtggcaagccagattgcaaggccacgcgggtcagcctcaagaggggtggtccgtgccatgtttgagcgcttcactgagaaagcaatcaaggtgattatgcttgcacaggaagaggcaaggcgcctgggacacaacttcgttgggacagaacagattttgctggggcttattggtgagggcacaggaattgcagcgaaggttatgaagtctatgggaatcaatcttaaggatgcccgagtggaagtcgaaaagataattggacgtggcagtgggtttgtggctgttgaaatcccattcacacctcgagcaaaacgtgtattggaattgtcccttgaagaagctcgtcagcttgggcataattatataggatctgaacacttactccttgggctacttcgtgagggtgaaggtgttgctgctcgtgtgcttgaaagccttggtgctgatccaaacaacatccgtacccaggtcataagaatggttggggaaagcacagaagctgttggggctggagttggtggaggaagcagtggccagaagatgcccacacttgaagaatacggtactaatttgacgaaattagcggaagagggcaaattggacccagttgttggtagacaggatcagattgagcgcgttacccagattttaggcaggaggacaaagaacaacccctgcttaattggagagcctggtgttggaaagactgctattgctgaggggcttgctcaacgtatttccaatggtgatgttcccgaaacaattgaaggaaagaaggttattactcttgacatgggcctccttgttgctggaaccaaataccgtggagagtttgaagagagattaaagaaacttatggaggaaattaagcaaaatgaagatattattctctttattgatgaagtgcacacactgattggagcaggtgcagcagaaggtgcgattgatgctgctaatattttgaagccagctcttgcaagaggtgaactgcagtgcattggtgccacaacactggatgagtataggaagcatatagagaaagatcctgccttggaaagaaggtttcaaccagttaaggttcctgagcctactgttgatgaaacaatacagatcttaagagggctccgtgagagatatgaactccatcacaaactgcgatacacagatgatgctttaattgctgctgcacagctgtcttatcagtatatcagtgatcgtttcctgcctgacaaggccattgacttgattgatgaagctggatcccgtgttaggctgaggcatgcccagctccctgatgaagccaaagagctggacaaagagctgcgacagataaccaagcagaaaaacgaggctgtacgcggccaggattttgagaaggctggtgaattaagggaccgagaaatggaactgaaggctcaaattacggccattattgacaagagcaaggaaatgattaaagcagagactgaatctggtgatgtcggtcctcttgttactgaggcagatattcaacatattgtctcctcttggactggaattcctgtggagaaagtgtcgtctgatgagtctgaccgtctcctaaagatggaagagacactgcatacacgtatcattggccaggacgaggctgtcaaagctattagccgtgctatccgccgtgctcgtgttggcctgaagaatccaaataggccaattgccagcttcatattctctggaccaactggagttggcaaatcagagctagcaaaggctctggcagcctactactttggctcagaggaggctatgattaggcttgacatgagtgagttcatggagagacatactgtctccaagcttattggatcacctccaggttatgttgggtacactgagggaggccaactaactgaagcagtccgtcgccgcccatacacagttgttctctttgatgagattgagaaggcacatcctgatgttttcaacatgatgcttcagatattagaagatgggcgattaactgatagcaaggggcgcacagttgacttcaaaaacacactattgatcatgacatctaatgtgggaagcagtgtcattgagaaaggaggccgcaagatcgggtttgaccttgactatgatgagaaagacaccagctataacaggatcaagagcctggtgaccgaggagttgaagcagtatttccggccagagttcttgaacagattggatgagatgattgtattccggcagctgactaaattggaggtgaaggagattgctgacattatgctgaaagaagtgtttgacaggctgaaggccaaggagattaatctccaggtcacggagaagttccgagatagagttgttgacgaaggttataacccgagctatggtgccagacctttgcggcgtgctatcatgaggcttctggaggatagtctggcagagaagatgctggctggtgaggtgaaagaaggtgactctgccatcgttgatgtggattcagatggcaaggtgatagtcctgaatggtggtagcggtgttgctgagccactggaacctgctctcagtacctaaccgaggtcaaaatcatcattggtccgaaatatggccttctttacaagtcagctgggtttctcgtgatggtaaaaactagactgacattacttggccgcccattagttgctttatctttcgtttattttcttttttgttggaagtgaggcagtagggttgctatggaaatgaatagatggagaagcatttagcagacatataatatatgctagacttttgagttgccttgttttgggaagaaacttggaattttcagtttgatgcacttgtattattattaggccttggtagcaacaagatacggatgtcgtctctacgtttgctgttgtacttcagtgtaacttgcctcccgaatgtatgagtattatttatcaagtcccaaataacagtgacggattgctacattctgttttttttgtttgtggatctgaaaattggaat

SEQ ID NO: 100506 - DNA, 1062 bp, Zea Mays
tttttggggggaaagggccaaggagcgagagctcgccgtacgtgagccgggggcggcatgtcaaacgctggcgaggcgagaggagtgggaacgggccgcgggtcgcggctgccgcggtggacgcggcaggagatactggtgctcgtcgaggggaagcgggtggtggaggggagcgggcgcggccggggccgcggccgggtacgcggaggcgagggcgcggagccgaccaagtgggccgcggtggcggagtactgccggcgccacggcgtggaccgcgggcccgtgcagtgccgcaagcgctggagcaacctcgccggagactacaagaagatcagggagtgggagcgcgggtacgcggccaggaaggaggcctccttctgggacatgcgcaacgacgcgcgccgggagaggcgcctcccgggcttcttcgaccgggaggtctacgacatcctcgagggccgcgccggcggtaatgcggcggcgctggaggacgtggacggcaaggaggaggaggcgaaggcggtggtccacgctggccgcgcggtccaacggggtggcctcttctcctcgtctgaggacgaggatgaccaagaagaagacgcggccacgccaagcccgacgccggcgccggctgcggtggccgtgccgatccccggagagcaagctgttgctgttccatccttcctagaaatggcgcgtgcctcctctctttcagtgcacgttacagagaagacgactgatgtgcccaggcaagcgagctccgagcaagcaggcgcgtcaaacgaaaagcagtcggagcagatcaccgaggactcaccaacgcagtgtgggcagaagaggcagcgcagcgacgacaatgcctctggagaagccacgaccaacctgcaggggcagctggttgagatcctagaccggagcagtcagatggtggcggcgcagctagaggcgcagaacgtcaacagccggttgaacagggagcagaggaaggaccaagtgagcagcctgcttggtgtgcttggcaaggtggctgatgccctctacagaattgctgatgagctgtag

SEQ ID NO: 100507 - DNA, 657 bp, Zea Mays
atggcactgccatctacctcagattcggcccttacccttgctctggagaaccagacctgctccctgcttgccgagctggacaagcgtatccagtccatggatagcaagtgggagtcgtgggtgtccgtcctagagaacacggcgacggatgtagccagattcgtcaccgaattttccactgccctccgcgccgatgtggaggcccatctcacagcctcggatgccgctacagaagggtgtctacaccacttcgaagcggagactagcaaccgcatcgctgctctcgagtccgcgatgcagatgttcgacttttggcgtccccgagttgactcttccatcgactcgctccagtcgaacatggactggatgcacgccgagatcaccaagatggatgctcagtggtcccatggagcgcgcgttggcggcgccaccatgccaggtgtccttggttctcccggttcccttgctgcgtcgcccagcatcttcggaactccaggcgcgttcacctccactggatccggtccggggcgcccacctgccaccgtcgactacactgatggccctagattcgggcacggcttcgacagctacctccgggatagtggacttcggcatccaactgccgatggccgctacccgatcacggatttattatga

SEQ ID NO: 100508 - DNA, 563 bp, Zea Mays
ggataacttttgctattattccaaagaagttgcgccagaggcacgttacaacatcaggtcggaagcactacggacaatatcatccacagacacctatgcacaatgcaacccgctgcatcgtcataatactccaacacctcccttagactctcgtccggtaagaccgaaggaggacctatgactctccgtaggttacaaccggtctagatctctccaataagcagtgtcgtggcaacaccctggcgagcgccgagaccagcaacgccccaaacacaatgtgggacatcattcaaatgtcccaccagagaggagccacgagccttgataaaaaaccagaacttgacctaaacgagagcgtagctcctctagctcggcctccagggctgttagaagagaaaacgataatgccaagggaaccaccgaggaatctagaaaacaaggggtgaatgccttactggacacatgaccatcagactcggcaagtcgagaccggagcagctcgacctcggcctcggcagcctcctacaccatacgaaaaactccataactctcccgggaagtcc

SEQ ID NO: 100509 - DNA, 939 bp, Zea Mays
caggccagatttgccaccctcgtctcaccctccctccctcacacaaataataaggaaaggtcccgcccttttcctccgacatccacaaggggggaggggaaaacacgtacattcacccggcggcaataatggcctcggttccggctccggcgacgacgaccgccgccgtcatcctatgcctatgcgtcgtcctctcctgtgccgcggctgacgacccgaacctccccgactacgtcatccagggccgcgtgtactgcgacacctgccgcgccgggttcgtgaccaacgtcaccgagtacatcgcgggcgccaaggtgaggctggagtgcaagcacttcggcaccggcaagctcgagcgcgccatcgacggggtcaccgacgcgaccggcacctacacgatcgagctcaaggacagccacgaggaggacatctgccaggtggtgctggtggccagcccgcgcaaggactgcgacgaggtccaggcgctcagggaccgcgccggcgtcctgctcaccaggaacgttggcatctccgacagcctgcgccccgccaacccgctaggctacttcaaggacgtgccgctccccgtctgcgccgcgctgctcaagcagctggactcggacgacgacgacgaccagtaaactataccacggcggcgtcgcggacatgctgcacaaaactacaacgatacagagcgaacgcatggcatggatagcagtatctacggaaagaaaaggaagaaaaggaaaataaaaaatgtatcagagtgcttgattcacttgctgctgtcacccattccccgttcttaacataacatgtgggccggcttggcccaggcacaagcctatctacgcatggcctacggtccgctaaaatatagccctaattatgagccgtgttgtgccgtcacatggatcgatccagcggcatacgatacaa

SEQ ID NO: 100510 - DNA, 723 bp, Zea Mays
cggcatccatttatctcacaatctaatatctgtgtcaaccaatatatgcaggaaaacaaagaaggccttgaactattgaaggcagccatagaaaaggctggctacactggaaaggtggtcattgggatggatgttgctgcttctgagttcttcggtgagaaagacaagacttatgatcttaatttcaaggaggagaacaacgatggctcaaacaaaatttcaggcgacagcctgaaagacctgtacaagtcctttgtttctgagtaccctattgagtcgattgaagacccatttgatcaggatgactggagcacttatgccaaactcactgatgagattggacagaaagtgcagattgtaggagatgatcttctcgttaccaaccccacccctttgcaagattgccacacttctattctaattttggaccaattagttcaaaaccatgtgcccttgcaggtgaaggttctcagatccaattcggaaagtgatatgaatagagtgggacaaagcagggttgccattcgtgatggcattactatggatggtggtggaggtgtttccattcctggaacattccacattgcaacttataggacagatgcaaggattcttcgaaggaactttgtgattgatctattaagttacgaggataattcatgccgctatttaatccctgcaaacatacaacagagacttgtcaatatctctataaaggaatag

SEQ ID NO: 100511 - DNA, 837 bp, Zea Mays
ggtttccctcccgaattagcggctgagctccatccagaccttgcaaagattggacctttgggggcggttcgctcactcctagcttgcctcgctatctggtctttgagcttctcgtgctacgagccgagggaagccatcttttcctgctcggttctgtcgtgcaaacgagaaaggttgagctgatctgctgctagctggggatcctgaggctaccgcattcttcttgtctgggtgcacggtgcatgggcagtgggtgaactggtagagagcaagatggggaattgcatcgacaccacggcgcgggtggatcacagcatgaacaatgctgcctgtgaacccatcaaaagtgacagcaagacaagtttgtcgtcagtcccttccacaattaagagcaactcaagtcgttcaacgctgactcttccatcaatgagagatcgaaatgagcttcctactcctcggatagaaggtgaaatcttgtcatcttctaatttgaaggcattcacgttcaatgatctgaaaaatgcaaccaagaacttccgaccggacagccttcttggggaaggagggtttgggcatgtctacaaaggttggattgatgagcacacgcttgctccttcaagacctgggagtggtatggttgttgctgtgaagaagcttaaaccggaaggttttcaaggacacaaggaatggctgacagaggttgattaccttggccaacttcaccacaagaatcttgttaagctcattggttattgctcagatggtgacaaccggcttctggtgtatgaatttatgcccaagggaagtttggagaaccatctgtttagaagtgtgtgc

SEQ ID NO: 100512 - DNA, 535 bp, Zea Mays
gccgcgataccctgtggatcacaattagcaaatcacccatagataacagcgatcgagtcagcgatggccgctgtccgtcatgccactgtcatcttcctcttcctcaccatcaccttcgccgccatggccaatggcgctggagagaccgacccggaccccgcgcgcgtcgagaaccccgtggactgcatgatagggtgcgcctcgcagctgatcggctacgccatgcagacgatggagtgcgccgcggggtgcgcgggaggagggagggggaatgccgttgaggagaagcacgcggccgtctttcgtgaggccggccgtcgtcagcacgggctggagaattagtgtactgcaatacgatgtgattaatgtgaatcttttttttttctgaaaactgctatatactgtattcgcatcctgccccggtagcggaagaaaattaggaggggacggtcctcatccatagagcaaccgtggacatctctatggtagatttgcgacagttaaaaatgaattaaattgtgtcgtgggtttgcaa

SEQ ID NO: 100513 - DNA, 386 bp, Zea Mays
accaccataacaaatgtattgaacccaacataattttatcacaggttcaacaatattcaacattaaatgacaacattatgccttcaaatcacacaaaacatagcattgattcttagggttagcaaatagcgagagcaaattcattttatatgagacatataaatccggacccacgtatcatatattagcgggttccccatcgggtagcgggtatggggcaacagagaacatacccacgcccaccgtacccgatgggcataacaaatgacccaataaaatacccatgggtatcaaaatccgccatacccatgccctaatagggtttttacccatcgggtttcgggtttcgggtacccattgccatccctaatgcgctgggccgaagc

SEQ ID NO: 100514 - DNA, 340 bp, Zea Mays
tgcatatgaagacgtcgtcgtaccgccgggtgtacaggaagcaattcaaatcagttgtgttggttatccgacgaagaggacattaagatgagttcattgatcggtttggaatgcttgcaccagaccttgacgacagtgggcttaatgcatttgcaacgatgagaaggccacctgcagtgatatgtgatagaatggtattgaaagggtatcagttgcaaagggaatctcaattaaaaggattgacgagcttaagtttctttgtgaaccagggatgtagattctaaggaaactcatgatcgtgtgcaagaaggtgaaaacaaggttttctcggcttttgggt

SEQ ID NO: 100515 - DNA, 1038 bp, Zea Mays
gatcgatcactgaccacgcaccgcaccggcggcgggatcctgatccgcctctgctcgctgtgctcggccggctcaccgccgggagtgtcacctgcgcatttctttcagagtcggtcggcttgcaaagcaaagagacgatggcgccgacgacgacgctcatcgtcaccgtgaacctggaatgctgccgctgcagcagcaagatccagaagatcctctgcggcattcagcaagaaggagagttcaccatcgagaagatcgtgtacgagaaggacaaggtgttggtcacaggcccattcgacgccgacaagctgtcctgcaagctgtggtgcaaggcgggaaggatcatcaaggacatccaggtcgccaaaccaaaagacgaaaagcctaaaaacccttcatgcaagctggtatacccttattacccttgctaccctttccagctgtgcccgcagcagcagcccggtgcatggccctgcagcggcggctgcccacatcctcactgtgggtgccagtccaagccgccgccgccgccggttccaccaccacctccacctccacctccgccgcccatgccgccggcgtgccagtgctccacgtggccgtcgtgctactgcggcggctacccgccgcccatgccgccgtcgtgccagtgctccacgtggccgtcgtgctactgcggcggctacccgccgcccatgccctacccgatgatcgtctgcgatgacagcccgccctatggcgcctgcaccgtgatgtaatgctgctgctactcttttccctgccgtaacaaattaaagcagggccggggtcatatatcgcagcctgtattcatgcctacatatatacgagagctagcggctctccattacctaaagaaaatgttctcctgtgtatttcattgccagtactgtatcaattagtatagttaccggtgtgtaccataaacctcacggcagttcatcaattatatgttgttttccgcccagaatactatatatgtttctaggaatacatttctgagatgcatttttttcatct

SEQ ID NO: 100516 - DNA, 152 bp, Zea Mays
gtgctggcccggcccgacacgattatttttttattttgcaaaaaacgtatatacctatatacaatttatattcaatattaaaaatatcttagcgtgatgttctactagttagatagtttcatccagtgtctcccgcccttcttccatcaggg

SEQ ID NO: 100517 - DNA, 2153 bp, Zea Mays
ccaggtttctctctcctcactcctccttcgcttgtcgctccgcttcaccccagcagggcagagccccgctctcccttcacaccaaagatttcctcttccgcgtgcgcttccctttgccccgctctcccccagcctcgctcgccatataatacgggccggccggccggccagctgggtccccgcggatgggctcggtctcgcgaggctagggtttggtcggtcgtctcgccggcgtcgaggccgccagcgctgctagctagctctctcgcgttagggttccccgtagccatggtgctgcagcgcttctcgtggccgtacggcggccggagcgccaccttctgcggtagcttcaccgggtggagagagtgtcccatggggctggtcggggccgtgttccaggtcgtcttcgatctgccccccggagtttaccagtaccggtttttggttgatggtgtctggaggtgtgatgagacaaaaccctttgtacgtgatgaatatggactgatcagcaatgaagtgcttgtggaaaacaatgtacaacctgttgtgcagccagagccttctatcagaggaactaatatggataagggtaccattttgaaaacaatgcccccggagccatcatctcagaacccaagcatgcaaatagcagttatccgccatgtggtctctggaatattattacacaataccatatatgacgttgttcccctttctagcaagttaacagttttggacactcagcttcctgttaaacaagcatttaaaataatgcatgatgaggtatgtatgttactgtgcttgctagagttgcttcaaatagttcactttccctctatggtgcttgtttgctctcatttcaactttgctctgtttttaatttcattttgaagaatttttaaaggtgtgctagcaattatttgcctttttaagtagcagtttaatttgttttcctattatgttttgcagtttaaaaacacaacaaaatcgctcctagaagcaggcacttctttcatctgcactgcatacgtggcatcagtttaataatttaagaatagcttcaaaccttttgtgtctcatagggtcttgctctggttcctctttgggatgaccgtcagggaaccataacaggcatgctcactgcatcagattttgttttaatcttgagaaaggtgggtggaataaattactttgtttcttcttggaaggattttatgttcttactaattatcatttgctatgcagttgcagagaaacattcaagttattggcaacgaagagcccatttctgcttggaaagaagcaaagctacagttctatggtgggcctgatggtgctgccatgcagagaaggccattaatccatgttaaggattcagataatttagtggatgtggcactgactataatcagaaatgaaatatcttcagttcctatctttaagtgcatggcagattcatcaggggtgcctttccttaatcttgcaaccttacaggggatcttgaaatttctttgctcgaagctacaagaagaggctgagggctgttcccttctgcacaatcagcttctcagtattcctattggtacatggtctccacatacggggaggtcaagtagcaggcaactcagaactttgctactgagttctcctctaaatacctgcctggatattctgcttcaagatagagtaagctcaattcctatagttgatgacaatggatccctccgtgatgtctactcactcagtgatatcatggctctggcgaagaatgatgtttatgctcgcatcgaacttgaacaagtgaccgtacaaaatgctttggatgtgcaataccaggtgcatggccgaagacagtgtcatacttgtttacagacgagtaccttgctggaagttttggagggattgtccattccaggagtgcgacggcttgttgttattgaacaaagtaccagatttgtggaaggaatcatctcattgagagacgtatttacatttctccttggatagcatgtgtagccattccatacatgaaaaagcttgctgtacttggttcaaacgaaataaaaagcttacaaatgtgatagtcatcttcttgtttccatcttgttttggttgatattatgcctcagacactgcatatttaaactgtgccg

SEQ ID NO: 100518 - DNA, 1877 bp, Zea Mays
ccaggtttctctctcctcactcctccttcgcttgtcgctccgcttcaccccagcagggcagagccccgctctcccttcacaccaaagatttcctcttccgcgtgcgcttccctttgccccgctctcccccagcctcgctcgccatataatacgggccggccggccggccagctgggtccccgcggatgggctcggtctcgcgaggctagggtttggtcggtcgtctcgccggcgtcgaggccgccagcgctgctagctagctctctcgcgttagggttccccgtagccatggtgctgcagcgcttctcgtggccgtacggcggccggagcgccaccttctgcggtagcttcaccgggtggagagagtgtcccatggggctggtcggggccgtgttccaggtcgtcttcgatctgccccccggagtttaccagtaccggtttttggttgatggtgtctggaggtgtgatgagacaaaaccctttgtacgtgatgaatatggactgatcagcaatgaagtgcttgtggaaaacaatgtacaacctgttgtgcagccagagccttctatcagaggaactaatatggataaggatgcccccggagccatcatctcagaacccaagcatgcaaatagcagttatccgccatgtggtctctggaatattattacacaataccatatatgacgttgttcccctttctagcaagttaacagttttggacactcagcttcctgttaaacaagcatttaaaataatgcatgatgagtttaaaaacacaacaaaatcgctcctagaagcaggcacttctttcatctgcactgcatacgtggcatcagtttaataatttaagaatagcttcaaaccttttgtgtctcatagggtcttgctctggttcctctttgggatgaccgtcagggaaccataacaggcatgctcactgcatcagattttgttttaatcttgagaaagttgcagagaaacattcaagttattggcaacgaagagcccatttctgcttggaaagaagcaaagctacagttctatggtgggcctgatggtgctgccatgcagagaaggccattaatccatgttaaggattcagataatttagtggatgtggcactgactataatcagaaatgaaatatcttcagttcctatctttaagtgcatggcagattcatcaggggtgcctttccttaatcttgcaaccttacaggggatcttgaaatttctttgctcgaagctacaagaagaggctgagggctgttcccttctgcacaatcagcttctcagtattcctattggtacatggtctccacatacggggaggtcaagtagcaggcaactcagaactttgctactgagttctcctctaaatacctgcctggatattctgcttcaagatagagtaagctcaattcctatagttgatgacaatggatccctccgtgatgtctactcactcagtgatatcatggctctggcgaagaatgatgtttatgctcgcatcgaacttgaacaagtgaccgtacaaaatgctttggatgtgcaataccaggtgcatggccgaagacagtgtcatacttgtttacagacgagtaccttgctggaagttttggagggattgtccattccaggagtgcgacggcttgttgttattgaacaaagtaccagatttgtggaaggaatcatctcattgagagacgtatttacatttctccttggatagcatgtgtagccattccatacatgaaaaagcttgctgtacttggttcaaacgaaataaaaagcttacaaatgtgatagtcatcttcttgtttccatcttgttttggttgatattatgcctcagacactgcatatttaaactgtgccg

SEQ ID NO: 100519 - DNA, 1781 bp, Zea Mays
ccaggtttctctctcctcactcctccttcgcttgtcgctccgcttcaccccagcagggcagagccccgctctcccttcacaccaaagatttcctcttccgcgtgcgcttccctttgccccgctctcccccagcctcgctcgccatataatacgggccggccggccggccagctgggtccccgcggatgggctcggtctcgcgaggctagggtttggtcggtcgtctcgccggcgtcgaggccgccagcgctgctagctagctctctcgcgttagggttccccgtagccatggtgctgcagcgcttctcgtggccgtacggcggccggagcgccaccttctgcggtagcttcaccgggtggagagagtgtcccatggggctggtcggggccgtgttccaggtcgtcttcgatctgccccccggagtttaccagtaccggtttttggttgatggtgtctggaggtgtgatgagacaaaaccctttgtacgtgatgaatatggactgatcagcaatgaagtgcttgtggaaaacaatgtacaacctgttgtgcagccagagccttctatcagaggaactaatatggataagggtaccattttgaaaacaatgcccccggagccatcatctcagaacccaagcatgcaaatagcagttatccgccatgtggtctctggaatattattacacaataccatatatgacgttgttcccctttctagcaagttaacagttttggacactcagcttcctgttaaacaagcatttaaaataatgcatgatgagggtcttgctctggttcctctttgggatgaccgtcagggaaccataacaggcatgctcactgcatcagattttgttttaatcttgagaaagttgcagagaaacattcaagttattggcaacgaagagcccatttctgcttggaaagaagcaaagctacagttctatggtgggcctgatggtgctgccatgcagagaaggccattaatccatgttaaggattcagataatttagtggatgtggcactgactataatcagaaatgaaatatcttcagttcctatctttaagtgcatggcagattcatcaggggtgcctttccttaatcttgcaaccttacaggggatcttgaaatttctttgctcgaagctacaagaagaggctgagggctgttcccttctgcacaatcagcttctcagtattcctattggtacatggtctccacatacggggaggtcaagtagcaggcaactcagaactttgctactgagttctcctctaaatacctgcctggatattctgcttcaagatagagtaagctcaattcctatagttgatgacaatggatccctccgtgatgtctactcactcagtgatatcatggctctggcgaagaatgatgtttatgctcgcatcgaacttgaacaagtgaccgtacaaaatgctttggatgtgcaataccaggtgcatggccgaagacagtgtcatacttgtttacagacgagtaccttgctggaagttttggagggattgtccattccaggagtgcgacggcttgttgttattgaacaaagtaccagatttgtggaaggaatcatctcattgagagacgtatttacatttctccttggatagcatgtgtagccattccatacatgaaaaagcttgctgtacttggttcaaacgaaataaaaagcttacaaatgtgatagtcatcttcttgtttccatcttgttttggttgatattatgcctcagacactgcatatttaaactgtgccg

SEQ ID NO: 100520 - DNA, 753 bp, Zea Mays
tcagtgccgatacttgatgaaaatgatgagcctgaatcccctaacagaccaagtggattcattttagaggagttaggaggattgaatgaataagagatggttcttttaaattctaggattggttctagtagggaaaatggtaggaaaaggaatgttgtagaagaagatattggagatgatttcttatcagatagtattgagggagggaggtagccccaacctacaatgaatcaggtgatagcgactctaatgatggtgagttcaattttgagttaattatgcactatttgtcatgtcctttttatgattcaaatatcattgtgaaaggtggtggtgatgacgaagatggtgaacctagtggtccatgttttgtagctaggacacaacctagttttgtaggtcaagatgaacaaacagcgcctctccgtccaagatcaaaaaggcagaagaagctctccatcaagggcctgtacatgcttgagaaggttaaatctaatcttcaagcacaagaatatggcgtatacatggactgattcaatggcaagattttgaacatgtggctctattatatcaattgtgtgctctgtttcagttttagcacaatattgccgccatatttggttcatgtggcctaacaatatttataactgtgattgatttctatgcattatttgaactatggactaccaaatatttgtgactcaccactagtgttatattcaccggtgcatggatgttgccaaagaactttat

SEQ ID NO: 100521 - DNA, 2014 bp, Zea Mays
acggcccatctggccatccggttagcaagaccaacaaatgcacactgatacgttcccttcgaacccacctcccatggccaccgtcgactgccccctgccctctcccgcggacctcgacgacaacggattcccggctctaccctcctcccccgctgcctgtagcagcggcttcgcggaggacttctaccgcagcggcaccgactggtcctccttacgcgcccctccgccgctggggccgcccagaagggcacccggtgtgaaggagagaggaggcggctcggccgtgcagagcagcctcttccaggcgtgggggatcgagaagccgcggcgggacgggcgtggggctggggattcatcgcttgtgcagaggagcctcttccaggcatgggggatcgagagaccgcagagggagggtctcggggctggagattcctccccctcctcctccctttccggttctttgttggcaaggaagcggaggcgaggaagcaccgaggaggagcgggtggcggccaagaagcccctcgcgtgccccttctacaagaagattcctggcacaccattcacggtggatgcatttcggtatggacaagttgaggggtgctcggcctatttccttagccactttcatcatgaccattacggtggattaaccaagaaatggtgccatggccccatctattgttctgcactcactgcacgcctagtgaagatgtgcttgtcagtaaattccgactatatctgtcctttggagcttgataccgagtatgtcatagagggagtgacagttaccttgctggaggccaaccattgccctggtgcagctctaatccacttccgactaagtgatggaaagacctgtctccacactggggattttagagcatcaaaaactatgcaatcgcatccacttctccagagaggccgagtaaatttggtttacctggacacaacatattgcaatcccaagtacaagttcccaccccaggaggatgttattgattttgttgtgagaaccactcgaagatatctaaagaaacaaccaaaaaccctcattgttgttggggcatatagcattgggaaagagaatgtgtatctagcaatttcccaagctttagaggcccatatatacactgatgcatcgagaaggcggattctctactcatttggctggccagatttgtccaaaaggctatgttcatgcaatcaaagttcatcacttcatgttctgccccttggatctataaatcatgagaacttgaagaagtacttggagactcttaatggaagattcctagctgtgctggcttttcggcctacaggttggactttctctgaggcaactggaaagcatcttgacctaataaaaccaagctctaatgccaatgtaacaatctatggtgtgccttatagcgagcattcaagtttcactgagcttagggattttgtgatgtttctgaaacctcaaaagataattcctactgttaatgttggcaatgccacaagccgagataaaatgcaagcacatttccgggaatggctgaagagcccgtgataaatatatcctgatcatgtttttttttctatatcggcgtcaactcgactccactcaatgaggtaccgctgtataccatccttacactcacagttcactataacgcctcttttcttcactttatttgttggagttcaacgaatgttgattcttttatgccagtgacacagtcatggtacggaaaagaagtggatatatttttaaaggttggtttgcttggtactaaaaatgctatgtttagagtaccacttttcccaacattattccgagattcgttttgtggaacttatctcatttgagaggtaaatgtgttgtttctcgcttgtctggcatttctttgcaagggaactgtaagatgaagaaatattgatttgaattactgtttatcaaaacccattatcagcaacacatttgttgtctccccatgttcaatcgaaatacaagatttcactggctaga

SEQ ID NO: 100522 - DNA, 1865 bp, Zea Mays
acggcccatctggccatccggttagcaagaccaacaaatgcacactgatacgttcccttcgaacccacctcccatggccaccgtcgactgccccctgccctctcccgcggacctcgacgacaacggattcccggctctaccctcctcccccgctgcctgtagcagcggcttcgcggaggacttctaccgcagcggcaccgactggtcctccttacgcgcccctccgccgctggggccgcccagaagggcacccggtgtgaaggagagaggaggcggctcggccgtgcagagcagcctcttccaggcgtgggggatcgagaagccgcggcgggacgggcgtggggctggggattcatcgcttgtgcagaggagcctcttccaggcatgggggatcgagagaccgcagagggagggtctcggggctggagattcctccccctcctcctccctttccggttctttgttggcaaggaagcggaggcgaggaagcaccgaggaggagcgggtggcggccaagaagcccctcgcgtgccccttctacaagaagattcctggcacaccattcacggtggatgcatttcggtatggacaagttgaggggtgctcggcctatttccttagccactttcatcatgaccattacggtggattaaccaagaaatggtgccatggccccatctattgttctgcactcactgcacgcctagtgaagatgtgcttgtcagtaaattccgactatatctgtcctttggagcttgataccgagtatgtcatagagggagtgacagttaccttgctggaggccaaccattgccctggtgcagctctaatccacttccgactaagtgatggaaagacctgtctccacactggggattttagagcatcaaaaactatgcaatcgcatccacttctccagagaggccgagtaaatttggtttacctggacacaacatattgcaatcccaagtacaagttcccaccccaggaggatgttattgattttgttgtgagaaccactcgaagatatctaaagaaacaaccaaaaaccctcattgttgttggggcatatagcattgggaaagagaatgtgtatctagcaatttcccaagctttagaggcccatatatacactgatgcatcgagaaggcggattctctactcatttggctggccagatttgtccaaaaggctatgttcatgcaatcaaagttcatcacttcatgttctgccccttggatctataaatcatgagaacttgaagaagtacttggagactcttaatggaagattcctagctgtgctggcttttcggcctacaggttggactttctctgaggcaactggaaagcatcttgacctaataaaaccaagctctaatgccaatgtaacaatctatggtgtgccttatagcgagcattcaagtttcactgagcttagggattttgtgatgtttctgaaacctcaaaagataattcctactgttaatgttggcaatgccacaagccgagataaaatgcaagcacatttccgggaatggctgaagagcccgtgataaatatatcctgatcatgtttttttttctatatcggcgtcaactcgactccactcaatgagtgacacagtcatggtacggaaaagaagtggatatatttttaaaggttggtttgcttggtactaaaaatgctatgtttagagtaccacttttcccaacattattccgagattcgttttgtggaacttatctcatttgagaggtaaatgtgttgtttctcgcttgtctggcatttctttgcaagggaactgtaagatgaagaaatattgatttgaattactgtttatcaaaacccattatcagcaacaca

SEQ ID NO: 100523 - DNA, 2427 bp, Zea Mays
ggtgcctgttagttttttctcatttgctatttatctgtgaacactgttgtcaagttcaatatgaatctatagttctatacagcctttgtacactaaacacggccattgtttgactatttgttagtcaaattttgcaaagttacattttctgaaacagcatgttctatacctttgtgtatggagggagtagtatcttggtactgtaatgccacttcaaacagtatttctatatgcaatcgttattttaaactagttacctgccactgtttgaatgttgttgttactagtcctttctgtttcatttttctttgtctatttcatagcttaatgcctacatactctggtttgtaggtgtatggaagcatgccaagagtgatgggcatgaggactatggtctccttgttagtgacaaagcaaggaaatacgccataatcaaggagcttgatgagccagttaccttaaatgatgggacagtggtcctgcagtttgaagtgagacttcagaatggccttgaatgtggaggtgcctacattaagtacatccgccctcaggatgctggatgggatgccaaggagtttgataatgagactccatacactattatgtttggtccagataaatgtgggtcaaccaacaaggttcatttcatccttaagcacaagaatcctaagactggaaagtatgttgagcatcacctcaaattcccaccttctgtcccatacgacaagctctctcatgtctacacagctatcttgaagccagacaatgaggtcagaattttgatcgatggggaagaaaagaagaaggcaaacttcctttctgctgatgactttgagccagcacttatcccatccaagaccattcctgaccctgatgacaagaagccggaggactgggatgagagagctaaaatccctgatccagatgcagtgaagcctgatgattgggatgaggatgcccccatggaaattgtggatgaggaagccaccaagcctgagggatggttggatgatgaacccgaggagattgatgatcctgaggcagccaagcccgaggactgggacgatgaagaggatggtgaatgggaggcaccaaagattgacaaccccaagtgtgaagaggcacctggatgtggcgagtggaagaggccgatgaagcagaatcctgcttacaaaggcaagtggcatgcacctatgattgacaaccccaactacaagggaatctggaagcctcaggagatacccaaccctgagtactttgagcttgacaggcctgattttgatccaattgctgctattgggattgagatctggacaatgcaggatggcatcctgttcgacaatatcttgattgctgatgatgagaaagttgccacctccattctggagaagacatggaagcccaagtatgatgttgagaaggaaaaggagaaggctgaggaggctgctgctggtgcagatggtctttctgacttccaggtgattcattttactaacctttagcagccataactgttatttcattagttattgttcattgttgttccatcttgtccctaactggttttgcccctgcagaagaagatttttgacgtcctgtacaagattgctgatattccgttcttggcaccctacaagaccaagattattgtgagttttggagctatttgctttcctctccagtcaaacgtctggatttgttatcaagaaaataatgtgtttttatctatatcttgtacacaggatgttatcgagaagggagagaagcagcccaacatcactattggcattttggtctccgttgtcatcgtgttcgttaccgttctcttcaagatcctttttggtggcaagaagccggtggtaagttattcccaaccaatgtaatactgctgtcacggttctgaacttgaagagaatgctcagttgactacatttgcttgttccaggcacctgtgaaacctgcagctgaggcgaagaagcccaaggccgcggagacggacggtgctggaagcagtggtgacaaggatgagaaagaggatgaaaaggacgagacaggcccacgtcggaggacccgaagggagacatagacctgtttttgacgtgttttagctcttctggcgtctgcttattttgagaactcttaatatttgtgagtgtataataggagcttatgtcacctctgcggcttcccccgctgctgatttgtttttaatggttagaccaggacccttcacgagcgtagaatttagttcttgttggtcatttatgtgctgtgcctgacggtgttcaatcagatagaggtgatggtttttttggtagatcaaatcaaggaatatttcatatgcctttttggcaactgtttcagttgggtgaatgcctggttaagctttcgcttgtgtttcggaatgttgctggctcaccatttggt

SEQ ID NO: 100524 - DNA, 2074 bp, Zea Mays
agatcgatcgatctccaccgttccttctcccctctcctaatgtcagccgtgcagcctctccactgcgcccacttcttatactcccaccttctgctccctctcacggacgcttcgctctagtcggaaggtttcgaggaactcccgggctcgaggagatcgggacgatgatgggagggcgcgctctgctgctgctcctggtctcggcgctgctcgttcagatccgcgcctctgacccgctgctgtacgagccgttcgatgaggacttcgagggaagatggatcgtctccaagaaggatgaataccaaggtgtatggaagcatgccaagagtgatgggcatgaggactatggtctccttgttagtgacaaagcaaggaaatacgccataatcaaggagcttgatgagccagttaccttaaatgatgggacagtggtcctgcagtttgaagtgagacttcagaatggccttgaatgtggaggtgcctacattaagtacatccgccctcaggatgctggatgggatgccaaggagtttgataatgagactccatacactattatgtttggtccagataaatgtgggtcaaccaacaaggttcatttcatccttaagcacaagaatcctaagactggaaagtatgttgagcatcacctcaaattcccaccttctgtcccatacgacaagctctctcatgtctacacagctatcttgaagccagacaatgaggtcagaattttgatcgatggggaagaaaagaagaaggcaaacttcctttctgctgatgactttgagccagcacttatcccatccaagaccattcctgaccctgatgacaagaagccggaggactgggatgagagagctaaaatccctgatccagatgcagtgaagcctgatgattgggatgaggatgcccccatggaaattgtggatgaggaagccaccaagcctgagggatggttggatgatgaacccgaggagattgatgatcctgaggcagccaagcccgaggactgggacgatgaagaggatggtgaatgggaggcaccaaagattgacaaccccaagtgtgaagaggcacctggatgtggcgagtggaagaggccgatgaagcagaatcctgcttacaaaggcaagtggcatgcacctatgattgacaaccccaactacaagggaatctggaagcctcaggagatacccaaccctgagtactttgagcttgacaggcctgattttgatccaattgctgctattgggattgagatctggacaatgcaggatggcatcctgttcgacaatatcttgattgctgatgatgagaaagttgccacctccattctggagaagacatggaagcccaagtatgatgttgagaaggaaaaggagaaggctgaggaggctgctgctggtgcagatggtctttctgacttccagaagaagatttttgacgtcctgtacaagattgctgatattccgttcttggcaccctacaagaccaagattattgatgttatcgagaagggagagaagcagcccaacatcactattggcattttggtctccgttgtcatcgtgttcgttaccgttctcttcaagatcctttttggtggcaagaagccggtggcacctgtgaaacctgcagctgaggcgaagaagcccaaggccgcggagacggacggtgctggaagcagtggtgacaaggatgagaaagaggatgaaaaggacgagacaggcccacgtcggaggacccgaagggagacatagacctgtttttgacgtgttttagctcttctggcgtctgcttattttgagaactcttaatatttgtgagtgtataataggagcttatgtcacctctgcggcttcccccgctgctgatttgtttttaatggttagaccaggacccttcacgagcgtagaatttagttcttgttggtcatttatgtgctgtgcctgacggtgttcaatcagatagaggtgatggtttttttggtagatcaaatcaaggaatatttcatatgcctttttggcaactgtttcagttgggtgaatgcctggttaagctttcgcttgtg

SEQ ID NO: 100525 - DNA, 229 bp, Zea Mays
atgctgagaaatgtgtttggcaggaataacagctccagcttcaaaaacaaggaatttgaatggattgccctcttttgccctccggaacagaatgcgttggtctttttttccgcacctggagacttgcatgtcgctatttttttttctttttgtcgcgccgtgcctggacgctagatggtgcatggcgttgtttttttgtaatagtgaaacgaacaagtcatgcatttga

SEQ ID NO: 100526 - DNA, 94 bp, Zea Mays
caagtttgtttagcccattggcctcgggcccgagtcggtcggtcgacccatgtagataatacgtctcatttggacccaggggatatccatcccc

SEQ ID NO: 100527 - DNA, 839 bp, Zea Mays
gtatatgtgtagcatgttccccgtattaacacatacttcccaacatatagtgatgccactatggaccattatcgcctccttgataggctaaatgcatacggcttgtttgaggtgagagtatctggtgatggaaattgtcagtttcgtgcactctcagaccaactatatagatcacctgattatcacaagcatgttcgaaaggagattgtaaagcagctcaagaaatgtaacaccttatatgaaggttatgttccaatgaaatataaaaaatattgcaagaaaatgaagaagtctggtgaatggggtgaccatgtcacgctacaagcagctgctgacaagtttgctgcaaagatatgtctcctaacatcattcagagatacatgttttgttgaaattgttccgcaatatcaagctccacagagagagatttggctgagtttctggtccgaagttcactataactcactgtacgatgctcgagatctcccaagcaaatacaagcctaggaagaagcactggttgttgttttaatatccatgcggggagtttgcttcatactggtggattcatattgtttgaccctttctaccaccgtccgccaaatgatgcaccgtacagctacagcatgatccaggcatacagcagtaggtgtagagttacaatgctgaacctgagcaatgtgaatagatattcttaatacaggttgactgtaatgccctgtcttatttgttcactgtgtatattctttatttatactgctacatgttagctctattcatcagttcattgttcccttcgtttttggaagaatccatcattgccttctggcccaaatgtcc

SEQ ID NO: 100528 - DNA, 1198 bp, Zea Mays
ttcccagttcttccactggcccttcccacccgaccccttccccagtccttgctttgcgtctgccatggccgtgcaggcgcggcacttctcgcacgacctagccccggcggcgggcggctccctgttcttggacgagtacgccgggtgcgtgccggcaccggcccggatcggggacgacacgacggtgctcagcgacttcccgcgcagcgagctcgcctggtgcaactacggcttcctgccgaggaagcggccgcgccttgaggcggcagcgccagcagcgggcggtgatctcttgcaagatcagcgcgttggtatgcctccggcgggcacggagcgcctgctgccagtgccaccgctcgtcgacgcgcggagccgggcggtgggctccggcgcggcgacgtccactagcgggagagtggtggcagttggcgcggcgaccgtcgtctcgcgggacatcccgtcgtcgtggacgcaccaccacggcatggagatcgacgcgctcgttagactcgaggtacggcctgaattagtgatttaaccggaatcggcttcgtcgtcagactcagacgatagatgggagtgggacgcatggtcgtccgatggtgtcgtctgatctgtggactgtggtatatgttgtgcaggcggagaggatgcgcgcggcgctgcaggaggcgcggcggaggcacggccgcgcgctgctggccgccgtgggccgcgctgcgtcggggcggctgcgcgcgtcggagacaggcctggagcgcgcgctccaccgcaacgcggagctcgaggagaaggcccgccaagcgggcgccgagtgccaggcgtgggtgggcgtggccaggagccacgaggccgtcgccgcgggcctccgcgccacgctggaccagctgcggccccgcggtgcggccgtctgcgtctgcgaggccgaggccgaggacgcgcggtcgtgttgcttcggcgaggcgccggccgcgcacgccaacggcgcgtccatgcccaagctggcgtgcaagtcgtgtggcagcggcggagcgtgcgtgctgctgctgccgtgccggcacctgtgcctgtgccgcgtgtgcgacgaggccggcgtggacgcgtgccccgtctgcgcgaccaccaggaacggctcgctccacgtcctcttctcctgaactggaggacttcttgccatggcgggagacgaggcttccct

SEQ ID NO: 100529 - DNA, 1030 bp, Zea Mays
ttcccagttcttccactggcccttcccacccgaccccttccccagtccttgctttgcgtctgccatggccgtgcaggcgcggcacttctcgcacgacctagccccggcggcgggcggctccctgttcttggacgagtacgccgggtgcgtgccggcaccggcccggatcggggacgacacgacggtgctcagcgacttcccgcgcagcgagctcgcctggtgcaactacggcttcctgccgaggaagcggccgcgccttgaggcggcagcgccagcagcgggcggtgatctcttgcaagatcagcgcgttggtatgcctccggcgggcacggagcgcctgctgccagtgccaccgctcgtcgacgcgcggagccgggcggtgggctccggcgcggcgacgtccactagcgggagagtggtggcagttggcgcggcgaccgtcgtctcgcgggacatcccgtcgtcgtggacgcaccaccacggcatggagatcgacgcgctcgttagactcgaggcggagaggatgcgcgcggcgctgcaggaggcgcggcggaggcacggccgcgcgctgctggccgccgtgggccgcgctgcgtcggggcggctgcgcgcgtcggagacaggcctggagcgcgcgctccaccgcaacgcggagctcgaggagaaggcccgccaagcgggcgccgagtgccaggcgtgggtgggcgtggccaggagccacgaggccgtcgccgcgggcctccgcgccacgctggaccagctgcggccccgcggtgcggccgtctgcgtctgcgaggccgaggccgaggacgcgcggtcgtgttgcttcggcgaggcgccggccgcgcacgccaacggcgcgtccatgcccaagctggcgtgcaagtcgtgtggcagcggcggagcgtgcgtgctgctgctgccgtgccggcacctgtgcctgtgccgcgtgtgcgacgaggccggcgtggacgcgtgccccgtctgcgcgaccaccaggaacggctcgctccacgtcctcttctcctga

SEQ ID NO: 100530 - DNA, 1508 bp, Zea Mays
cggcacgcggcggcccgctctcgccgcgcgagcagctcgagcattccgccagcagccgacgggttcggggccgggacccccgagcccaaccctcagagccaattctttttcccgaagttacggatccgttttgccgacttctcttgcctacattgttccattggccagaggttgttcaccttggagacctgatgcggttatgagtacgaccgggcgtggacggtattcggtcctccggattttcaagggccgccgggggcgcaccgaacaccgcgcgatgtgcggtgctcttccggccgctggaccctacctccggctgaaccgattctagggttggtgggccgttaagcagaaaagataactcttcccgaggcccccgccggcgtctccggacttcctaacgtcgccgtctgccgccacatcccggctcgggaaatcttaacccgattccctttcgggtgacgcgcgtgatcgcgctatctgccgggcttcccccgtcccttaggatcggcttacccatgtgcaagtgccgttcacatggaacctttctcctcttcggccttcaaagttctcatttgaatatttgctactaccaccaagatctgcaccgacggtcgctccgcccgggctcgcgccccgggttttgcggcggccgccgcgccctcctactcatcggggcatgtcgctcgcccagatggccgggtgtgggtcgcgcgcttcagcgccatccattttcggggctagttgattcggcaggtgagttgttacacactccttagcggatttcgacttccatgaccaccgtcctgctgtctaaattgaccaacaccctttgtgggttctaggttagcgcgcagtttggcaccgtaacccggcttccggttcatctcgcatcgccagttctgcttaccaaaaatggcccacttggagctcccgattccgtggcacggctcaccgaagcagccgcgccgtcctacctatttaaagtttgagaataggtcgagggcattgcgcccccgatgcctctaatcattggctttacccgatagaactcgtgtgggctccagctatcctgagggaaacttcggagggaaccagctactagatggttcgattagtctttcgcccctatacccaagtcagacgaacgatttgcacgtcagtatcttttcgagcctccaccagagtttcctctggcttcgccccgctcaggcatagttcaccatctttcgggtcccgacaggcgtgctccaactcgaacccttcacagaagatcagggtcggccagcggtgcggcccgtgagggcctcccgctcgtcagcttccttgcgcatctcaggtttctgaacccgtcgactcgcacgcatgtcagactccttggtccgtgtttcaagacgggtcggatggggagctcgcaggccgttgcggcgcagcgccccgaggggcgcgccagaggcgcgcggataccgtccgcgccgacgacggctgccgggggcgatcatcgcccc

SEQ ID NO: 100531 - DNA, 1230 bp, Zea Mays
ccatgcttcacaacaccaggatctgggtgagtcgcgtggcgcgctctatatacaagtgcggttctccactgcaggactctccctctccctcttcttcctcctcctcctcttcctctgttttgcttttgtgttgctgttaggttcttggatagtttgatgaatgatactgtgcagcagcagcagcagtagtaattcatagtgggcggtgtgatagcagcagtgagatcgaggagaggatggaggtgttcatccacgaggactacgtgaacaagcgcaacgagctgaggagggagcagaggcgccgggaactgcagaggctgcaggtggagagcaaccccgacgcgtccagggaggcgctggcaagccgggagagcccgaggacgccggcccagtgcctgacgccgaccggcgcgtcgccgtccagcttcagatccccgacttcgaggagcacgctgcagtcgccggccgcagcggcggggcaggctgccggttggccgtcggagcatcgccgcctctacgactgcctcaagccgtactagtaggtaggcggacgtggagtggcctcaatccggctgcatacacggccagacgtggcatggcatggcatgtcgtccaaccgaataaagcgtggagacactccctgtggtcaaagcagtgcttctgttgctgctcgtactgtgcggttcagatctgtgccatggcatggtcaagtgaactgaggctgatctgctctgttccactgtcatatggtcacagcaatctttgattcagtttcaaggacgacgtccagaactgcccagtactgtttggcctgttgtgcatcagaaattcagaagagtcaaggagttccaataatgcaatagccatttttagttagccccatagaaaacctacctgcttcgatgctgctgctcgttagatagatagatagggggtcttacttgtatttttctctttataagcggttttgaactcctgtatttgtatatgtatttgggctagttgcctaataaataataagtcctattcataacatggtacccgagctagattctactgttattttttccttctccgtacgaacgtttatttcctttgttgtgagaacttgacatcgaatctatataacattcagtacctatataaaaaatgaacagtatgaaacaactacgcaattgaaaaattggaagccattatcgaatcctgcaaaaatattaactgacagtgata

SEQ ID NO: 100532 - DNA, 2638 bp, Zea Mays
atggccctaaaatttttgagtgagtcggcgatgaatctcacgatactgaagatgaattctgctcccgatgcaaaactcatggttgtcatcaactctctattgcgcaagagcagccgtctggggacaaacgcagttcctgcgcgcatgcaggccactacactagtttgtttaccccggggcccgggcgcagaaaagggtgaagaagaaacagccgtgacattatcgaggtggcatgcccacaccttccgccacatttccgtcccccatcccctccgcaccgcagctgtctcttcctctcctggtcttcgtcctgccactcctccacctcaacttgctctgctcttctcggattacggctcggggttggtcattggcggacagggcgtttcaagaaagggcggcggcgcttttcctgacgcaagttgccccggtgtcctggcttgctgcgcgcttgggggttgggctcaggaatggggggagagcaggcgctgcgtcgactggtcctgttcccatctctctgaaacttagatggatgcatctgtgaacgccaagaagaaggttagtttctgtgggaacaccggccacagccgctgcggtgaagttcatttagctgcggtgtgctccggtcgtatgcgaagcaaccccttctcacttcaggtttggtttgcatttccgttcaagtataaaggaagcagtatttggcatggcatttgaatagcgtcggaacctagaaaacagtgttccagcagtattacgtcacactggtgttatactattatagaaaaacatggtggacgtagaactgtttgttaaggagactagtgatcacagcatcagctctgaggaagaagatatccttgtcaggagctgtagcaatctcaatgtgagctttggataccattgtgattctcatcagagtttttctcctgaaaatgatcatggcaatggcatttctcctaagaacacgtttgggactaataccatgatggggtcacgaaatggctcattcacttgtttatctggtgctgctattagtgcaaatttcacactggcaaatacaaacatttgcaatggtcttattggcgaagaaattttaccagaactagattctccaaactcctttagaaaaattgtttcttctccatcaatgtcaagattggactcgttctccacctcacaaggaagtcctgtgtcaactgagagctctatatttgagatcagtaaaaacctttggaggtccagtgcaccaacaactgtatcatccaattttctgactaatacagaggtgaaaatggctgggggagctgctggagaggatagagtccaagctgtgtgctcagagaaaaatggatggctgatttgtgggatatatgatgggtttaatgggagggatgcagctgattttcttgcagtaactctatatgataacatagtatattacttgtacctgctggagaatcggataaagcaacaaaatggtctgtacaattcatcagaaagctctctcgatggtcttaaaagtgagttaacactagccatgagaaactcagagaatgaagacataaaattttctgaaacatttcgatctggcgtgctgaattgcctttctactgctgttgagcaagccgagaatgactttttatgcatggttgaacaagagatggatgatagaccagatttagtttcagtagggtcttgtgttctggttcttcttcttcatggaacagatctgtgcatcttaaatatgggggacagtagagctgtgcttgcttccatgccatatgtagaaaatggtgctttgaaggctgctcaactgacagagacccactcacttgaaaatccttcggaataccaaagacttttagctgctcatcccaatgattcttcagttgtcaggggtaacaaaataaaaggaaagctgaaggttactcgtgcttttggagttggctatctgaagcagaggaagttcaatgatgcactcatgggcattctacgagtccgcgatttgagcagccctccatatgtttacacaaatccacacacattgagtcacaaagttacagatgatgatttgttcgttgtgcttggtagtgatggcctatttgatttcttcagtaatgatgaagttgttctgttggtttatcaatttatgcacgataatccaatgggggatcctgcaaaatatcttatcgagcaacttatactcaaagcagccaaggaagcagctttaacagccgaagaattgatgaggatacctgttgggagtaggagaaagtaccacgatgatgtgactgtcgttgttatcacccttggaaatgcacagagaacggagaggatggaggtgttcatccacgaggactacgtgaacaagcgcaacgagctgaggagggagcagaggcgccgggaactgcagaggctgcaggtggagagcaaccccgacgcgtccagggaggcgctggcaagccgggagagcccgaggacgccggcccagtgcctgacgccgaccggcgcgtcgccgtccagcttcagatccccgacttcgaggagcacgctgcagtcgccggccgcagcggcggggcaggctgccggttggccgtcggagcatcgccgcctctacgactgcctcaagccgtactag

SEQ ID NO: 100533 - DNA, 2327 bp, Zea Mays
ctgagtcgacgtgcgcggtatgctgattcttgattcgtgttctgttatgctgcggtagggcgtttcaagaaagggcggcggcgcttttcctgacgcaagttgccccggtgtcctggcttgctgcgcgcttgggggttgggctcaggaatggggggagagcaggcgctgcgtcgactggtcctgttcccatctctctgaaacttagatggatgcatctgtgaacgccaagaagaaggttagtttctgtgggaacaccggccacagccgctgcggtgaagttcatttagctgcggtgtgctccggtcgtatgcgaagcaaccccttctcacttcaggtttggtttgcatttccgttcaagtataaaggaagcagtatttggcatggcatttgaatagcgtcggaacctagaaaacagtgttccagcagtattacgtcacactggtgttatactattatagaaaaacatggtggacgtagaactgtttgttaaggagactagtgatcacagcatcagctctgaggaagaagatatccttgtcaggagctgtagcaatctcaatgtgagctttggataccattgtgattctcatcagagtttttctcctgaaaatgatcatggcaatggcatttctcctaagaacacgtttgggactaataccatgatggggtcacgaaatggctcattcacttgtttatctggtgctgctattagtgcaaatttcacactggcaaatacaaacatttgcaatggtcttattggcgaagaaattttaccagaactagattctccaaactcctttagaaaaattgtttcttctccatcaatgtcaagattggactcgttctccacctcacaaggaagtcctgtgtcaactgagagctctatatttgagatcagtaaaaacctttggaggtccagtgcaccaacaactgtatcatccaattttctgactaatacagaggtgaaaatggctgggggagctgctggagaggatagagtccaagctgtgtgctcagagaaaaatggatggctgatttgtgggatatatgatgggtttaatgggagggatgcagctgattttcttgcagtaactctatatgataacatagtatattacttgtacctgctggagaatcggataaagcaacaaaatggtctgtacaattcatcagaaagctctctcgatggtcttaaaagtgagttaacactagccatgagaaactcagagaatgaagacataaaattttctgaaacatttcgatctggcgtgctgaattgcctttctactgctgttgagcaagccgagaatgactttttatgcatggttgaacaagagatggatgatagaccagatttagtttcagtagggtcttgtgttctggttcttcttcttcatggaacagatctgtgcatcttaaatatgggggacagtagagctgtgcttgcttccatgccatatgtagaaaatggtgctttgaaggctgctcaactgacagagacccactcacttgaaaatccttcggaataccaaagacttttagctgctcatcccaatgattcttcagttgtcaggggtaacaaaataaaaggaaagctgaaggttactcgtgcttttggagttggctatctgaagcagaggaagttcaatgatgcactcatgggcattctacgagtccgcgatttgagcagccctccatatgtttacacaaatccacacacattgagtcacaaagttacagatgatgatttgttcgttgtgcttggtagtgatggcctatttgatttcttcagtaatgatgaagttgttctgttggtttatcaatttatgcacgataatccaatgggggatcctgcaaaatatcttatcgagcaacttatactcaaagcagccaaggaagcagctttaacagccgaagaattgatgaggatacctgttgggagtaggagaaagtaccacgatgatgtgactgtcgttgttatcacccttggaaatgcacagagaacgatgactgcgtcaacatccatgtgaaagaatggagagctagagagacgggctatatcagctggtaatttttgtgggtttttgcatacgtgtcctccaaattacaagcccttttttttgttgagattggcgtgtggtagtcagtaaacccgaataaaaatgtatatattgttttggaatttgggaagtgaacaaaaaccttttgttcaatcgcaaggtgggcatggattgtttggcctacttttgtacatacatgaattaaaacatggaggttcgtacttgagccaatgaatccatgagcagagcggtggatcgttccagttt

SEQ ID NO: 100534 - DNA, 391 bp, Zea Mays
ttttttacttgtctgctgttctaatatcttcttttcttcttcctttgtgcgttaagtaatgtttccaacaaagttttttgcagtctcgtctaactacctccaacaaatcatttgcaggagtgctaaaacagctcactgttttgggatttgccgcctcaagtttcatctagctacctcgaacaaatccttcaatctccatggctacatcggtacttctcctattccaccttgtgctcctactagtagtgtttttattcttgagtagagcattttgctttcaactagcatgtctaattgcatataaattacttgttctagatatcaactcaatatactaacgaggaggaaattaaaaggaagagaaagaagcgaaagagagttgttgtattag

SEQ ID NO: 100535 - DNA, 1623 bp, Zea Mays
ctcactaaaaaagcatcacttaatcagtctcatatgcacgacggccgagctagcgtcgtcgctggctggcttcgatgtagaggtgaagcaaccattcgaactcaggcaagaaaacgaatcgaccgtcagcgtttaaacaacactagacgtactcttgctcctccgcgcgccacgcccttggcgcaccacgtctacccgtccccgtcatcggccactgtcgcgccgccagcccgcgcgccaacacgcacgctcgcgccgcctataaatccttgcaccgatcctcccgtcccgggagcaatataactaactgcacacacgcacaagtcaaacttgcagctgaggaatcgatcgcatcggtatcttgacgtgttcgttgcccgattctagctactagtccccgctggctctttgagcgatcgtcgtagctagccgcccgccgtcgatcgatgggtgcaccggcgccgtccgtcgccgtggtcgccgcggtggtggtttgcctgtgcggcgcctttgcgcgcgcgcaggacatggacaacgagtgggcgcggccgccgtaccgcggcttcttcggcggccccgggtcgctgctgccgcagtcggacgtggacctgctggagttcccgctgaacctggagtacctggagacggagttcttctgctgggccgctctggggtacggcctcgacgccatcgacgccaacctcaccggcggcgggccgccctccatcggcggccagtccgcctccctcaccccgttcatccgcgacgtcgccacccagttctgctaccaagaagtcgggcacctcagggcaatcaagcagacggtgaggggcttcccgcggccgttgctggacatcagcgcggccaacttcggcaagatcatcgagcaggcgctgaacgcgacgctggacccgcccttcaacccctacgagaacagcgtcaacttcctcgtcgcctcctacatcatcccctacgtcggcctcaccggctacgtcggcgccaaccccaggctcttcacccctcaggccagaaagctgctggcggggctgctggcggtggagtcagcgcaggacgcggtgatccggacgctgctgtacgagcgcgggatggcgcgtgtggcgggctacgccgtcggggtggcggaggtcacggcgcacatctcggacctcaggaactcgctggggaggaggggcgtcaaggacgagggcctggtggtggcggccgagctggggcccgaggggctcaccgtggggaacgtcatcgccggtgaccatctttcgctcgcctacgaccgcacgcccgaggagatcctcggcatcgtctacggcaccggcaaccccgctcagcacggcgggttctttccccagggcgccgacggccgcatcgccagggggctcctcgcgtagcgcatgggcgtgtagcgaccgtgcgctgaccagcacgggggtaaagttgtcccagctgcacggcacaggctgtagactagtactagtactttacgtgtttgtatgttggcgactttgacgcatgtagttgtggtgagtgtgtaaactggatgatataaatgaatgttggtggaaataaagcactaaataaagagttgatgcactgtaagcaaaggta

SEQ ID NO: 100536 - DNA, 556 bp, Zea Mays
ttgtgttcttcaaacaagtcaattacagtgagctaagaatttatagtagtctataaaagatcattcttgaatttttgcctttaaattgtcttgttaaatattgtatactacatgactaggtgagtgctcgtgcgtctcacgcccgagtttctcttcaacgtcatcccgaacagctcgtggatgtcatcctctatcttataatagtataacatacatttatatatataaattatcaaactattatatgatcctattgcaacccacgggcactgagctagttaataaaaaatctcaaattagattggttggggaaaaaatctcgaattggattggttggggtgcgccaggctcagccagtagtgcaacggccgagcgacgctcaaggggcccagtccgagcgacgctcaaggggcccagtggcaagccacggtggtggactctcccccacaaaaaataaatttaatatcaaagtgaacacatagtccacatatcagatattaaattgataagaacagatactacacttgatcttagccaaaaggtcgagaaaggtatg

SEQ ID NO: 100537 - DNA, 1580 bp, Zea Mays
ctttgcttccacgcctagcagtagtcgcctacagctacagcttgaggcagctgcccatcggccgcagaagggatggctggacgagagatgcggctattggagcggcgacgtgcgggcgatgatggaggagaaatgccgagctgttcgagcactgacggaaacaccagcagcgctaatgcgagcacgagctcgagcaccactgctagcagcggcgtgcggcggagcggtggcgcagcggaggggcgggagaccagctccaggtcggcgggcaccatcaatctaagtcaggagtacaggctcgcgatccacaccccgtcctaccaagagatctgggataagatccacatagacggggacggggacgaacaacgggaagggggcttcggcggcaacggtgaagatgaggaaggagaagagggggaggacagggtcaccctggccggcgtgctccgtccggaggacgaggtggtggaccgcgctcttgcagacgcgcccgatacggagctcacccgcctcgtcaagaactacttcagcagcacgaaccaagcgtcggtgctctgcctctcactccgtcgggcgctccgccgggcgcggtcgctgtacgggcccatcacggacctcctcgcgctcatcccgcagtcgccgcagctcgccacgccacactgcgactgtgcgttcgacgccttcctcctgttcgaccaaatgcccaatccgttcccggcgcccgcggccgggttccagtgcatgcaacgaagtttctctgggctcaagaaccacctcgatcttcgtctcctcagtgtccggcgcaggcgccgttggctccgctgtgccaagcgcggatcaggtatctgccttattgcctgcgccaccggcgctgccgtcgcaggcctcgtggttgcgacacacgccattaccgcgctgctggcgatggcccctgcttgtgctgcatccaattcttgctgctgtccactggctgcttcgatgaaacgcctgcagaggcacatggaccggctcgacgcgactgctaggggcacctacgtcttgaataatgatgtcgctacaattgaacggctggtgggtaggctccatgccactgtggagagcgacaagatgcttgtccgccttgggctggagcgcgggagggggcaacaccacaccatagaagaggtggtaaggcagctcaggaagaaccaccccagcctgcaacggcagcttgctgaccttgccgagcacatttgcctctactttgctgctgtcaaccgtgccaggttactccttgtgcaccacctgaatgcgcaatctgatgctgaaagtgagtctccattgtcatgacctcattagccccaaacaatctgacactgggtgccatgatcatgagtttcagttaaaacaattagctgtatcttgaaattcttgtctcgagacctcatctatcgtgccaagtgatgcacaaatttcttgctttaatagtttagacatttttatagttcaatatatttgatcttctgtactttcagaattattactgtagcgatgtaacaatgctatgtttctgaataaacacgaagtcttaacatttt

SEQ ID NO: 100538 - DNA, 725 bp, Zea Mays
aaaggtcgaatattgttatgatgataatacaaaagttatagagggctttataagctttctagaaagtcctagtttactatttgtggatgcatatcttgtgagttatgagctaaacaagtagttgctgtcctgctgtccaaaaatcagcaaatattaaaatggttgcttggagtctcttttgtgtgggtaactagatttggttagttcttgtcttgattaatgaagtcttgtgatatgaacatacataatatggtggcgcgagtgctttttagctctgtctttcttctgtgtctatcaaccactctaatcctacacgttccaatgcattttgtgatcttcttggaagccacattttgtgtttattatgcttttctatatctttgtgtacatgtgatttaatgccagttgtatatttatgagatatttggtttattttgtaggatttcggctctcatcaagtgactcctccccctcacgttgactttgcggacagatgtctcaattctagtggtggagctacgaacaacaatctgatgtcctgatcgagagtgatggagctaatgtttgaacttgtgtttgaacttgtgaactatggatgtgaacctgtgtgaatttgtgaacttatgtatttggacttatgtgaatttgcgaacttatatatttggacttatgtgaatttgtgatatgaacatatatcaatgtgtttgaaatctgtattgtatgtg

SEQ ID NO: 100539 - DNA, 1480 bp, Zea Mays
atgcccgaggttgctgccggaatgtgcaagatggtgctgccaggagtttctgtcatgaattgggtttgatgtgccaagtatcaggaatggattttgtacttgaacctgtgctgtcaccttgctatgcaaggcctgaacttgttgaaagagcactaaagggacgctatcaagatgcgatgaacatactcaggcctcagggccgagaactcaacttgctgattgttatactgcctgacaataatggttctctttacggggatgtcaaaaggatctgtgagactaatcttggattggtctcccaatgttgtctgactaaacatgttttcaaggtgaacaagcagcagtatcttgcaaatgttgccctgaaaataaatgtgaaggttgggggaaggaatactgtgcttgttgatgctttggcaaggagaatcccccttgtcagtgacatagcgactattatctttagtgctgatgtgacccatccccatcctggggaagattctagtccttccattgcagctgtggttgcttctcaagactggcctgaggttacaaagtatgcaggattggtgattgctcaagcccatcgtcaagaattgatacaggatcttttcaaggtatggcaagatcctaaaagggggactttctctggtggcatgatcagggagcttctcatatctttctggagggcaactggacagaaaccaaagaggatcatattctacagggatggcgtcagtgagggacaattctaccaagttctgttgtatgaacttgatgccattagaaaggcctatgcgtcattggagtctgactaccagcctccagttacttttgtcgtggtccagaagcgtcatcacaccaggttgtttgctaataatcacaatgataatcgtgctgtcgataaaagcgggaacatactgcctggcaccatggtggactcgaagatctgccatccaactgagtttgatttctacctgtgcagccatgctggcattcagggaacaagccgccctgcccattaccatgttctgtgggatgagaacaactttacggctgatgggttacaaactctcaccaacaacttgtgttacacgtatgctaggtgcacacgctcagtatcgattgttcctcctgcataatatgctcacctggcagccttccgagctcggttctacatggagccagatacgagtgacagtggatctatggcaagccgtggccctccactaggggggcgccacaccaaggctgccggtgttgggaatgttgctgtgaggccattacctgccctcaaggaaaacgtgaagcgggtcatgttctactgctaagactgatgctgttaaggcagagctaccttttattattacagtatatctcgtgaagtctggacagcaatgtttgtttgtattaactgactttgatacacattgaatcaccttgagattattataaatgagttgtagacaattttattatcttt

SEQ ID NO: 100540 - DNA, 321 bp, Zea Mays
ctgtgaggaagctagcgcacaccaccgcatggaattgccccgctcgcccgattgagccgagcgatgagagagattgggagaccatgccctctccccgccaccatggattcccgcctgtgtggccaactgggcactggaggatggctttggcgcttcaccggtcaacagggatcatgcccagggcccgtgggatgatgcgagtttggctgggagaatggagctccgccgcagggccgcatgccgccgtgactagccatgccaccgccttccccgctgtgcgaggactcgtgtcatctgaaaagcaagttggtacctggaatc

SEQ ID NO: 100541 - DNA, 1086 bp, Zea Mays
ttttttttcttctcagttccacttgcttgccactgtgctcggttgcttagacagccagcattgccgggaaagcaacggaggccacggcgacctgcatcagccaggcagcttgtgcgtgctataaatggcgtgaggcgaggaagagaaggaagagagaatagctaggccgcgccgacgccgaaccgcagcagacacgcgcgcggacagcgtacgagggagcgaagctgcctgaggtagaggaggaggagaacatgcagggcggcggcggcgtggaccagccgccgatgcagatggtgctgcgggtgaggcacccgtcgtcgctgggcggcagcggggcggacgaggacgacggcgaggggtcctctaggtcggcgctctcggtgttcaaggccaaggaggagcagatcgagcggcgcaagatggaggtccgggagaaggtgttcgcccacctcggacgcgtcgaggaggagtccaagcgactcgccttcatcaggcaggagcttgaagggatggccgaccctacaaggaaggaggtggagtcgataaggaagcggatcgacacggtgaaccgtcagctcaagcctctcagcaagagctgcgtcaagaaggagaaggagtacaaggaggtcctggaggcgtacaacgagaagagcaaagagaaggctctgctagtgaacaggctaatcgagcttgtgagcgaaagcgagaggatgcggatgaagaagctcgaggagctcaacaagacggtcgactcgctctactagacgccagtcggtgctccgtgctctgctcacccacctctccatccactcatccatccagagcttgcacgctcgccctctgtaatctgatccccgtgtgccgtggattcgtgacctgttcaaggtggtgcttgtagtaactgatgtttttcgttgggtgatccttttctcttctttttttcttcttctctctttggtctcttttatttcaccagttcgtacgagtctcgttgcactgtcattgtcgagtaaaactgacgtactgtatttataagcaacaaacaggtaccagctgctgtctaaccacgttttgatggttcattca

SEQ ID NO: 100542 - DNA, 657 bp, Zea Mays
cacaacccggaaacgcgcaaagcgaagagggaaggggggatatcggggaaaaaaacgcaaggtaccaccgtaccagcagcgcaaagagccgggtgttggcacagatcaggcggccgccatggcggatcagttcgcggattcggcgaacaacgtgatcatcgaggaggtgaacaagggactgaacccaggaatggtggttctgctcgtggttgccagcttcctgctgctcttctttgccgggaactacgcgctgtatgtgtacgcgcagaagacgctcccgccgaagaagaagaagccggtctccaagaagaagctgaagagggaaaagctgaagcagggtgtctccgcgccaggggagtgaacagacagggatgccgccgatcggcccgtcctgagcccgccccctatttacatgattgtcgaagaaaaaagatacacctgctggagccgcggtgttcgtagtaattttgttctgtagatgctttttgttgtcttcgatggtagtgcatttgtattggacaccttgtttcagcaactgatgaatctttagcctaaaccgagttactcttttgttcctgtaaactacaagtacttcaaatgacgctggtgatggtgaacctgagtaaaattggcgagtcccagctcccgcctactctt

SEQ ID NO: 100543 - DNA, 796 bp, Zea Mays
gatagattcaaattaggcttcatctgtttgttgtgactagtctctgcaattgtggacaacagttagcacaagcgctctataatagagatatggcttgtatctttatggcgctgtccagttagcatttggtctgccaatttgtacaggatatatacgtgttcatctgttgttcgatcatcctaaccttcaacgcatcatcttgcattgcaaggcccgtgcacctagtctactgttctcgccttcagtatcctgtttaattttctcgtgacatacacccgcttatgtttcagaacaacgtgatcatcgaggaggtgaacaagggactgaacccaggaatggtggttctgctcgtggttgccagcttcctgctgctcttctttgccgggaactacgcgctgtatgtgtacgcgcagaagacgctcccgccgaagaagaagaagccggtctccaagaagaagctgaagagggaaaagctgaagcagggtgtctccgcgccaggggagtgaacagacagggatgccgccgatcggcccgtcctgagcccgccccctatttacatgattgtcgaagaaaaaagatacacctgctggagccgcggtgttcgtagtaattttgttctgtagatgctttttgttgtcttcgatggtagtgcatttgtattggacaccttgtttcagcaactgatgaatctttagcctaaaccgagttactcttttgttcctgtaaactacaagtacttcaaatgacgctggtgatggtgaacctgagtaaaattggcgagtcccagctcccgcct

SEQ ID NO: 100544 - DNA, 745 bp, Zea Mays
cacaacccggaaacgcgcaaagcgaagagggaaggggggatatcggggaaaaaaacgcaaggtaccaccgtaccagcagcgcaaaggtgagcttttcttcagaatcattcgtcctcgtcaactcgtgctcagctcatccttcccttccttcggcaaattcatactaatcttctgatccagagccgggtgttggcacagatcaggcggccgccatggcggatcagttcgcggattcggcgaacaacgtgatcatcgaggaggtgaacaagggactgaacccaggaatggtggttctgctcgtggttgccagcttcctgctgctcttctttgccgggaactacgcgctgtatgtgtacgcgcagaagacgctcccgccgaagaagaagaagccggtctccaagaagaagctgaagagggaaaagctgaagcagggtgtctccgcgccaggggagtgaacagacagggatgccgccgatcggcccgtcctgagcccgccccctatttacatgattgtcgaagaaaaaagatacacctgctggagccgcggtgttcgtagtaattttgttctgtagatgctttttgttgtcttcgatggtagtgcatttgtattggacaccttgtttcagcaactgatgaatctttagcctaaaccgagttactcttttgttcctgtaaactacaagtacttcaaatgacgctggtgatggtgaacctgagtaaaattggcgagtcccagctcccgcct

SEQ ID NO: 100545 - DNA, 900 bp, Zea Mays
acaacccggaaacgcgcaaagcgaagagggaaggggggatatcggggaaaaaaacgcaaggtaccaccgtaccagcagcgcaaaggcggccgccatggcggatcagttcgcggattcggcggtaagcctcgaattcttccttccttaatcatgtggcgtgggagaccaaagcaagttcgagtttgaatgtacagggtcagaagcggcacagccgcatcgtctctctgggcgactccgccgccgccgccgccgaaaaccaccaattgccccctctcccggccgtcgcctgtcggcaccaccttttctccctcctctatcactctttttctccatcttgcgattgaacctctggcagcgtcggcgccgtccggtcggcggctgtgtggatccggggcccccaggtgtggatccgctcgtaccttccccggatctggtgtcctgtcgcccgggtgtgctccgatgctctgcccggctctctggtgtcgtgcacgggcaggttccacttattctcgcgcgagacaccttgggctaagcagtctgtgtggacgggtttactcgtgaggcggcggcagctgtttgttccgatgttttggcttgtagaagtaagcgctccatggccggagctgtagttgattttggtgcatctgatttgaatttgatgtgtggaggactggatctgtagaatttgggcaagacttctacgtgatcattaggtcatgcgataaactgataattgtgtttgtttgaaaaaggcatgtttcaattgtgtcctagaaaagagattgcagactgcttttatcttgtacgtgagctttgatatcatacactagtaatttgcataagcttgataactgttagtacaaccttacaggtctggagctttctggctatcatatactc

SEQ ID NO: 100546 - DNA, 342 bp, Zea Mays
atggagctaggcatcatcccgaaaggtcctacttccatatcaatcctccagcgtcgtgaccgaaagtaccaaactgttgcagaagcggtggcagaagaggtggcaacggtggtgcgaatggaccttgcgcttggttcatatgtgctgcttcttgtgtgggcactgctccaacgtgctgctgcagccgtggtgcttgcacagaaaatggaggacgacgccggtcgcctggggttccacctgggcaaggagctgccgcgcgctgcgtccgccttcatgcacaacctctgctctagaggggctcatctcttcggtaacacctccgccagcagcgtatggtgctaa

SEQ ID NO: 100547 - DNA, 1321 bp, Zea Mays
ggagcatcaccgttcactggataattcgctcgctccgctcgatgcccgcttgtttgcggtgaagcctccggcgaacagccgtagcggaaacgccgcccgagatgtctgctccctccgccccaccccgcacggtgatctgtgtgggcgacgtccacggctacatcacgaagctggagagcctctggtccaacctccaggccgcactccccgccgacgccttcgccaccgcgctggtcatcttcctcggcgactacaacgaccgcggcccgcacacccgcagggtcctcgacttcctcctcgcgctcccgacgcgctaccccgcgcagcgccacgtcttcctctgcggcaaccacgacctcgccttcgcggcgttcgtcggggcgctgccgccgccgcccgacggctccccgttctcggccacctgggacgagtacatccacaacgaggagcacgaggggtggttccgcgggccgggattcgagggcatgcacgtgcaggggaggcggtggggcggggtcatcaaggagaggtggaaccccaagaagggcctcccgtacaagggctccatctacgacgcgcagcccaccttcgaatcctatggcgtcgcccatggttcctctgatcttgcaaaggctgtgccagaggagcacaagaggtttctgcatgatttggtttggatacatgaagaggaaaatgtgccagttgatatggatggaggacaaatcatctgcaatctgattgctgtccatgctggcctagagaggaccatagatttgaatgagcaacttagagttttaagaactagagacacaagggtgccaaaggttcaaatgcttagtgggaggcaagatgtttgggacacacccaagggtctggccggcaagcagactattattgtaagtggccaccacgggaagctccacatcgacggcctccgatttataatcgacgaaggtggtggttatgaagacaaacctattgctgcgatagtttttccttcaaagacattgatcagaagtaccgaggaagcgggaaccacatcagagaggtgatctagagttctagacatcgtcaggagcagtgaacacggaggcacagttttttctctcttgaagttactgcttgtagtcatgtactcatgtcaaacgacaataggaataacgtccaaaggcaataagttggtgaaccggacctgcgttttctcaatttagtcactgatgactatatgtctatatatattgtaccttgatgctgtcaatttagacgagaccgtacatcctctttttttagggcaataaactttactccctgtcctcaaata

SEQ ID NO: 100548 - DNA, 231 bp, Zea Mays
atggctagtgcagacaaggctaccgggtgtcagcgcaacggagctgtcaggtcatcgattgagacacccattgtgccaccgtcactcgccacgcttgcgaggcctgaagtcgagaggacacaaggagggcttgctgccaccatccttgcaaaccgctcaaaacttctgtttgcttactctagtggcggcaagatagaaaaggaaggaggaagggacggcaatgacatctag

SEQ ID NO: 100549 - DNA, 577 bp, Zea Mays
tcggcttcggctgcccctcgcgcactcgcttcccgtgggccgcgcgggtgaaggagcgtacgtgcgggtggttgatttgtggctagctggtgcgcgcgggatggcgtcgctcgccgtgtccggcgcgaggctcggggtggtcgtgcgggccggcggctcggcgggatcgggcggggagcgcaggagtggggtggccttgccgtcggtgctcttcaggaggaaggacgccttctctcgtgtcgttctgggctgtgatggtgctcctggaaaagagctgctgatggccggatgtggcagtgatcacttgctttcatccacagagcctgtcgtggatgctctgcagcggtctgaaggattacagccaaacaacagaattcaggaaagatgattctaattctcaatttggtgctccaatatctacatctgctggagaccaaaaagagcagcacggatagtccgcggtgatggcgcggacggtccgcgcgtgcgcagagtcagttagggttcctagtttctcgcgggatttgttacctaaaaccgcgggattaactcggaaatcagttggaagcggatccag

SEQ ID NO: 100550 - DNA, 3095 bp, Zea Mays
ggagagagagagagagggagtagggcacagggtcgaaggggcccaaggagaggcagccatcatctgctcctcgtgatgcgcgccgctcattgctgcagagcgctgccgctttcgccccacttgaagcttcaactccacttccccagtctcgccgccgtttcggcctaaaactcccgcaaatcctcgcccgccgcacccagattctccaggtgggagcagcgcgcgccgccgccgccgccgacgacgaccgaacgcgggccgcaccagctccccgctgccgccgccgtccgggctccgtgatgccggcggctctcgacccaggacagcggcttctctgttggcccaagtgcacgcgactgactgccggtgctggtgccttgaaatgcggcagccgttctacggccggcctcccgtccagatgaaggtgcagctggtggaacaggaaggctccaaggggatgggttcttccgggtgcgcggagatagtcgagctggcggacgacccgaaagctgctcgtcctgctgcgcatctgagagtgagggtcaagcccgtggggcaggaggatggggcgcggtcgtgctcgctggaggatgaccttgaccagctcatcaggtcggtcaacgtgcgcacgtcggcgagggcttctgggcagaggagcaccgatagatggcttattgggctcgggaagtcgccggtgtcgggctcagagattgtggagtccgtgagcctgaagcaggcccttaggaagatgtgcatctcccaggcgtcggaaatggcagccatgaagaggctgtcaaaaccgacaggggcgtccaccccttctgattctggggcgaccaagaagctatatggctctgttgcagttcaagccaacggggagcaagatgacaagagtaaggtgggcaacgtttatatgctgcctgagaaactggcaggaagttcgattggtaaggcaaatgaaatcagcaaggggcagagtaagagctcagccaagaagaatttgagatcagcatctcctaccgcagtcaaggttcgcaaaaccagaatccaagatgtgatcagtaacaagtcatcagaggcggttgaagatgtttctgtaggagcaacactgccaaggcaaaggaaggggaaatctgtgaaaacgtctagcccccgggctgttccggtcggtggctcacggctggtgaggccaatgtttcggaacaaaacctcgaccaaaaagaaggtcaaacctgaacctgctatagtgcccgcatcgcacaagcattgtgagacgaaaggtcctaagtctcacgctagtaaacagaaggagtcccttcaggatgaacccagaaccccagcaccagctaacaagaaggctgctgtcagctccactgttgatggatctgattttggcaccaaagggtgtggcactggtgtgatccatggcccgaaggttggtgagctgtcaagatcaaaggagaagggtgaatgctcccaaagctctaagagtagcattggtgattatagcaccagcaccagcatcagtgaggacagttatggcagcttcagtgctaacggaagcaggcctcacatgtcaaaggatgtgagatggggagccatcaggtgcatggctatccaacaagggagcttgggattgaagaacttcaagcttctcaaacaacttggttgtggggatattggcactgtttatttggctgagttagtgggatcagactgcatgttcgctttgaaggttatggacattgagtacctcataagcagaaagaaaatgctcagagcacaaactgagagggagatactgcaaatgctcgaccacccgttccttccaactctgtattctcatttcacgacggacaacctttcttgtctggtaatggagttttgccctggtggtgacctgcatgttcttaggcagaaacaacctaccaaaaccttttcggaagcagctgcaaggttttatgtcgctgaagtcctcttagccttggagtatctccatatgttgggggtcatttaccgtgatctgaagccagagaacatacttgttcgagaagatgggcacatcatgctctcagactttgatctgtctctgaggtgctcagtgagcccaatgcttgtgagaatatcatccgtaggcagagatgagcccagcaggccttctggtccttgtgcacaaagctgcattgatccgctgtgtatccagccatcctggagcaattcctcttgcttcacgcctcgtctggtttcgtcacgaaggcctagagccgagcttctgaagaaaccatcacttccacagctcgttgttgaacctacggaagcaagatcaaattcgtttgttgggacccatgaatatcttgccccagagattattcgaggagatggccatggtagttcagttgattggtggactcttggaatcttcctttacgaattactctatggcaagacaccattcaagggacctggcaatgaggaaacactctcaaatgtgatctcacagggcttgaagttccctgataatccagctgtaagcttccacgctcgagatctgatcagagggctgcttgtgaaagagccagagtaccggcttggctcgtcgagaggagccactgagattaagcggcatcccttctttgaaggcctgaactgggccttgatccggtggaccgcaccaccagagaccctgaagaacattgacactgcaccaacacctgtaacgacacgcaagaaaaaggaaggcaaatgtctggaattccggctgaatggtgacgacatcgagttcgagctcttttagttgtagctgtagtggcatcgctgttgtagtgtcaaggatatatcaaatatcatgataagctagcaagagtagtcttagtccctcttccctgcagttttctgttgaaagttagtcatcgttgggaagtaaggtaagattggctgttaagcctgtaactttatgccttgttaataccatcaaatattagaagacacggttgggaaattcctgggcatgtgcgagatgctgagatgcagctggcagaaagtgtacattgtgttgctggatggaacaatttgtgcctcgcttacttgatgataca

SEQ ID NO: 100551 - DNA, 1038 bp, Zea Mays
atgcactacacgacgtggaagcgttcgcggatgtgcaaacgcgcgccgcaaattttcgtgttttggcttttgggcgaaacaagagatgggccgctacaactcatcgtcccaatcgacgacggcgggatcggcgtgctgccggcacgaggccttggcggccaggctctccaaccagagctcgtcgcgaaccacggagtccgcgtcgtcgttgcggtgccacgcccagtgcgccgaggtggtgttgaccaccctcagccgcccgtgcccgaagctcgcctccctcgtcatcgacaatggcgccagcgtgtggttcttgtcaaagttgaatgcaaggccttctctgttgccgccgtcgcctatggtgatgtacacgggtccgcacgggttcgcctcgttgtcatagacccttgcgaagcgttcgtaggcatgaacgtggccagcgaagacaacgtcgacgcgtgcctggaagagcagccgctccatggccttcctcatggcctcgccctcgccctgatgcgccgcgttcgtgttgtaccagggcgcgtgcagcagcaccacgagccagggcgtggcgcggcggtccacggcagcgaggtccctggccagccaccggtactggtccgagctggcgttgaagggggcgtaggagcccagcatgacgacatgcacggcgccccccgccgcgccgaaggagtagtagaggttgggccgtatgcggcgaacgggggcggcgagccggccgggaccggcaggggcggcgcctccacctcgtggttgccctgcgtgaccatccacggccgccggctcgcgtgccgctgcacgaaccgcccgaacgagtcccacagggcctgctgcgtgtcggcgtacgacaggtcgccgggcaccagcagcatgtcgtggcccgtcttgctggcgtgcgccagcgtcgacgccgtccactcggtctgccccaggtcgcctacgagggcgagctcgataggcagcgcggccggcggggtcctgaggctgaactccttccctgccttgccgcaccggtag

SEQ ID NO: 100552 - DNA, 1401 bp, Zea Mays
ccgcaatccaggactgttacctcctatatattatcgatcagaagctagcgctcttcagtacttcaggcttagccggccatgtctagggcgttggagcctctagtcgtcggcaaggtgatcggcgaagtcatcgacaacttcaaccccacggtgaagatgacggtcacctacggctccgacaagcaggtgttcaacggccatgagttctttccgtcggcggttctgtccaagccgcgagtgcaggttcagggcgacgacatgaggtccttcttcacactggtcatgacggacccagatgtgccagggcctagtgatccatacctgagagagcacctccattggatggtcactgacattcctggaacaactgatgcttcttttggaagggagcaggtgatgtacgagagccccaaaccctacatcggcttccacaggttcgtcttcgtgctgttcaagcagagcagccgccagtcggtgtgcccgccctcgtccagggactacttcaacacccgccgctttgccgccgacaacaatcttggcctcccagtcgccgccgtctacttcaacgcgcagcgggagaccgccgcgcgccgccgctgagcgatcacctgcagcgaccacatgaattcccaaccctacgtactactcccatctcatcatcgcatgcatggcgcagcatgcaagatagacctatcaatctggctacgtactatgcggcctttgctgtttcctaacaggccatggtcaaataagagcttatgactcgtctttggggctgatttggtaacaacatatttggaggggattccgggagaaacaacctttatattcatttgaatagaaagaagttttctctcctatggatctcctccaaatctctggtcaccaaaccagtctcttagggagagctagctttccttatctatgctagtccgttcttcagtttttgagttattagtagcctctctgtgtgcatgagcactcatggatgtaataagatgtaactcgtgggtacgtgtgccactagtgtgatcgtgttcaactcgatcagctattcaactcctacacatgcaggtgaaggatgcgtgaatcgtgctggaaacacgcttgctttgactagctaggagccgtcagctgtgcttgtgagagtcacgaaggctgcggacgtgtcgagtaacggtgaagggaggaggtaaaaggctgtggccatggcccatggctccagctagctagtgctctcccctcatattacctacaatgctgttatgcttgtgtgcctgcttgcaggcagtgtacttgttcctgaccctcttggattgtcttacttgtgtatgttatgatcactataatatatagccgagtgtttttcagactttgtcgagtgtttgtttgcggcactcg

SEQ ID NO: 100553 - DNA, 522 bp, Zea Mays
atgtctagggcgttggagcctctagtcgtcggcaaggtgatcggcgaagtcatcgacaacttcaaccccacggtgaagatgacggtcacctacggctccgacaagcaggtgttcaacggccatgagttctttccgtcggcggttctgtccaagccgcgagtgcaggttcagggcgacgacatgaggtccttcttcacactggtcatgacggacccagatgtgccagggcctagtgatccatacctgagagagcacctccattggatggtcactgacattcctggaacaactgatgcttcttttggaagggagcaggtgatgtacgagagccccaaaccctacatcggcttccacaggttcgtcttcgtgctgttcaagcagagcagccgccagtcggtgtgcccgccctcgtccagggactacttcaacacccgccgctttgccgccgacaacaatcttggcctcccagtcgccgccgtctacttcaacgcgcagcgggagaccgccgcgcgccgccgctga

SEQ ID NO: 100554 - DNA, 973 bp, Zea Mays
gttactctgatctttttccacatccctctcgcgcgcgcattatatcgccgtgcttgaagccagccaagaacaggtgttggcgtgttgctatatacactactgcgtacggattggtcgatcgagccgccgcggaccgctgtgtcgcatgcatagcttggtggagaccggctgcggcatggcgtcgttcagcgacgtcgaagcgctgccggagactggggaggtcgatcaccaggccaaagaatgcgaagctgaaaccgccgtgacggaagagaacttggcgacgctgcaggagcagcatgatgacaaggcgcccgtgccttatcaccaagaggtatttgcacccgagcacgccggagaggcaccggcgccagaggaacacggggacgagaaggacctgcaggtggcggagcccaaggcagcggcagatgatcaggagagcacgcgagacaggctgaagcggcacaggcgggagatggcggggagggtgtgggtcccggagacgtgggggcaggagaagctgctcaaggactgggtggactgcgccgtcttcgaccgccccatggtgccgatggggctgctgacggcgcgccgagcgctcatcgccgagtgctgcacacgccgcccggaccgagcggcgtcgtcgtcgtcttccaccagcagctccaacccgctccgggtgcggaacggctgctcctgatcgggtgctctcctctccttcagacctccgcctcccatcagcgagctaggctgaatcagcaagccttcttttattttctgctcaaataatgcatccttcttgttcgttgagttgtgacaagttctagtctcttgtttagctagcttctgaacaagcaggtgaaattacatatacgaacttgattggcttaaacgacaccgtcaataattctgagataattaaagatctctgttcgacgaatcgatgaatgcaaagttatgttcataagttgcacaa

SEQ ID NO: 100555 - DNA, 87 bp, Zea Mays
caacaaaaaggtcaaatcaagctatagggttttaacaattttcccacacatgagaaagaagcacatccttacattcccccctcccac

SEQ ID NO: 100556 - DNA, 2427 bp, Zea Mays
atcctccctccatcagttctcgtcctgttctttgctacgtacggctctgtgcctagctagcaatagcatagcaatgagggcgcttggaacggttgcttgggcatggctgctgctcctgcagcagctcgccggggcctctcatgtcgtctacgagaaccttgaggtggaggcgacgacagccgccgtgcggccctccattgtcgaccccctgctgaggaccgggtaccatttccagcctcgcaagaactggatcaatggtaactaaaacctactcgcttgctgacttggcccacatccaaaattttgagctgtctcccactttctagcagtgccatggtagcctttgttaactgagggagtcgtcaagttgagaacatgtcatgtccagttaccagtgtttagatccgtagcaaaatggccactttgtagctaagttggtagccctacttttttttgttggctttccttgtagttctaggctttatgcatgatacattagtaggtattgtcaaggattggctctaactggcttgtctattgacatcttccctgggctgctctgcgctgtgacctgtgtgattgcatcggccgcgaaactttgcaacgtcagatcccaacgctccactgtactacaaggggtggtaccatctcttctaccaatacaacccgaagggcgcggtgtggggcaacatcgtgtggggccactcggtgtcgcgagacctgatcaactgggtggccctgcaaccggcgatcgagccgagcatcccgtccgacaggtacgggtgctggtcggggtcggcgacgacgctggccgacggcacgccggcgatcatgtacacgggcgtgaaccggccggacgtgaactaccaggtgcagaacgtggcgtacccgcggaacaggtcggacccgctgctgcgggagtgggtgaagccgtcgcacaaccccatcatcgtgcccgggggcggcatcaacgcgacgcagttccgggacccgaccacggcctggcgcgccgcgggagacggcctctggcgcctgctcatcggcagcgtcaccgaggcgcgccacggcgtggcgtacgtgtaccggagccgcgacttcaggcgctggacgcgggcgcggcggccgctccactcggcggccacggggatgtgggagtgccccgacttctacccggtcggcgcgcccggccggcgcgcgggcgtcgagacggagacgtcggcggtgtccgacggcgacggcggctctcctcgtcgtcgtcagcaggccaagtacgtgctgaagaacagcctcgacctgcggcggtacgactactacaccgtcggcacgtacgaccgggcggccgagcggtacgtgccggacgaccccgccggcgacgagcgccacctgcggtacgactacggcaacttctacgcgtccaagacgttctacgacccggtgaagcagcggcgggtgctctggggctgggccaacgagtccgacaccgccgccgacgacgtggccaaagggtgggctgggatccaggcgattcctaggacggtgtggctagaccccagcgggaagcagctcctgcagtggcctatcgaggaggtggaggctctgagaggcaggtcggtcgctctcaagaacagggtgatcaagccaggacagcacgtcgaggtcaccgggatacaaacggcacaggccgacgtggaggtgagcttcgaggtgtcgagcctggcgggcgccgaggcgctgctggacccggcgctggccagcgacgcgcagcggctgtgcggcgccaggggcgcggccgtggagggcggcgtgggcccgttcgggctgtgggtgctcgcctccggcgaccgcgaggagaggaccgccgtgttcttcagggtgtttcgccgcggcggcggcggcggccacgacaagcccgtggtgctcatgtgcaccgaccccaccaagtcatctctggacgcgaacctgtaccagccgacgttcgcaggttttgtcgacacagacatttctaacgggaagatatctctcagaaccctgatcgaccggtcggtggtggagagctttggagccggtggcaggacctgcatcctgtcgagggtgtacccgtcgatcgccatcggcagcaaggctcgcctctacgtgttcaacaacgggagggctgacgtcagggtgtcccgtctcaccgcgtgggagatgaagaagccactcatgaacggcgcttgaaatgtttttattacgtgcgataagttggatttaattgcgtgatatggaatggtgctcgcctttgtacaatatggctagattatacaaaaatgagagcttccacgctcggtcgtgtggaaaaacctatgatgagtgtgtacgattttagggatgttcgattcagatgccactacacgggcaataactatattctaattcatgatttcatga

SEQ ID NO: 100557 - DNA, 2074 bp, Zea Mays
atcctccctccatcagttctcgtcctgttctttgctacgtacggctctgtgcctagctagcaatagcatagcaatgagggcgcttggaacggttgcttgggcatggctgctgctcctgcagcagctcgccggggcctctcatgtcgtctacgagaaccttgaggtggaggcgacgacagccgccgtgcggccctccattgtcgaccccctgctgaggaccgggtaccatttccagcctcgcaagaactggatcaatgatcccaacgctccactgtactacaaggggtggtaccatctcttctaccaatacaacccgaagggcgcggtgtggggcaacatcgtgtggggccactcggtgtcgcgagacctgatcaactgggtggccctgcaaccggcgatcgagccgagcatcccgtccgacaggtacgggtgctggtcggggtcggcgacgacgctggccgacggcacgccggcgatcatgtacacgggcgtgaaccggccggacgtgaactaccaggtgcagaacgtggcgtacccgcggaacaggtcggacccgctgctgcgggagtgggtgaagccgtcgcacaaccccatcatcgtgcccgggggcggcatcaacgcgacgcagttccgggacccgaccacggcctggcgcgccgcgggagacggcctctggcgcctgctcatcggcagcgtcaccgaggcgcgccacggcgtggcgtacgtgtaccggagccgcgacttcaggcgctggacgcgggcgcggcggccgctccactcggcggccacggggatgtgggagtgccccgacttctacccggtcggcgcgcccggccggcgcgcgggcgtcgagacggagacgtcggcggtgtccgacggcgacggcggctctcctcgtcgtcgtcagcaggccaagtacgtgctgaagaacagcctcgacctgcggcggtacgactactacaccgtcggcacgtacgaccgggcggccgagcggtacgtgccggacgaccccgccggcgacgagcgccacctgcggtacgactacggcaacttctacgcgtccaagacgttctacgacccggtgaagcagcggcgggtgctctggggctgggccaacgagtccgacaccgccgccgacgacgtggccaaagggtgggctgggatccaggcgattcctaggacggtgtggctagaccccagcgggaagcagctcctgcagtggcctatcgaggaggtggaggctctgagaggcaggtcggtcgctctcaagaacagggtgatcaagccaggacagcacgtcgaggtcaccgggatacaaacggcacaggccgacgtggaggtgagcttcgaggtgtcgagcctggcgggcgccgaggcgctgctggacccggcgctggccagcgacgcgcagcggctgtgcggcgccaggggcgcggccgtggagggcggcgtgggcccgttcgggctgtgggtgctcgcctccggcgaccgcgaggagaggaccgccgtgttcttcagggtgtttcgccgcggcggcggcggcggccacgacaagcccgtggtgctcatgtgcaccgaccccaccaagtcatctctggacgcgaacctgtaccagccgacgttcgcaggttttgtcgacacagacatttctaacgggaagatatctctcagaaccctgatcgaccggtcggtggtggagagctttggagccggtggcaggacctgcatcctgtcgagggtgtacccgtcgatcgccatcggcagcaaggctcgcctctacgtgttcaacaacgggagggctgacgtcagggtgtcccgtctcaccgcgtgggagatgaagaagccactcatgaacggcgcttgaaatgtttttattacgtgcgataagttggatttaattgcgtgatatggaatggtgctcgcctttgtacaatatggctagattatacaaaaatgagagcttccacgctcggtcgtgtggaaaaacctatgatgagtgtgtacgattttagggatgttcgattcagatgccactacacgggcaataactatattctaattcatgatttcatga

SEQ ID NO: 100558 - DNA, 844 bp, Zea Mays
gcgtccctcttcccaaccctaaccttctctcccccactccgccgccgcattgagcacggggtcgcaaacctcgcctccggtcctccgcacacagggcagcgactctgcgtgcgcacctcccgcctccggtgggccgtcgcgccgcaccccggcggctgcactgctcgccgtgggcgggtagcgggagccagcagccgctgctgctccacctaggcggccgcgccgctatgttagcgcttgtgccccaagcgaagcgttacccatccgcttagcgcgtgcgtctagtgccgcattttggaacccggagcgatagtacatgcagtatttcaatcttggtttcttggtcactgaccgtaacactttgctttgtatgcatggcccttaagatcgcctcccttttgctatgtgggagcgtgtcgagtcatagccatgcaaaattaacgacgaggtcccagagagtttttctctggaacttcctcccttcctgttgcagttctaggtgtcttcatccggggcatcgagttccctgtagtgtatgaccattatgtggcagctgttttctgcagcgcttctgtgagctcatcactcgtgcgactctttgccaaatcaaatggagatgtctaagctttggaagggaacatgttttaaaaaaaaagaatttgtgaattgtttcctcggatagttctaccataatttcgaatttccattagttcagtcaaactgcagtacacagttttaccattagtcttaattctactgattgtcaattttcttttcaactttgacctttaagatgtcttgcttccagtggatcaatgttcactaattctggtttctgttaaga

SEQ ID NO: 100559 - DNA, 1351 bp, Zea Mays
caagcagaacgtgtgcagggcgcgcgtgatcgccccggccaccaccacgcgtccccccggctccgcagaccgcacggccgcgcagccgtggtgccacgctatgggacagcaaggcgggcgcagaagagaagagaggcagacaggctcactagtgggagatggtgactactacgatcgaggacctccacggcgacgtgctgggctgcgcgctgcggcggctggacgggcggtcgcttgcggcggccagctgcgccacggtcgcgctccgggcgctggccacggacccggagacgtggcgcgcgctctgcgtcgccgagtggccgtcgctggcgctggcgctggcggcgcagcgccggctgctcgcggcggtcccgccgcagcggctcttcgccgacgcgcacccgttcccgtccgcggacaccgggggagccggaggtcccgaccccgaccccgtccccgccggggagctggtctccgcggtggacgtctactacaggggcgcccccctgctgtcccgcttggtggagacgcccgcgtcctcgccgtggttcctcggctcgccgttccgcgtggaggccgtggagcggaagaggccggcctccgccgccgcggtgccctcgccggcggagctcgagctgagctgggtggtcgtggacccggcccgcggccgcgcggtcaacgtctccagccggcgccccgtggcggtggcccggcactggtacacgggcgagacgctggcgcggttcgccgtggtgctgggagggtgcaagttcgaggccaccgtcgcctgctccgagggggcggatgggcacgtcagcgaggtcagcctggccgtggaggacgccgacggcgccgccgtcagcggcgagggcacgctgcggctcctcgccgcggcgatggaggccccccggaagggaggggcgcgggagccggaggaggcccggaggcggtacctcgacttcgtgaagcgcaagaaggggaggaaggagagcaaggcgcgccgcgaggcgctcgtggacctgtgctgctccgctgccagcgccgtcgtcgtgctcacctgcctcgccgctgtcgcgctccggtgaccggcgcctgctgcctgctgcccggacggacgagcgcgtgtattgggcactagccactaggcaaggcagctgcacacaggacgtgtcgtaacatctcgggtagcacttgagtattagcgtacaacgtcgggtggcgatcttttctccaacgctctttttctctctctcttcttcttcccggtaacagttaggaacagcacatcatcatgtcctgcactggtgtgcatcgttttcctatcctataacaaacgacgtgacagcaatac

SEQ ID NO: 100560 - DNA, 302 bp, Zea Mays
cggcaacatgcttcggcaacatgcttcggcatatacacaaccaaacttgtcggcattgggacccttggtggatgaatggagtctgcattaggaagtcaaggagcacagggctcttgcactgggggcaccaaggatcatcttgtgggagcatgacgtagatgaagcagcgaggacaggcagcaagaaccatggatgtggcctcagggctgttggaccactgcaggccatgctcgttctctgacgacaggcaggagctcggggatgactcctcatcagccatcaccctcccggaggagtcccct

SEQ ID NO: 100561 - DNA, 219 bp, Zea Mays
atgtattctgatttctctggaccaagtgtttggagcacaactgcacagctacagcagtctgaacagctgccgaagaggtgggaacagtgctggcctcaagacatcaccgacaaggatgtgcagggcctgctgacactcactaagaccattggggctgaatgccgtgccttctcaactatcctactggactgggctgaaaatgaactcccatcaacctaa

SEQ ID NO: 100562 - DNA, 1544 bp, Zea Mays
cagacagtcagactgctagacaccacagcgtgctcagacagtcagaacggatcgagcgttcatggagattggtggtcagacggagagcggtgccaatggaggcggcggcggcgggttccgggcggcgaggtgctgggagctgctccgctgggcggcgggcgtgctccggggcaaggccgtcgggctcgccggcaggctgggcaggatcgcgagggacgagccccggcgggtggcgcactcggtcaaggtcggcctggcgctcacgctggtgtccgtgctctactacgtcaggcctctgttcaacagctggggggcctccaccatgtgggccgtgctcaccgtcgtcgtcgtcatggagtacaccgtcggtggcacgctgtgcaaaggcctgaacagagcgtcggggacgctggtcgccggcttcatcgccgtcggggctcacaaggtggcctacatgtgtggggacaaggcagagcccgtactgctcgccatcttcgtcttcttactgtcgtcggcggcgacgttctcgcggttcatcccggaggtgaaggcgcggtacgactacggcgtgaccatcttcatcctcaccttcagcctggtggccgtgtcgagctaccgcgtcgacgagctcatccgcctcgcgcaccgccgcttctccaccatcgccgtcggcgtcgccacctgcctctgcaccaccatcttcgtcttcccggtctgggccggtgagggcctccacaagctcgccatcgcaaacctcaacaagctggcggagttcttggaaggaatcgaatctgaatgcttcagagagaacgctacattcgagaatttggaagctaaaccctttctccaagtgtaccagagcgtcctcaactccaaggccactgaagactctttgtgcaacttcgccaagtgggagccatgccatggcaaattcaaattgcgacatccatggagccaataccagaagctcggcgctctttgtcgcgagtgcgcttcttcaatggaggctctctcctcctacgtcgtcaccctagcaagaaccgagtatcctgaagcgcatccggagctatgctcacagcaggttcgaacagcatgccgccagatgagcttgcactcggccaaggcgctccgagagctcacagcagcgatgcggacgatgacgactgtaccgtccccagccagcgtccacgtgtctgcagcgatcaaagcggcgaaaggcctcagagacgggttatcagagggtgcggatctggcgcgagcgatgcatgttgctgttatcgcatctcttctctctgagttggttaccaagaccaagcagatcactgagtccgttgatgtcctcgcgcgacttgcccgcttcagaaaccctgaaaccactcagactcacaagggtgtggctatcgatgtagtgagctgagagtgagaagcagacgatcttcggtgggacttcactagtgatactctgtatttgtatcagaagccttttgctgaatgggataaaacagcgagctagtatgaagtacaatactaactgtgcatacagc

SEQ ID NO: 100563 - DNA, 2582 bp, Zea Mays
gggaccggagcaaacgaggcggccgccggccggactcgagagcgcaggaagcgcacaatccgcgcctccccaaccccaagccccgcctcccattcccccccgtcctgccccctccaaacacactccgcgcctccgagtcgggcgggccatcctcctcctcctctgaccctaccgcaaccgggatggcgcgtggcggcgagagaagatcggcgtcgtcgtcgtcggctgcggcggcggcgggggtggcttggggagtggccgtcgagggctctcgcagtagatgacagtctgataccccactgccttcactgagtgctagagcccctccttgtcaattcactgtctggtgctgaatcgagttcattgaagatgccaaggtccgaatcagacagtgatgatgttttcttcgatgcatttgaagatgttctatctgcaggggaaccttcgttttcagaggattgcagcacaagtgatgaagtttcagggccaatgaaattagagtatgagatttgggcaaacgaaccaattagtgttcaagaaaggcgccaaaggttcctgaagggaatgagactcgatgatttcgtgtctacgaggataggttcttttcaatgccatggtgaaatcacagccgtcgagtcttccactgacatggaggagagaactgtcagtggcctttcttccggggattcatctgtttgtgacaatgagtcagattttgacggtgcctgttgcataagggatacggatactggaaagagatatattgtccacaatggtgcacacagcagtataactggcatgcccaaggaggttggatcagataaggtgatgactcttctggagtttgagagtttgcttggcctctctaggtctgttcaaaagttattgcggaggggatgtggtaacagtcctgcaaaagaaacaaaaagtgctaaggaaaaggacggcaaaagctcgtcaaggaaattcgttacaaagagaagctttggtggcatttgcaagtacgatgtccatgtgaaaaattgcacaaacagtataccaaccagaacaagagttcagcaccggaagaaaaaatttcttgaattctctgctgtgtacatggatcaagaaatcagagctcacaagggttcaattagggtcatgaaattcagcccatctggctggtatttagcaagtggcggtgaggattgtgctgtacggatatggcaaatcatagaagtagaagcatctcctaagttatacaggggagaggatccgcatgaaaaggtggaaaaagttcaggtctttaagacaaatataggaaagaagcacaaccctgcacttgcagttatacccaagaaggtttttcgtatatcagagactccattacatgaatttcgtggccatgcaagtgatatccttgatatggcatggtccaaatcagattgtctgttaacttcatctaaagataagacagtgcgcttatggaaaccgggctgcgacggttgtctcgcagttttcaaacacaaagactatgtaacatgtgttcagttcaaccctatcgacgagaaatacttcatgagcggttcattagatggtaaagtgcgcatttgggatgtgttggacaaacgagtaactggctggacttatacgcgaactatcataactgctttgagttaccagtcagatggaaagggttttgttgttggcactattgcaggcgcatgtcgtttctatgatcaatctggtgaaaacatccagctagagaaagaattgtttgtgcaagggaagaagaagtcagccgccagtcggatcaacaatctaaagttatgtacaagtgattccaatagggttgtagttacatcaggagattccaaaatccgagtcgtcaatggtgataccatccaaaagtttgaagggccttggaagtcgaaggctctgtcatcgccgtcattaacatcagacggcagataccttatatctgtgggcaaagattccaacgtctacatttggaacttggcgaactctagagatgcaagatcggttcattcgtgcgagctgttcttctccaaagctgtaactaccgcagtaccatggccgggagtgtaccaagatgggcacacgaagccttcctatctgactgagaaatactgcagcatgcccattttgcgccaccacggggagtgccagtccgctgagccgtggtcgttcgtggacggcagcaagggattggcgacatggcctgaagagaagttgccttctacagcaaagcctggaagcagcccgcagctgggcgactgtctctccatgatatccgccgcgtggagcacggtcatcgtgaccgccagccgcgatggcgtgatccgatcttttcacaactacggcttgcccgttagattgtgagcttcgagaccggtttgaggtagtcagtggagcgccgccatggttggtgactgataatccgctaaggttttgtaagtttttttttctttttcttttctggtcagagttactagaaattatttatgtaacatttttagatcattaatttcttgtgaagagatgatctgtagtcagtccaaggccaaacacttgtgctgttt

SEQ ID NO: 100564 - DNA, 677 bp, Zea Mays
atttgcaattctgcacgaccaaaacccgtcacttctttcttcaaccccttcacacacacacctgccatcgcgatcggctccatttctctccgtctcctcgttgtcggtggtcgctcatggggtgctgttggttctcgctcgtccttgtcctcgtgctgttgctgccaagctgccaggcttcgagttggagaggcgtgcaggtgcagccgttgaaggcccggccgccgctgcagggaggcgcatcctccaacagcttcctcgggttcctgccgaggcaggcggcgccgccgtccggcccgtcccggcagcacgactccgtcggcctcgagagccagcggcagaggcagccgtgaaggcgtgaagcgaagcaacacctaccaccatccaccaatagcagcaggagagggcatgcaggtggttgtgtgtatacgtaggccgtagggagagggtagaggaagatagaaagggggtatataggatatagaagttggacaggatgaaatatatacgtaccgccggtgtcatggcatctatgggtggttaaattagataattgtagcatgccttgattaaggattaactgtatctttatgctgtagcatatatacatagtatgatgcagtatgttttttgttgttgttgttgagtttttaaagagatgtccttgttcttttgaa

SEQ ID NO: 100565 - DNA, 586 bp, Zea Mays
cctctcgcccctgatgcggcgcgcgagctggatgtccttgggcatgatggtgaccctcttggcgtggatggcgcagaggttggtgtcctcaaagagacccaccagatacgcctcggcggcctcctgcagcgcggcgacagcggaggactggaaccgaaggtcggtcttgaagtcttgcgcgatctcacgcaccagccgctggaagggcagcttccggatgagcagctccgtgctcttctggtacttgcggatctcgcggagagcgacggtgccggggcggaacctgtgcggcttcttcacgccgccggtggccggagccgacttgcgcgccgccttggtggccagctgcttccgcggcgccttgccgccagttgacttcctcgccgtctgcttcgtgcgggccatcggagagagctgcgagagggcgggcggcgctgcgcgatcgaaggatttgaaattggaaatcggatgcgagctgtggatgctgggcctgtgtctcggggcgggcatttgtagcaggcagaagcagggcgggatcgcgaaaattttgggggacacggcgtcggccgtcggatggagatggacg

SEQ ID NO: 100566 - DNA, 2409 bp, Zea Mays
atgcatctccttgccgctctttgcggcatccttttctccctgctgcacactcctacatgctcggcagcgacagatacactctcgcgcggtggttcgctggccggagacgcgaggcttgtctccagcaacggcaagtacgcactcggcttcttcgagaccaacagcaacaatcccacgcacaacgcctccaactcgtatcttggaatatggttccacaaagtccccaagctgacacccgtgtggagcgccaacggggacaatccggtctccagccctgcttcgccggagctcatgatctccgacgacggcaacctggtcatcatagccgacgacggcaccaaggtctggtggtctacccaggccaacatcacggccaacaccaccgtcgtcgtcgctgttctgttggccgacgggaaccttgtcctgcggagctcctccaactcctcggacgtattctggcagagcttcgaccacccaaccgacaccctgctgcccggtgcgaagctgggcagaaacaaggtcaccggtctggaccgccgttttgtttcaagaaggaattcgaacgaccaagctcctggtgtttattccatgggcctaggtcctggcgcccttgatgagagcatgaggctctcatggagatctacggagtactggtcctccggtgagtggaacggcagatacttcgacgcaataccggagatgtcgggtcctcgttactgcaagtatatgttcgttaccagtggcccagagttctacttctcctacaccttggtgaacgagagcacagcgtttcaggtcgtgctagatgtctctggccaatggaaggtgcgcgtatgggactgggacagaaacgactggatcacgttcagctactctccaagaagcaaatgtgatgtctatgctgtctgtggagcctacgggatctgctctaacaacgcaggtccgttgtgctcctgcatgaagggattctctgtaaggtcgcctgaggactgggaaatggaggacagggctggcgggtgcatcagagacactccattggattgcaacgcgacaagcatgacagataagttctatcccatgccatttagtaggctgcccagtaatggcatgggtctgcagaacgctacaagcgcggaatcatgtgagggatcttgtttgagtagctgctcttgcactgcatattcctacggccaaggcggttgctctctgtggcacgacgacctaaccaatgtagcagctgatgatgacactggcgagactctctaccttcgccttgccgcgaaagaggtccaaagctggcaagaccgccatagacatggaatggtcaccggtgtaagtgttgctgtgggcgtaagcactgccactgtgatcaccctagtgttggtctctctaattgtgatgatgatctggaggcgaagcagtagtcatccggcggacagcgaccagggtggcatcgggatcatcgcattcaggtacgctgatataaaacgcgcaactaacaatttctcggagaagctaggcacgggtggcttcggctccgtatttaaggggtgcctaggtgagtcggtcgccatagccgtgaagaggctagacggcgcccaccagggagagaagcagttcaggtccgaggtgagctcaataggcatcatccagcatgtcaacttggttaaactcgtcgggttctgctgcgaaggtgacaggagactccttgtctacgagcacatgccgaaccgttccctcgacttccacctgttccaccagagcgcgcatggcggtggcaccaccggtttgcgctgggacatcaggtatcagatagctctcggtgttgccagaggcatagcgtacctgcaccatagctgccgagactgcatcatacactgtgacatcaagccgcagaacatacttctcgacgcgtccttcgttccgaagatcgcggacttcggaatggccaagtttctcgggagggatttcagccgcgtcctgactacgatgagaggaactgttgggtacctcgcccctgaatggatcagcggaacagccatcacatcgaaggtcgatgtttacagctacggcatggttttgctggatatcgtatcgggaaggaggaacgccggcagagaagcttccaccgacggtgattgttgccatgccaagtgttgtttccctgtgcaggtcgtggacaagcttctcaacggaggcgtcggaagccttgtggatgcaagcttgggcggcgatgtcaacctagacgacgttgaaagagtctgcagagttgcgtgttggtgcgttcaggataatgagtatgatcgccctacaatggttgaggtggtacagtttctcgaaggcctgtctgagcctgatatgcctcccatgccaacattccttcatgctatcgctggtggatcgccttga

SEQ ID NO: 100567 - DNA, 939 bp, Zea Mays
cgactgggagccatgctatttcttatttctgctttgctttcacgaggattggaagacatccaagcagacagggatgatccaagccagccattggtcactgctccatttggtcatgcttcacaggaaattgtgaatttattgctctgtggagaggctgttccaaatgtatttgatggcaagatggaccttggtggtggcatgtccttgaagggcataccaaacaatgttgaagttggttttcttaccctcctggaatcactaaatctctgcaaggttggtctgtacttgaagtgcccaaagtggccgatatgggttgtgggaagtgaaagtcactacacagtcctttttgccttgaaccccaacgttcaagaggagaatgagctggaagagcgcgaatcaaaaataaggagggcttttgatgcccaagatcaaagtggaggtggaggctttatcagcgttgagggcttccaacaagtcctcagggatactgacataaattttccttcggataaactcgaggacctatgtaatgctggaattatagtatggagtgaattctggcaggcattgctacaattggataaaagggctggaggcatgaaggatccaactggtcttatgggcaagaagcaattcaccatcttccacttcaatggaattgccaagtctgtgctgaatgggaatgcaagtgcaggtggttcatgtcctatacagagacccaggttatgcaagctaaatgtcactgtccccccaaggtggactcaagatgagtatctggctgatgttgtaagcgcatcaaccagcagcaaggacgacattattctttctctagcgcccccaggtcagactaatcagcacgcaccattggtggactgcattaggacacggtggccacgagctgtttgtagctgggttggagatgttccaagcattgtctga

SEQ ID NO: 100568 - DNA, 1300 bp, Zea Mays
aagtgcccatcaacctgtttgctgaaccatgtcaacactatctttatattctgaccatgtataactgtcctttaagtacaggaagatatccaagcagacagggatgatccaagccagccattggtcactgctccatttggtcatgcttcacaggaaattgtgaatttattactctgtggagaggctgttccaaatgtatttgatggcaagatggaccttggtggtggcatgtccttgaagggcataccaaacaatgttgaagttggttttcttaccctcctggaatcactaaatctctgcaaggttggtcagtacttgaagtgcccaaagtggccgatatgggttgtgggaagtgaaagtcactacacagtcctttttgccttgaaccccaacgttcaagaggagaatgagctggaagagcgcgaatcaaaaataaggagggcttttgatgcccaagatcaaagtggaggtggaggctttatcagcgttgagggcttccaacaagtcctcagggatactgacataaattttccttcggataaactcgaggacctatgtaatgctggaattatagtatggagtgaattctggcaagcattgctacagttggataaaagggctggaggcatgaaggatccaactggtcttatgggcaagaagcaattcaccatcttccacttcaatggaattgccaagtctgtgctgaatgggaatgcgagtgcaggtggttcatgtcctatacagagacccaggttatgcaagctaaatgtcactgtccccccaaggtggactcaagatgagtatctggctgatgttgtaagcgcatcaaccagcagcagcaaggacgacagtattctttctctagctcccccaggtcagactaatcagcacgcaccattggtggactgcattaggacacggtggccacgagctgtttgtagctgggttggagatgttccaagcattgtctgacacagtggatgtcgtgtgcgcactagtcgctctagctatgttgctcgtaacctcgttctgaagaatctgctcagagcaagccacttggagcttcctgattgttcatgccctgcaaaaaggaatcgcccaattacatggtttgttcggtcaaaatgagtgatgttttaatgcgtgttattaatcaagggcctggatatttttttttgcttttattgacattagatgtacacttgatttatggatatgttgtgtcttgggttacattcttttctgtacacatatagtttcgtttgtgtttttcatttcatctgacacagtgagttgtcta

SEQ ID NO: 100569 - DNA, 1481 bp, Zea Mays
aagtgcccatcaacctgtttgttgaaccatgtcaacactatctttatattctgaccatgtataactgtcctttaagtacaggaagacatccaagcagacagggatgatccaagccagccattggtcactgctccatttggtcatgcttcacaggaaattgtgaatttattactctgtggagaggctgttccaaatgtatttgatggcaagatggaccttggtggtggcatgtccttgaagggcataccaaacaatgttgaagttggttttcttaccctcctggaatcactaaatctctgcaaggttggtcagtacttgaagtgcccaaagtggccgatatgggttgtgggaagtgaaagtcactacacagtcctttttgccttgaaccccaacgttcaagaggagaatgagctggaagagcgcgaatcaaaaataaggagggcttttgatgcccaagatcaaagtggaggtggaggctttatcagcgttgagggcttccaacaagtcctcagggatactgacataaattttccttcggataaactcgaggacctatgtaatgctggaattatagtatggagtgaattctggcaagcattgctacagttggataaaagggctggaggcatgaaggatccaactggtcttatgggcaagaagcaattcaccatcttccacttcaatggaattgccaagtctgtgccgaatgggaatgcaagtgcaggtggttcatgtcctatacagagacccaggttatgcaagctaaatgtcactgtccccccaaggtggactcaagatgagtatctggctgatgttgtaagcgcatcaaccagcagcagcaaggacgacagtattctttctctagctcccccaggtcagactaatcagcacgcaccattggtggactgcattaggacacggtggccacgagctgtttgtagctgggttggagatgttccaagcattgtctgacacagtggatgtcgtgtgcgcactagtcgctctagctatgttgctcgtaacctcgttctgaagaatctgctcagagcaagccacttggagcttcctgattgttcatgccctggaaaaaggaatcgcccaattacatggtttgttcggtcaaaatgagtgatgttttaaaatgcgtgttattaatcaagggcctggatattcttttttttttgcttttattgacattagatgtacacttgatttatggatatgttttgtgtcttgggttacattcttttctgtacacatatagtttcgtttgtgtttatcatttcatctgacacagtgagttgtctagccagaagccggttgagtaaacaaggatcaaacttcaacgatcatatcatgccgctgtactctttgattttatgtttgggttagtttgaatctgcttaggcactttccattgagacactctcttcttgggatgtgtgggtagaaataaagtcatgtattgaaacttatgaagt

SEQ ID NO: 100570 - DNA, 2726 bp, Zea Mays
ttactctaataaaactcacaccgaaaattgcctccaaacacgaaaaacacggaggtcgggtactagcggttggagagcgcagtccccggacctgaccggtcgagtccttcggccttcccaaaacgcggaggtcgggtactagcggttggagcgcaggctgcgcagtccccggacctgaccggtcgagtccttcggccttcccaaatcgcatctcttgacactgcttccgtcccgtcgcctcgccgccgcgacgagacgaccccgcccctacaaatacaccgccactttggccgcgtcagccgccgccacttcccagatcccgatgtcccgcgcccagattccactcccttgttgcatcgctactctgttcccagctcggggcctctgacgaggcccgaggcgcaggcgccaacctcccggcccgccctagggtttggggctgatcgatccggctaggtcttggcgggagctgctccaatgggggatcgggaggaggacgaggagctccagatggcgctccgcatgagcctccagggctccccgccggcgcagcctgagcccaagcgcagcaagcccccgccccccgctgcggagtcgccggaggcagaggcgcgccggaagcagcgcgagctcatggccgccgccgccgagaagcgccgccgcggtgcagcgtcaccggcctccgtctcggtggcgcggtctcttctgcagccagtggtggtggagtcagcccccgccccggaggtcaccaaagagcaggtggaggagccggaacaagctggcgtatctatggaagaagcgaaggaggtggaggaggaagaagaagaagaaaagggggaggagttgcctccagatgtcgctgagaatctatgggcaatggtgtttgggagaggtgtttcaaaggcggtcttggcgcagtggagtaatcagggcataaggtttagctctgatccagaaacaactatgggacttgtacaacatgaaggaggtccttgtggtgttttagcaaccgtgcaggcttatgtccttaaatatcttctgtttttttctgatgacttgagtaatccagagatcagtaacccgctgtatactctgggacaaagacgcttttatcagagttcttttgctgcaggggatgatttttcatcccttactgatgatagaaagacaagagcattggttcatgctatggtggagattctttttttatgtggaactggaaaaagagctgttgtagcatctgttgcacgtgccaatcgtggaaaaattgatgcagctttggaagatctttctgtcgaatcagcagtggatctgcagaaagttcttaaaacaagtacatttacttcaaggaaggatgcattcaacacccttttggctaacattcctttgtttcaaagtcgactgggagccatgctatttcttatttctgctttgctttcacgaggattggaagacatccaagcagacagggatgatccaagccagccattggtcactgctccatttggtcatgcttcacaggaaattgtgaatttattactctgtggagaggctgttccaaatgtatttgatggcaagatggaccttggtggtggcatgtccttgaagggcataccaaacaatgttgaagttggttttcttaccctcctggaatcactaaatctctgcaaggttggtcagtacttgaagtgcccaaagtggccgatatgggttgtgggaagtgaaagtcactacacagtcctttttgccttgaaccccaacgttcaagaggagaatgagctggaagagcgcgaatcaaaaataaggagggcttttgatgcccaagatcaaagtggaggtggaggctttatcagcgttgagggcttccaacaagtcctcagggatactgacataaattttccttcggataaactcgaggacctatgtaatgctggaattatagtatggagtgaattctggcaagcattgctacagttggataaaagggctggaggcatgaaggatccaactggtcttatgggcaagaagcaattcaccatcttccacttcaatggaattgccaagtctgtgccgaatgggaatgcaagtgcaggtggttcatgtcctatacagagacccaggttatgcaagctaaatgtcactgtccccccaaggtggactcaagatgagtatctggctgatgttgtaagcgcatcaaccagcagcagcaaggacgacagtattctttctctagctcccccaggtcagactaatcagcacgcaccattggtggactgcattaggacacggtggccacgagctgtttgtagctgggttggagatgttccaagcattgtctgacacagtggatgtcgtgtgcgcactagtcgctctagctatgttgctcgtaacctcgttctgaagaatctgctcagagcaagccacttggagcttcctgattgttcatgccctggaaaaaggaatcgcccaattacatggtttgttcggtcaaaatgagtgatgttttaaaatgcgtgttattaatcaagggcctggatattcttttttttttgcttttattgacattagatgtacacttgatttatggatatgttttgtgtcttgggttacattcttttctgtacacatatagtttcgtttgtgtttatcatttcatctgacacagtgagttgtctagccagaagccggttgagtaaacaaggatcaaacttcaacgatcatatcat

SEQ ID NO: 100571 - DNA, 396 bp, Zea Mays
atgtcggtgtcgctgatgggcaccatgccggctctgagaccctccgataggaactgccggagctcccgctttacgccgtgcccgccagggaagacggagagcccgcggacggcagaccggcccgagctcgccggttccgacaggcccagccaccgcgccaccaccgagtgcacgccgtcacacccgatcaagaccttggctcggatcaccgtgccgtcgtccaatccaaggacgacggtcaccgacgagtcgccggctgctcgctcggtgtcgatggagacgaccttggacgagaaacggacggtgcccggcggcagctcctccgcgagcgcctccagcagcgccttcctgtcaagcgccctcactctgacttcttcgccccttgttgtttttttt

SEQ ID NO: 100572 - DNA, 936 bp, Zea Mays
caactggccaaccctatctatctacatgtaagacgcgctatcctatgtgtcgaaggctacacacgaacagccgcagcaagtatataatacttggccagttccagttgtgccattgccgcgtccacggctccacccctataaatgctggccatgaggcaccacggtttcttcaattcatccagacaagtcatatctagctagtagctccctgaaaagttcactagagaagcatttgagggaggagccatgtctgaggagaagcaccaccaccacctgttccaccaccgcaaggcagaggaggaggaaggcgcctccggcgaggtcgactacgagaagaaggagaagcaccacaagcacatggagcagctcggccagctcggcgccatcgccgccggcgcgtacgctctgcacgagaagcacaaggccaagaaggacccggagaacgagcacggccaccgggtcaaggaggaggtggccgccgtcgccgccgtgggctccgccgggttcgccttccacgagcatcacgagaagaaggacgccaagaagcacgcccacaactgatccgtcgcaggctgcctcagccgaagcagcagcacatcgtcgcggttgctgtttcatctgttctcccagcctcgtcttcgtctactgtgtgccgggcaggccttgatttgaggctttgagctaccgatatttgcacggacgtaggaactgtgttggtcctcggcgttcttgtatcaagatcaaatcaggccttcaataagtgtgtgtgtgtgcatatatcttttttttaaaatttatctctttttttttgtatcgagagatgttctgaataatgtgaatttacgtgtgtttatataaacgaatttaagaagtccgccctgatttgcttcgtctttaactaaaacacgcaatgagaaatagtactccttgactatt

SEQ ID NO: 100573 - DNA, 1469 bp, Zea Mays
tataaatacgtgctccatccacacgtcgttaaaacagcttcatcgtcgtcgagcaaagcagctagctagctacagagccagagagatacggaacgttagttgttttgagcagctagctatctagttagctaggtaagtaatggcacggcgacaacagtggagcaggggcggcctcgcggccgtggcggtgctcgccgtgctgtgcgtgctctgctcgggccacccggtgccgggcgggcatggcagcggcggcggcgggttcgtcaacacgctgcagccgcacttctacgaccacgcgtgcccgcagatgcaggccatcgtgggctccgtcgttgcgaaggcgcacgcggaggacccgcgcatggcggcgtcgctgctgcggatgcacttccacgactgcttcgtgcaggggtgcgacgcctccgtgctgctggacgccgacggcagcggcaggttcgtcaccgagaagcgctccaaccccaacaaggactcgctccgcgggttcgaggtcatcgacgagatcaaggccgcgctggagcacgcctgcccgcgcaccgtctcctgcgccgacatcgtcgccgtcgccgcgagggactccgtcgtcctgaccggcggacccggctgggaggtgccactggggaggagggactcgctgacggccagcctgagcggctcgaacaacctcatccctgctcccaacgactctctccccaccatcatcggcaagttcgccaaccaaggcctcgacatcgtcgacctcgtcgcactttcaggagggcacaccatcggcgactcgcgctgcgtgagcttccggcagcggctgtacgggcagaacaacaacgggcaggtggaccggacgctgaacccggcgtacgcggcggagctgcgggggcggtgcccgcggtcgggcggcgaccagaacctgttcgcgctggacccggcgagccagttccggttcgacaaccagtactaccacaacatcctggccatggacgggctgctcagctccgacgagatcctgctcacgcagagccgccagaccatgggcctcgtccaccgctacgccgccgaccaggggctcttcttcgaccacttcgccaagtccatggtcaagatgggcaacatctcgccgctcaccgggagcgccggcgagatcaggcacaactgcaggagggtcaaccactagtaattctaaggagggatgcatatatacggcaatccgtgtggtgcacatcctttgatgattttcatatgtggatgcttcgtatttcatgcttggatttaagtgtgcagtagtatttaaatggctggaatttctgcattattttggttggatttaagtgcgcagtagtaaatggtcgcaatttctgttttaatttggctacgttctcgagtggatttttcactatgtaattcgccattcatgtaccaagaaacgattcaataaaattcatctttcgtgtcgttgc

SEQ ID NO: 100574 - DNA, 255 bp, Zea Mays
atggcgaaaacgatgccactgcgcgagtcggtgtcggggctggtgtcagatgattatggggaggaggtgcctgctcctgcgccctctaccgagaatggggtggtgcggaggtggaggcttgaggggagagagaaaagaagcaggatggtgaatgaggtggtggcaactgaggcgaggaccatcattatcgtgcggaggtatagatggccaaatgggccgtgtctggcgagccggctcgaggcacgatccatttaa

SEQ ID NO: 100575 - DNA, 719 bp, Zea Mays
ttccataaggtctcttagatttaattatgttggcatgttatggttcctccaaggaacttggccaggtaaaaagtcattcgttaatttcagacgagcaatcgcattccattttccattcagtgaggacaacacgtccgaaatagccaaataggcacggcatagaaagcacccaccatcatctacttcagacgttacaacgacgaacagcagcagcgcgacagctcaagccctctcgcccctgatgcggcgggcgagctggatgtccttgggcatgatggtgaccctcttggcgtggatggcgcagaggttggtgtcctcgaagagccccaccaggtacgcctccgcggcctcctgcagcgccgccacggccgaggactggaaccgcaggtccgtcttgaagtcctgcgcgatctcgcggacgaggcgctggaaggggagcttgcggatgagcagctccgtgctcttctggtacttgcggatctcgcggagcgcgacggtgccggggcggaagcggtgcggcttcttcacgccgcccgtggccggggccgacttgcgcgccgccttggtggccagctgcttccgcggcgccttgccgccggtcgacttgcgcgccgtctgcttcgtgcgggccattcggagcggagaggaggagggagcagtctgcagacctggatcgggcggtggcggcggcaagggcagatttgaggattcgcgtgtgt

SEQ ID NO: 100576 - DNA, 1874 bp, Zea Mays
gcccacccagatatttcccaacaccatatgactacacgtgtgaaggctggtgtcttccaaccaaagaaattcatgaatcttcacgtcactacacaacctgctatttcacctatcccttattcttaccgtacagcccttacggatcctcactggtacaatgccatgttagaagaatttcaggctttgatgactaataatacttggagtttagttcccaaacctgcaggtgccaacgttgtcagtggtaaatggatttttcggcacaagctgcacagtgatgggtccttggctcgctacaaagcacgctgggttgttcgtggctgttctcaacaggagggtattgactatggagaaacttttagtccagtcattaaaccagggactattcggagtgttctcagcattgccacatctttttcttggccaattcatcaattagatgtcaagaacgcttttctccatggtacgttatctgaaacagtttattctcaacaaccctctgactttgttgatccttctttacctcatcatgtttgcaaacttcataagtctctttatggccttaaacaagctcctcgcacatggttcttgcgatttacgacatttctttcctcgattggttttacacaatctaaatgtgatccttccctttttattcttaaaacaccctctaccactgcatatcttcttctttatgtagatgatattattcttacagcaaatacatctcatcttttatctcatattatttcacaactctgttctgaattttctatgtccgatcttggacctttacgtcactttcttggcattgaggtgacaccatcggacactggtttggttctctcacaaaagcaatatgcattggatatcttggcacgtgcaaacatgacgcattgtaatccttgccatacccctgttgacaccaactctaaacccgcctctaccgatggttgtcttctttcacaacccactgtttacagaagcttagcaggtgctttacaatatcttactttgactcggcctgatatttcttatgctgttcaacaagtttgcctgttcatgcatgctcctcgtgacactcatatgtctttgctgaaacgcatccttcgctatgtccgtggtaccttggactatggtttgcatatctatcgtagttccagtcttgatctgttggcatactctgatgctgactgggctggatgtcctgacacccgacgatctacatctggttattgtgtttttctgggtgccaatcttgttgcttggtcgtctaagcggcaacatacagtatcccggtccagtgccgaggcagaatatcgaggtgtggccaatgctgtggctgaaatttgttggcttcgccaattgttgactgagctttgtcatcctcctcgtcgtgctgctgtggtcttctgtgataatgtcagcacaatgtatctggcatccaacccagtccaacatcaacgtacgaagcatgtggaaatcgacttgcattttgtacgcgagcgcgtatctttaggagaggtgaaggtgatacatgttccttcatctcttcagtttgctgatatttttaccaaaggtctctcatcatcattgttcaaggagtttcggtccaacctgcaaatcaagccagctacagattctacaggttgaggggggctgttagataatgtaaagcgtctgttagtagatcctattttcttgtttctatccgagtcttccggccacttcgtagcccattattttaggatcacaggagacttcgtggccatcttttcaggatcagacttgcatggtccttggttgtaatctatatatatatatatttgtactcgacacatcaataaagcaatacagagagaacagttcttcct

SEQ ID NO: 100577 - DNA, 988 bp, Zea Mays
gttgcccgcaaaggggactgctccgaattccccaccaggccacaagtcctagttccaaaaccctctctcctccccgtcctactcgtaccccatagccaatttccctccttcgctgccaatggacctctccgccgtccaggccgccctctccgacaagtcctacaccgccgtcgcctccctctgcgacgagctcctcctacaggccgcgtccaagggaaccaataccgacgaatggccctactctgtccacctcctggcccacctctacatcaatgacctgaacagcgcgcggttcttctggaaatcgctgccgcaggaggtgaaggacacgcggccggagctcgccgcggtctggaggattggtcagtgcctctggaacagagactatgctggtgtcaacacggccgcacaggggttcgagtggggccctgacctcactgaattcatcactgccttcctagagagctacagacaaaggatattcaaactgttgacttctgcatattcgacaattagcgttgctgatgtggctcatttcatggggatgagtgaggaggatgctacaaactatgctgtgcaaatcggttggagtttgggcgcagcgaccaagatgcttactgtcaaaaagccaaaggctcagatcaaccagaagcttgatgcgagcaaactgcagcgcctgactgagtgtgttttccaccttgagcactgatgctcagtgtcaatcgtgttgcatccccgtcacttctctactctgcacattttaagaaccatgtttaccatggctgaaaaggggtgatctctcagtactgaatttgcttctgtaagtggtttctgatagcgtgctagctgttactgcgcctatgggttgttcgtatggtggcccttcgtgccagaggcgcattgaaatgcgtcacactttgtcattactctggaccttaaccagggaagtcttgattgcataaaaatgctaacaagttggtcatgctca

SEQ ID NO: 100578 - DNA, 670 bp, Zea Mays
tatgatttccagtgttttgacatggcaaatggttttgtttttctagcttgattgtttggaaactgatcaatgcttgttttttaataacgtgagcttaactagttaaggatttgaggtgaatatctggtctttgttgtaatgcagagagctacagacaaaggatattcaaactgttgacttctgcatattcgacaattagcgttgctgatgtggctcatttcatggggatgagtgaggaggatgctacaaactatgctgtgcaaatcggttggagtttgggcgcagcgaccaagatgcttactgtcaaaaagccaaaggctcagatcaaccagaagcttgatgcgagcaaactgcagcgcctgactgagtgtgttttccaccttgagcactgatgctcagtgtcaatcgtgttgcatccccgtcacttctctactctgcacattttaagaaccatgtttaccatggctgaaaaggggtgatctctcagtactgaatttgcttctgtaagtggtttctgatagcgtgctagctgttactgcgcctatgggttgttcgtatggtggcccttcgtgccagaggcgcattgaaatgcgtcacactttgtcattactctggaccttaaccagggaagtcttgattgcataaaaatgctaacaagttggtcatgctc

SEQ ID NO: 100579 - DNA, 1268 bp, Zea Mays
gttgcccgcaaaggggactgctccgaattccccaccaggccacaagtcctagttccaaaaccctctctcctccccgtcctactcgtaccccatagccaatttccctccttcgctgccaatggacctctccgccgtccaggccgccctctccgacaagtcctacaccgccgtcgcctccctctgcgacgagctcctcctacaggccgcgtccaagggaaccaataccgacgaatggccctactctgtccacctcctggcccacctctacatcaatgacctgtatgcgatccgccgcccttgccctcgttttttccccatccttttgatgccttggtgttgttgtgacttgggagtgagcaggaacagcgcgcggttcttctggaaatcgctgccgcaggaggtgaaggacacgcggccggagctcgccgcggtctggaggattggtcagtgcctctggaacagagactatgctggtgtcaacacggccgcacaggggttcgagtggggccctgacctcactgaattcatcactgccttcctagagatttggtagtggcatgggtgggtagaggctgttgaacatattgtcaccatggatttgtagtgggagaatctatctatagagttggtctgcactgagaatcatatatcctctgtgaaaatgctgatggagaagttcgcaggggagcttcatggctgttctatgatactctgattcattctgtcaaatttgttctccaagagagctacagacaaaggatattcaaactgttgacttctgcatattcgacaattagcgttgctgatgtggctcatttcatggggatgagtgaggaggatgctacaaactatgctgtgcaaatcggttggagtttgggcgcagcgaccaagatgcttactgtcaaaaagccaaaggctcagatcaaccagaagcttgatgcgagcaaactgcagcgcctgactgagtgtgttttccaccttgagcactgatgctcagtgtcaatcgtgttgcatccccgtcacttctctactctgcacattttaagaaccatgtttaccatggctgaaaaggggtgatctctcagtactgaatttgcttctgtaagtggtttctgatagcgtgctagctgttactgcgcctatgggttgttcgtatggtggcccttcgtgccagaggcgcattgaaatgcgtcacactttgtcattactctggaccttaaccagggaagtcttgattgcataaaaatgctaacaagttggtcatgctc

SEQ ID NO: 100580 - DNA, 659 bp, Zea Mays
tggatctactgtttatggggtgaaaaacatcgatgtcctagagggtgcaagggctgctctgaatctgtcaagaaccgtgcttggatattatcctgtcaatgttctgccgtcaaaaactgccattgcaccagtcaacaaaacattcctacccaggtctaacgatgaacatgaaatgtgtgcaaggactatctactgcacaaattaacattgacaagaaggtttggtacctgcactcatgctactaccactagctaaaagtttgcagaaatggcaccatcaagatcgatctggagaccaacaagatcatggacttcatcaagtttgacgtcggcaacgtggtcatgatgaccggcgggaggaacaccgggcatgtaggagtgatcaagaacagggagaagcacaagggcagcttcgagaccatccacgtgctacttggagctttttgctatgtctagttttctcctatttgttgtacaggaaaacatagaatggaattcaaatttggtggccgcaaaatgtgcagactttaattcatataaagttaggcttaacattagtgcaaacagttgtattttagtttagatttagagtacacttatgtatgtgttgtttgacaatgcttatttatgatatattcaatggtacttatttatattata

SEQ ID NO: 100581 - DNA, 133 bp, Zea Mays
ttgtttttatttttttctaatttttttgaataagacgggttggtcaaaacttgtgataaaaaagtcaaacgatttataaattatgacggatgaagtaattttttaagcaactcctaaaagccactaaaaattc

SEQ ID NO: 100582 - DNA, 391 bp, Zea Mays
atgctctgggaatatttcgcactcctatgtgtgttgatagttcaaattttgaaccaaatctcaaggacttggatcccagtgcttctatccagagaaacccacgtgtacgttgttgtaccctactaccaaatgcaaccagcaatttgaaaaaaaaggaaatacccattgctcccagagttctggttccatgcttgagcgcgagcagaagaagagtgggaacaggacaagcaagcctaataatttactaggaaaactgaaaggtaatacgacagcagagaaaactcgggatgcacacacacaaagatacagaactactactactacagaagaactgaacggacaggcagcaaccttgcaaaattgcaaggctctgagaatgccctcgtcacgg

SEQ ID NO: 100583 - DNA, 101 bp, Zea Mays
gtgtctccgtagcaaattgttgtttatcccacatactgttagccacatgggttgcattcattcagcatatccaggaggagaacttgtcggatgaacaacac

SEQ ID NO: 100584 - DNA, 792 bp, Zea Mays
atgagcaatgaaatgggaagagaaacaaaccatttgaaaatgcccaggttctctgttggatcttcatgtcatgcttttcattttgacgaaatgtgtttcatcaagtttcaccagaatgactatgtcgctgcaggttgtcaacgactcaacggggaagattttcgtcccatgaatgacctaattcaactatacatgacagcttttctggaaggaaacaatgaggttcttggtgtagttgagaaggcaatcgctgctgtggaaaaagagaacagtagagtagcttatcaacttgaaagtattacaactgaaataaattctgggaaggaaaaatttattcgcttaaatgccaatctggagaatttccggaaacaggctgaaaaggacggtgccaagtttacatcaaatatacgggtggatgttgtccagagcctgttacctctggttgatagttttgagaaaacgaaattagagaacaccccagggactgagaaggagcaaatggtcagcacaagctatcaaggcatatacaagcagttagttgaaacgctaagatatttgggtgtaggagttgtggaaacagttggcaatccgtttgatcctttggtccatgaggccatctcacgagaagcatccatgcaattcaaggcagggattgtcatgcatgaagtccgcagagggttccatttgaaggagaggatgctaaggcctgctactgtgaaaggtctcaactggctctggcaaacaaagtgcaagctcatagaggagggcaaagatgccgctctgtggatctga

SEQ ID NO: 100585 - DNA, 492 bp, Zea Mays
atggctcgtcaactgcaggaaaccgagaaagttgtctcgcgtctccgactcgagttgctggcgaaggacttggaaggtaacgaatccaactctgagcgagaagaccgtgttcctcgctgggatgagaggggcggaggttttggcagggaaggaggtagagaatggaggggtcaatggggtgaaggaagggagttcagaccctattctctaccgaagtggtcgtttccaaagttccaagggaatgatccagggatctggtttgataggtgtatggaatacttcacagtttatcaggtgcccgagtggatctgggcaagcattgcctcgatgcacatggagggaaatgcgttgaagtggctgcaggtgtataaactgaaacatggtttgggagactgggagcaattcacccatgcgatgagggagaaatttggggtggaagagtaccctcaggccatgagagcgttagtcaatgtgaacaacaacatggggtag

SEQ ID NO: 100586 - DNA, 582 bp, Zea Mays
gaccattttggtccaccccccacccggccaccccaccgtaggcagagcagactatagactgcactgcacccccaggccccagtctcgaactatcgatacagcaggagcggccgagagaggccgacgcgcaccagcagatcccaaactcaccggggaggagggagtgggcgaccggcggcggcgatgggtttcatcatggagttcgcagagaacctgatcctccgtttgatggaggacccggacaagcgcgaccaggttcggcgggagcatgcctacaagatgaaggagcggtgcgagcgcaccaaggcggcgtggagcctccctctgcgcccctacagcttctggaccttcgaccgcttcaactcgcagctctcctgggacctgcagatcagccaggctgccggtcgccgggacccttacgacgacctcatcacccgccactccggctccccgccgtcttcctaaacgcccgtgtcggtacgctcctggatagatctcgatgcttccccatcgccgtaggaatttggtcgatttgattgaggaatgaggataggtcccaattggtgggatggtcgtatggat

SEQ ID NO: 100587 - DNA, 992 bp, Zea Mays
cccccccccccccccccccggcttccctttcctgccctctgccgggtcgggtgggactgcagcggcgtgaagtagagatccagggggacttggatcgttttatccgttcctaggtccttcttcctattcccagcgcacaaggctatcttatccgagctgctgggggttgagtgcgaggtcccgttgacggtggagatggacaagttgcggcaattcgggcggaaggcatggttcatcgtgcgtgtgatgtctggttacgaggagaagaggatccggtcctacaggctgcagctgcagaagcgcatcgagatggcacaagctagaaaggaagagctgcagaaactgccagaaaaggttatcttgtcggaggttcgtcaagcagtacagaagatgcaagctgtaaatcagcagcttgacgaagctgaagctgctatcgatgagtattttaaaccgattgacaagaacgccaaaatcatagcagatatgcagttagagaaagaggaaaaacaaaccaaggagatgacaaaacttatgcaggaacagatgaaaatgcgaagagaaatcatgatgacaagagctgaggctgcaagcgtcgagtccagtgatactaaagcgggtggaaaagtggctaacatccctccgaaataagacactggaaaagtgggagttattgtgcgtatgtgctatatgctaggaaataagtgcgtacttacaattagacaatcgctaattgtgtggttagcgaaggctattgtgctgcttctttccatttcatgttttatccacataagctttgctttgtgcgataatgtgctctgtccattaacatgttacatttactacagcaagtatgttgaggtgctgtgtcagtttattttttctggggacttgtcgaatcccgcaattcgaggtgtccagcgtttcagatttgctgctggatgataaattgttgattttgccttactcatttcttctgaggtcagttttctcta

SEQ ID NO: 100588 - DNA, 265 bp, Zea Mays
ggttgttggaggtctgcttagttcatacgatctatctggtgataaagtatttcttgataaggctaaagatattacagatcgactcttacctgcttgggatacaacatctggcatcccttataatagaataaacctagctcatggacgagcccataatcctggatggactaacgcaattgctgagatcaattggtatggaagatccaaaggtgaagacggtaagtttgtcattaagtcattttctattttttattgagtaataaca

SEQ ID NO: 100589 - DNA, 1786 bp, Zea Mays
tccccatcatcctcgccgcgtcgccgtcgtcgtcggcgattacatgaacctgacgctcagtctagccatcaacgatggcggcggcggcggcacgaccaagaagcgcaagctactgcgggacagcgccgacgacgacgtgatgagccgcgatggtggaggagaccgcagcagcagggtcgtcgcgaggctcgtacaggtacaggccagggaacggaagctggcgaagctggaggccgccgccgccgacgacgacgaccacgaccacgacccgagggtggctgcagcggaaacatctcccggtgacattggcgggggcctgcggctcatgcacctgcttctgtcgtcggtggccgcggcggagtccggcgacgcgcgcgaggccgccgcggccctgcgcgaggcctgccgccgcgcgtcgttccgcagcggcgaccccgcgcagcgcgtcgccgcctacttcgccgacgcgctggcgtcgaggctcgtcggccggccgccgccgacgcgcgccgagcagttcctggcgtacaccatgttctaccaggcctccccgatctaccagctggcgcacttcaccgcgaaccaggcgatcctcgaggcgttcgagagcggcggcggccgcctccacgtcgtcgacttcgacgtgtcatacggcttccagtggccctccctgatgcagtccctgtcggacgccgccgcgagcacgagcagcagctcacgcgacggcgactgcgccgagccggtctccctgcgaatcaccggcttcggcacgagcgccgacgagctgaggcagaccgaggcgcggctagcgcggttcgcgagcgggtgccccaacctacggttcgagttcgagggcatcgtggatggcgcagacgacagtgaacgcatcacggtcgacgacggcgcgaccgtggttgtcaacctggtgttcccggcggcggcagcagcagcagcacggagctcctcggcgacgagcagcacaagagaaggagcgtgcagcgcgctggctcgcatccgctcactggacccttccctggtgttcttggtagagaaaggcggcggcggcggcaatgccacgtcgagaggacgacgcccaagcttgctggcgccgttcgcggccagcctccggtacttcgccgcggtgttcgactcgctgcacgagcgcctccccgccgacagcgccgagaggctcgcgatcgagagggaccacctcggcgcggagatcagcgacgccgtggcctctttagcagactacagcagcagcagctacggcggcgatgatgagccgagcagcagtgccactgccggctgcagctggaggcagatgatggagcgcgcggggttcgagggcgtggagctgagctcgcgagcggtgagccaggcgaagttgctgctgaagatgaagagcgggtgcggcggcgggttccgggtcgtggaggagggggatggtggcagggccgtgtcgctggggtggagagacggtagagcgcagctgatcaccgcgaccgggtggcggcggtgccgttaagtcaacgacaagcaggcgatgagctagtacgtacacatacagtgggaattaataaaaagtaatggagcgcgagagcatactcggatggatcgtcttattcttggtttgttcgattggttcgttatcgagagaaggtttggtttgttcgtttttcttgtgcttttcttctttgattgatacatacatgtaactaaaactagatgccaagaagaagttgctacacacggttggtacgtactaacgtacggaaatagacaa

SEQ ID NO: 100590 - DNA, 948 bp, Zea Mays
caccgcgccctgcttatccagaaacagacaccgcccttcctatgcgagcggtccacgccgccgaaccctagatccaacgaaccatacggctcaagacctcctcccctcgcgttcaccaaacaccgccgcacacttctaaaaaagttccgcaggaaacgcggcccgcagcacgccctttccccacctcgatctcgcgctaggttttcgccacaccgctctcgtcctccgcgaagatgccgaagaacaagggtaagggaggcaagaaccggaagcgtggaaagaacgaggctgacgacgacaagcgcgagctcgtcttcaaggaagacgggcaggagtatgcgcaggtgacccggatgctcggcaacgggcggtgcgaggccacctgcgtggacggcacgcgtcgcctctgccatatccggggcaagatgcacaagaaggtgtggatcgcggccggggacatcgtcctcgtcggcctccgcgactaccaggacgacaaggccgacgtcatcctcaagtacatgaacgacgaggcgcgcctgctcaaggcctacggggagcttcccgagacgctcaggctcaacgagggcgtcgacgtcgatgggcccgaggagggcgaggagaacggcgactacaactacatccagttcgaggacgaggacatcgacaagatctaagaattctgtctctccttccttccggcacattttattattattatgggattccttttcgccttccggctaatttaatattatgtgacttgcgttttagtacgcggtggtggactggtggtatggtttaggcgggctgttatgaattcgctcgcaatcctgataggatctgaggtggttaaataatcgcggaacgctgataatctcgttttaaatctggcgcatgctgttgcaagatgttctatactagttgttattctggattgtgttatattga

SEQ ID NO: 100591 - DNA, 1770 bp, Zea Mays
tccgaataacccccttgcccttggaaactagtcaagttcagtgcccccatacttccgtcgcggcggagatcgagtcgagcgcccgccacggcgatggcggctagagtcctgccgccgccgccgctccctctcgtactcctcttgctgctgctcccgctctcagcccgggacaccgtcgccgcgggcgaggatttcccacgcgacgggcgggtgatcgacctcgacgagagcaacttcgaggcggcgctgggcgtcatcgacttcctcttcgtcgatttctacgcgccatggtgcggccactgcaagcgccttgcgcccgagttagatgaagctgcaccaatgttggcagggttgagtgagcccattgttgttgccaaagttaatgctgataaatacaggaaacttggatcaaaatatggagttgatgggttccctaccctcatgctttttatccacggtgttccaattgaatacactggttcgaggaaggctgatcagcttgtccgcaatctgaagaagtttgttgcgccagatgtttctatccttgagtcagactctgcgataaagaactttgttgagaatgctggtacaagctttcctatgttccttggttttggggtgaatgactcattgattgctgaatatggaaggaaatacaagaaaagagcatggtttgctgttgctaaagatttctctgaggacgtcatggtagcctatgaatttgacaaggttccggcgctagttgcaatccatccaaagtataaggaacaaagcttgttctatggcccatttgaagaaaatttcttggaagattttgtacgacaatcccttctccctttggttgtcccaatcaatacagagacgataaaaatgttgaatgatgatcagaggaaagttgttctcacaattttggaggatgattcagatgaaaattctacacagctggtaaagattttgagatctgctgctagcgcaaaccgtgatttggtgtttggatatgttggaatcaagcaatgggatgagtttgtggagacttttgatgtttccaaaagctcacagctgccaaagctacttgtgtgggatagaaatgaggagtatgagctcgtggatggttcagagagattagaagaaggtactgaccaagcatctcaaataagccaatttcttgagggatacagagcaggaagaacaacaaagaagaaaattagcggcccttctttcatgggtttcctgaattctctggtcagcttgacctcgctgtacatccttatattcgtcattgcccttctgtttgtcatggtgtactttgctgggcaagatgatactccacagccaagacgaattcatgaagagtgatggaagcttggggagcttcttgcacctgaagtgtaaagatggctaatgtaccaggagatgtagctcagaggttatagatttcaaactttcaacggacgcaagtcttgaagagtggatttggctattgatgctgagattcttcaatttctattggccacaccaacttctacatcctgcctatttatgtttctgttttgtgcccttcaatttgttctttaatttagagcttagaaattagcctctgcctgtgtattttagaaattgtccattccagagtccatttctgtgaaaatatatttattatcatactctgctactgaacgtttgtacaattaatacatgatgtatagactgttctggtgctatggtactcgctagttgtgaagttgtcaccaaaaagtaaaacaaaacaaa

SEQ ID NO: 100592 - DNA, 2005 bp, Zea Mays
ataaatgcgaactttctccgaataacccccttgcccttggaaactagtcaagttcagtgcccccatacttccgtcgcggcggagatcgagtcgagcgcccgccacggcgatggcggctagagtcctgccgccgccgccgctccctctcgtactcctcttgctgctgctcccgctctcagcccgggacaccgtcgccgcgggcgaggatttcccacgcgacgggcgggtgatcgacctcgacgagagcaacttcgaggcggcgctgggcgtcatcgacttcctcttcgtcgatttctacgcgccatggtgcggccactgcaagcgccttgcgcccgagttagatgaagctgcaccaatgttggcagggttgagtgagcccattgttgttgccaaagttaatgctgataaatacaggaaacttggatcaaaatatggagttgatgggttccctaccctcatgctttttatccacggtgttccaattgaatacactggttcgaggaaggctgatcagcttgtccgcaatctgaagaagtttgttgcgccagatgtttctatccttgagtcagactctgcgataaagaactttgttgagaatgctggtacaagctttcctatgttccttggttttggggtgaatgactcattgattgctgaatatggaaggaaatacaagaaaagagcatggtttgctgttgctaaagatttctctgaggacgtcatggtagcctatgaatttgacaaggttccggcgctagttgcaatccatccaaagtataaggaacaaagcttgttctatggcccatttgaagaaaatttcttggaagattttgtacgacaatcccttctccctttggttgtcccaatcaatacagagacgataaaaatgttgaatgatgatcagaggaaagttgttctcacaattttggaggatgattcagatgaaaattctacacagctggtaaagattttgagatctgctgctagcgcaaaccgtgatttggtgtttggatatgttggaatcaagcaatgggatgagtttgtggagacttttgatgtttccaaaagctcacagctgccaaagctacttgtgtgggatagaaatgaggagtatgagctcgtaagtacagtatcctcagtaattaattctattttctaataccaccatccatataaagtgttactggcatgtttctgactaatgatgcaaaagtttttctatcaataaaggtattgcttttataggttcctgtttgttgaccctcataattccctgagaaagttaatacttgattaagaaagaaactgctaccatctctccgataatcatcaaataagaatttgttattttctgggattgaattaaaatggttcttggtgaaggtggatggttcagagagattagaagaaggtactgaccaagcatctcaaataagccaatttcttgagggatacagagcaggaagaacaacaaagaagaaaattagcggcccttctttcatgggtttcctgaattctctggtcagcttgacctcgctgtacatccttatattcgtcattgcccttctgtttgtcatggtgtactttgctgggcaagatgatactccacagccaagacgaattcatgaagagtgatggaagcttggggagcttcttgcacctgaagtgtaaagatggctaatgtaccaggagatgtagctcagaggttatagatttcaaactttcaacggacgcaagtcttgaagagtggatttggctattgatgctgagattcttcaatttctattggccacaccaacttctacatcctgcctatttatgtttctgttttgtgcccttcaatttgttctttaatttagagcttagaaattagcctctgcctgtgtattttagaaattgtccattccagagtccatttctgtgaaaatatatttattatcatactctgctactgaacgtttgtacaattaatacatgatgtatagactgttctggtgctatggta

SEQ ID NO: 100593 - DNA, 2284 bp, Zea Mays
gcctcctcctctcctcgcttctctctttggaggcaggcgcaggcgggcgagtggtccggtacacctctagctgcagatcccagctcgcgcggtccagcaggccagcactaagctccctccctcctgtccacctggacagcgcgcccgatcgtgaatcgtcgcttgctctggagaaagcttgcatttttttttcgtttcttcttcttcttcttcttcttcttctttttttttttgcttcgcatccttttttcctggcgcggtttcctttgtacgggaaattttcggttggtgcggttggttggtcattttcccgcaccttctctttggttcttgctcgagagcgccatctttcctgctacccgttgactcgggcgggcattccgtcgagcaccttccgtgcggtgtggggagcgacggttcctggtttctcggggacgttccttgatgccgctgttgtgtcaggcgcaggattctagcggatggaatgccacagctggtacgcgctgaaatcaagaagatctgtagcgatcgctggtgcggggtttgaagatgctgcagaaggcgccagcgatcttggtgacacgatgagtcttgcacgcaagcagaaggttgtcaaggaaacagtggagatggaggaggagcaggagtttgtttggaaatctaacctgctcccctacaaggatgatgatgccttcgttcttcctgagagtagcaaggaggaatacgcatcaacatcaggagacacagctccgtctggcaaaatggaccccaggatagaaaggtctggaagcaatgggacaagcaaggtccctagactgggttccatgcttgggacagccagcatggctggatttggcaaggcagtggagattctagacacgttaggctgcttgatgacgaccttgagctcagatggtggctttgtttccaggaccaagaccaaaggatgcaagatatcaattcttgcttttgaggttgccaacacaatacttaaaggtgctagtattatgcaatctctctcggaagacactgtcacatacttcaaacaggttgtgcttccttccgaaggtgtgcagaatttggtttccagtgagatgagtgaactgatgcgaattgcagctaacgacaaaagagaagagctgaaaatattttcccaggagattgttaggttcgggaaccgctgtaaagatccccagtggcataacctggatcgctactttgtgaagttagaatcagagagtgcaccccagaagcagctgaaagaaacagcaatagcagagatgcaaaagttgatgaacctcgttcaacgtacaactgatttgtatcatgagttgcatgcactagacagattcgagcaagagtaccgctctaggctaaacggaaagggtaatacagatagatttgaaaaaggagacaatattcaaattgtgagactagagttgaagacccaaagtagttatgtgaagagcttgaaaaaaagatctctctggtccaagacgttggaagaagtggtcgagaagcttgtagaagttgtgcactacttgcatgtcgagatcgacaatgctttcggaccttctgatggaggaggtgtggtggtgaatgcggaaccaaccgtgagctgtcaaaggctaggtcctgccgggctcgcattacattatgcaaacattatcatccagatatatagcatcgtttctcgatccgggtatgtgccagcaaattcaagagacgccctctaccagggactgccaccgaggatcaagtcggcgctaccaaatgagctgaggacgacctcggcgcctcagctcaccgtcgaccagataagggctaggatggagaagaccctgaaatggctcgcgcccatggccatcaacaccacctgcgcccgaggcttcttcctgaggtttagcgagtgggcgaaatcagggaccgagagcgttggcagacgactgggccaagcggatcgggtcgagacgctgtaccatgcggacaaggcaaggaccgaggatcgcattctggagctggtcgtctggcttcaccacctcgtcagccagagtagccggccggcgttgcaaaaaggccactgaccagatagatgccaggaatggtggaagaagctggagctgttcttgccatggagaggaggacgtccgggtacagtcggggagatgcttgtatatgcgtgctttgtaacatcagctgagtaggttttagttactactttgttctgcttgttgtttgtaagtgtacttgtgaataccacgttatacaatgcaaagaaaaacgc

SEQ ID NO: 100594 - DNA, 2207 bp, Zea Mays
cccggcaccctgcccgcctgtcgacactgtcgggtccggttggtgccccagcgaaaagcaaaagaaatactactaccggaagaaactgcctcctcctctcctcgcttctctctttggaggcaggcgcaggcgggcgagtggtccggtacacctctagctgcagatcccagctcgcgcggtccagcaggccagcactaagctccctccctcctgtccacctggacagcgcgcccgatcgtgaatcgtcgcttgctctggagaaagcttgcatttttttttcgtttcttcttcttcttcttcttcttcttctttttttttttgcttcgcatccttttttcctggcgcggtttcctttgtacgggaaattttcggttggtgcggttggttggtcattttcccgcaccttctctttggttcttgctcgagagcgccatctttcctgctacccgttgactcgggcgggcattccgtcgagcaccttccgtgcggtgtggggagcgacggttcctggtttctcggggacgttccttgatgccgctgttgtgtcaggcgcaggattctagcggatggaatgccacagctggtacggtatgtgatgctttcgctgtcctggactcctagcgctgaaatcaagaagatctgtagcgatcgctggtgcggggtttgaagatgctgcagaaggcgccagcgatcttggtgacacgatgagtcttgcacgcaagcagaaggttgtcaaggaaacagtggagatggaggaggagcaggagtttgtttggaaatctaacctgctcccctacaaggatgatgatgccttcgttcttcctgagagtagcaaggaggaatacgcatcaacatcaggagacacagctccgtctggcaaaatggaccccaggatagaaaggtctggaagcaatgggacaagcaaggtccctagactgggttccatgcttgggacagccagcatggctggatttggcaaggcagtggagattctagacacgttaggctgcttgatgacgaccttgagctcagatggtggctttgtttccaggaccaagaccaaaggatgcaagatatcaattcttgcttttgaggttgccaacacaatacttaaaggtgctagtattatgcaatctctctcggaagacactgtcacatacttcaaacaggttgtgcttccttccgaaggtgtgcagaatttggtttccagtgagatgagtgaactgatgcgaattgcagctaacgacaaaagagaagagctgaaaatattttcccaggagattgttaggttcgggaaccgctgtaaagatccccagtggcataacctggatcgctactttgtgaagttagaatcagagagtgcaccccagaagcagctgaaagaaacagcaatagcagagatgcaaaagttgatgaacctcgttcaacgtacaactgatttgtatcatgagttgcatgcactagacagattcgagcaagagtaccgctctaggctaaacggaaagggtaatacagatagatttgaaaaaggagacaatattcaaattgtgagactagagttgaagacccaaagtagttatgtgaagagcttgaaaaaaagatctctctggtccaagacgttggaagaagtggtcgagaagcttgtagaagttgtgcactacttgcatgtcgagatcgacaatgctttcggaccttctgatggaggaggtgtggtggtgaatgcggaaccaaccgtgagctgtcaaaggctaggtcctgccgggctcgcattacattatgcaaacattatcatccagatatatagcatcgtttctcgatccgggtatgtgccagcaaattcaagagacgccctctaccagggactgccaccgaggatcaagtcggcgctaccaaatgagctgaggacgacctcggcgcctcaggtgctcaccgtcgaccagataagggctaggatggagaagaccctgaaatggctcgcgcccatggccatcaacaccacctgcgcccgaggcttcttcctgaggtttagcgagtgggcgaaatcagggaccgagagcgttggcagacgactgggccaagcggatcgggtcgagacgctgtaccatgcggacaaggcaaggaccgaggatcgcattctggagctggtcgtctggcttcaccacctcgtcagccagagtagccggccggcgttgcaaaaaggccactga

SEQ ID NO: 100595 - DNA, 2290 bp, Zea Mays
ctactcggcccagcgcaccgctcggctccccgccaccgccgcagccgagatggaggacatcgaggacgtgctgggcgcggccggcctttctggcggcggagcgcctccggggctccgcctcccgctagccgccgtcgcggtgaagcccaagcgccggtcgtccagggtcgcacaggcgccgcctcagcccgaggccgggatccccggcacgcagacgatttacgtcaagacattcgggtgctcacataaccagagtgacagtgaatacatgtcaggtcagctctctgcatttggatatgcgatcactgaagatcctgaaggagccgatttgtggctaattaacacatgcacagtgaaaaatccaagtcaatctgcaatgacaaccctcatatctaaatgcaagaatgcgaacaagccacttgtagtggctggatgtgtaccccaaggaagccagggcctcaaggagcttgaaggtattagtataattggagttcaacagatagaccgggttgttgaagtggttgaggaaactttaaagggacacgaggttcgcttgttgagtcggaaaacattgccgtcacttgatttacctaaggtaagaaagaacaagtttattgagattcttcctattaatgtgggatgtttaggcgcctgcacatactgtaagacaaagcatgctcgtggccatttgggaagctatactattgacagcttggtggatcgtgtgaaaactgtcgtctccgaaggtgtccgggagatctggttgagcagcgaagatactggtgcttatggacgggatatcggtacaaatcttccaaatttgttaaatgcgatcgttgcggagcttcctgttgaccaaagcacaatgctccgcataggcatgacaaatcctcctttcatactagagcatttgaaggagatagctgccgttttgtgtcatccctgtgtttactctttcctccatgtccctgtgcaatctggaagcgattctgttttaaaggcaatgaatcgtgaatatactgttggcgagttcagaaaggtagtcgacactctgtgtgagcttgtccctggaatgcaaattgctacagatattatctgtggctttcctggtgagaccgacgaagatttctctgagactgttaacctcgtaaaggaatatcaattccctcaagtccacatttcgcagttctaccccagaccagggacgcctgctgctaggatgaagaaagtaccaagcaacgaagtgaagaagcggagccgtgaattgacttcagtcttcgaatcgttttcgccataccaaggaatggaaggcaaagtagagaagatctggatcaccgagattgcgtctgatggtgttcacctggtcggacataccaagggatacatccaggtgctggtaactgctcctgatagcatgttgggaacgtccgcggacgcgaagatcacgtctgtcggacgatggtccgtcttcggtgtagtggtagaaggatctgttgcagtcatagaagcaccaatacaaactagtgccgaactgcaggaggaacacgtacagaatcaggtggaggaagctggttgctgtgccaccgactcctgtggcgcctgcgcgtgctccaatgaggcgcaaccgtgtggcccagaccgatgtggagatgcacttcgtgccccgcagacctgtggtggtgacgttgttacaactcgccaggaggcactccagcctacgctcgtgaggagaagcgtagatggaaccacgaaaggaagcgacagtactgcggcgcattcagcagggaaggaacagcgggtggaagtagtgactaggcgtggggtagatatcgacacggttctgtggtgcggtttggccgcgagcttcgctgtgacggtagccctgcttgcactcctcaccagcaagattttgtcgacgacatcacactagggctaataaggcgaagctttgtaacttgtggtttggttcttgagcgtgtcgctggatcgattttggcggtctctttctttacttgatccgcctgtatgtcgttgcaaaaaactgtgccactgtatacaaaaacacgtggttgcaaacaagttttctcgttgctttcgggtgctggctgcatcaatgatcagggttccatgaaggtgaagtacattatgtgtgtttgccaccgtgctaaaaatagccgaaaaggggagcaggtgctgccaaacgaacaggtcggagaaacgattgagcaggagggaaccagacaacagcagcaaacagactgaagcacaaaaaatcggaagaataaaaaaa

SEQ ID NO: 100596 - DNA, 2244 bp, Zea Mays
ctactcggcccagcgcaccgctcggctccccgccaccgccgcagccgagatggaggacatcgaggacgtgctgggcgcggccggcctttctggcggcggagcgcctccggggctccgcctcccgctagccgccgtcgcggtgaagcccaagcgccggtcgtccagggtcgcacaggcgccgcctcagcccgaggccgggatccccggcacgcagacgatttacgtcaagacattcgggtgctcacataaccagagtgacagtgaatacatgtcaggtcagctctctgcatttggatatgcgatcactgaagatcctgaaggagccgatttgtggctaattaacacatgcacagtgaaaaatccaagtcaatctgcaatgacaaccctcatatctaaatgcaagaatgcgaacaagccacttgtagtggctggatgtgtaccccaaggaagccagggcctcaaggagcttgaaggtattagtataattggagttcaacagatagaccgggttgttgaagtggttgaggaaactttaaagggacacgaggttcgcttgttgagtcggaaaacattgccgtcacttgatttacctaaggtaagaaagaacaagtttattgagattcttcctattaatgtgggatgtttaggcgcctgcacatactgtaagacaaagcatgctcgtggccatttgggaagctatactattgacagcttggtggatcgtgtgaaaactgtcgtctccgaaggtgtccgggagatctggttgagcagcgaagatactggtgcttatggacgggatatcggtacaaatcttccaaatttgttaaatgcgatcgttgcggagcttcctgttgaccaaagcacaatgctccgcataggcatgacaaatcctcctttcatactagagcatttgaaggagatagctgccgttttgtgtcatccctgtgtttactctttcctccatgtccctgtgcaatctggaagcgattctgttttaaaggtatagtttaactcgaactcttgttctcataagctttttagcagcaaacgcacaacatgaataatctttgtctctaacttatatcctgtgccttcacctcgatctaactcagtctatgattgcacatataaggcaatgaatcgtgaatatactgttggcgagttcagaaaggtagtcgacactctgtgtgagcttgtccctggaatgcaaattgctacagatattatctgtggctttcctggtgagaccgacgaagatttctctgagactgttaacctcgtaaaggaatatcaattccctcaagtccacatttcgcagttctaccccagaccagggacgcctgctgctaggatgaagaaagtaccaagcaacgaagtgaagaagcggagccgtgaattgacttcagtcttcgaatcgttttcgccataccaaggaatggaaggcaaagtagagaagatctggatcaccgagattgcgtctgatggtgttcacctggtcggacataccaagggatacatccaggtgctggtaactgctcctgatagcatgttgggaacgtccgcggacgcgaagatcacgtctgtcggacgatggtccgtcttcggtgtagtggtagaaggatctgttgcagtcatagaagcaccaatacaaactagtgccgaactgcaggaggaacacgtacagaatcaggtggaggaagctggttgctgtgccaccgactcctgtggcgcctgcgcgtgctccaatgaggcgcaaccgtgtggcccagaccgatgtggagatgcacttcgtgccccgcagacctgtggtggtgacgttgttacaactcgccaggaggcactccagcctacgctcgtgaggagaagcgtagatggaaccacgaaaggaagcgacagtactgcggcgcattcagcagggaaggaacagcgggtggaagtagtgactaggcgtggggtagatatcgacacggttctgtggtgcggtttggccgcgagcttcgctgtgacggtagccctgcttgcactcctcaccagcaagattttgtcgacgacatcacactagggctaataaggcgaagctttgtaacttgtggtttggttcttgagcgtgtcgctggatcgattttggcggtctctttctttacttgatccgcctgtatgtcgttgcaaaaaactgtgccactgtatacaaaaacacgtggttgcaaacaagttttctcgttgctttcgggtgctggctgcatc

SEQ ID NO: 100597 - DNA, 1983 bp, Zea Mays
ctactcggcccagcgcaccgctcggctccccgccaccgccgcagccgagatggaggacatcgaggacgtgctgggcgcggccggcctttctggcggcggagcgcctccggggctccgcctcccgctagccgccgtcgcggtgaagcccaagcgccggtcgtccagggtcgcacaggcgccgcctcagcccgaggccgggatccccggcacgcagacgatttacgtcaagacattcgggtgctcacataaccagagtgacagtgaatacatgtcagatgcacagtgaaaaatccaagtcaatctgcaatgacaaccctcatatctaaatgcaagaatgcgaacaagccacttgtagtggctggatgtgtaccccaaggaagccagggcctcaaggagcttgaaggtattagtataattggagttcaacagatagaccgggttgttgaagtggttgaggaaactttaaagggacacgaggttcgcttgttgagtcggaaaacattgccgtcacttgatttacctaaggtaagaaagaacaagtttattgagattcttcctattaatgtgggatgtttaggcgcctgcacatactgtaagacaaagcatgctcgtggccatttgggaagctatactattgacagcttggtggatcgtgtgaaaactgtcgtctccgaaggtgtccgggagatctggttgagcagcgaagatactggtgcttatggacgggatatcggtacaaatcttccaaatttgttaaatgcgatcgttgcggagcttcctgttgaccaaagcacaatgctccgcataggcatgacaaatcctcctttcatactagagcatttgaaggagatagctgccgttttgtgtcatccctgtgtttactctttcctccatgtccctgtgcaatctggaagcgattctgttttaaaggcaatgaatcgtgaatatactgttggcgagttcagaaaggtagtcgacactctgtgtgagcttgtccctggaatgcaaattgctacagatattatctgtggctttcctggtgagaccgacgaagatttctctgagactgttaacctcgtaaaggaatatcaattccctcaagtccacatttcgcagttctaccccagaccagggacgcctgctgctaggatgaagaaagtaccaagcaacgaagtgaagaagcggagccgtgaattgacttcagtcttcgaatcgttttcgccataccaaggaatggaaggcaaagtagagaagatctggatcaccgagattgcgtctgatggtgttcacctggtcggacataccaagggatacatccaggtgctggtaactgctcctgatagcatgttgggaacgtccgcggacgcgaagatcacgtctgtcggacgatggtccgtcttcggtgtagtggtagaaggatctgttgcagtcatagaagcaccaatacaaactagtgccgaactgcaggaggaacacgtacagaatcaggtggaggaagctggttgctgtgccaccgactcctgtggcgcctgcgcgtgctccaatgaggcgcaaccgtgtggcccagaccgatgtggagatgcacttcgtgccccgcagacctgtggtggtgacgttgttacaactcgccaggaggcactccagcctacgctcgtgaggagaagcgtagatggaaccacgaaaggaagcgacagtactgcggcgcattcagcagggaaggaacagcgggtggaagtagtgactaggcgtggggtagatatcgacacggttctgtggtgcggtttggccgcgagcttcgctgtgacggtagccctgcttgcactcctcaccagcaagattttgtcgacgacatcacactagggctaataaggcgaagctttgtaacttgtggtttggttcttgagcgtgtcgctggatcgattttggcggtctctttctttacttgatccgcctgtatgtcgttgcaaaaaactgtgccactgt

SEQ ID NO: 100598 - DNA, 567 bp, Zea Mays
gtcgtcgatgttcctgacggggcctttgaaccacttgcgcgcgtcgagcagccaccagagcatgatgaggccgaggcagacgccgagcgcgatgggcgcgtagttgaaggtcccgccgaagaagaaggagccccagatgacgaacagcagcacgatggcgccggccgagctgttgtaccgcccgtggaacgcgtcgtacaggatctgcgccggcacgaacgtgccggcggtctcgttgttcgggttgtacaggtagctgaatacctggatgctgaaggtgagggccaggatgtacgcccagccgaacacggagatgatgccgatgctggagaggatggcgatgggtccgttcttgtcggcgcctttggtctcctccgtcaggtgcgccgccgcgtcgtacccgtacagcgagtactggctgaccaggaaggacaggacgacggcgtaggcgctgctgccgatccccgtcacgtcgggcgccgtctggaagtgggtgaacacgtacgacgccggctgcgtcgtcttggccaccagcgggagcatcaccacaatgacggtgccaccgat

SEQ ID NO: 100599 - DNA, 1620 bp, Zea Mays
ccgagcggctccttaccacggcatcgttctccctgcgctctctctctctcacactgcgtctttggctcctgctccatctcctttgctgcgaagctccgagctctgctcggccggatttttcatggcgcccagccccttgcgtcggccagcccctgccatggagccttcggctgtgcagctctctccctctcgcgtgccttggatttgtgccgcgccctgcagagctcccttggtgagcgcccaggtcgtccctctccgactctctctgctggcggctgagttccctggaagccgtgctctgctcgccatggatgtcgtccaccatggtgctcggtctagacgtcgattccctcgtcgcagtgagctccagccgattccttgcctcttccccgtttaaatcatggagcatcagccgctgctccctgtttccggcagccaagcccctgcgcgcgcatcctcccgcgcagtccccagcgccaccggccaacctcgccggccaagctccctcgccttcaatcctttagccgtcgcgcccctcagctcgctggccgtgacctcgccgaggtttttcccatggccggctcactgctcaacccaagccgaggtcttgtacgaaacagcaccttccatggccgctgcgtcgcgctccttgtgcttgcgcagctgaacgccatactgcgcagtgttttgtccgatgtcgagcttagctcagtctctgtttctctgcgcacgtcgagttccttgccgcgcgctgagctttctgtcggtctccaactcgccatggtgtccaactcctgtaccaaccgtgacctacgcttggtcttcccagctgcgttgacctgcgttgacctctgctcgcttcgctcgggatgtcgtgctgggtcgctccatacttggtgcacacccagctgggcgtcgcgatgctgtgcaccatgcgtcaccagtcattctcaccatggtcagcagcttcaaaaacatggacgcccaagcctttttcccatctttcacgcccacctcggtcttcatcctcaacctttgccagaaatttggttaaatggacgaacccagaagatctccagaattttatggatgaagaagaaaataaagtcgaagagtgacgctcgctagatgctcgacgaaaggcgtgaaccgaagatttatcactattcctcaattgccgaattaaattttttttgaggtgagtgattcactgctcctccatgatagatcgaagcatggaatggtttcgtatattagatgcgataattttcttgtcgtggttaggatgtgttgtggctgtattaaatattcgttgatgtatcatatgtgcgatgtatgtttgaattggtgacgagaaggataggtctagtatttttattgactagccatcatatttttcaggattatgctagttttgtttattaagatgtagtcgatgctcgactctagtagtcattattttctatgttcggtgaccgattaaatgtcttaagttgatgaaaacgtagattagacaaggagtgcttaggtagacgtgtaggtctagtacgcttgaatcagttctatgtttacgacgtgaagtataacgatgatgcgtggaataaatttagtatttactta

SEQ ID NO: 100600 - DNA, 601 bp, Zea Mays
accagttttgtcagcctcagcaagaatgacatgggctctgcatcgtcacagccactgcattcgtagacaggagcggactgaacaaatatgacggtttgctatcattgatgcgctgcgcagccctctcccctaattttctgctcccatattccctgcagcagtcaaagatcctgagccacatggcggttgttggctcaaagggcatgtggtccacgaaatcctctagctcaaccatgtatccatatgctttcccaacagctcgatcatgcattcatggtgttcgatccgtggaacgatgctgttgtactcatcagagtgaagtaactccttcccaacctgacatgcccctcacagatacacgaaaccagagtcaccttcactatggtacgcgcatgcaaagatcatagaattccacaggacgacatcattagatgaccctaactcaaagacccgggcggaataatcaaacagcctacacttggaatacatatcaaccagcgcacttcgcagtatatcgtcaatgtcgttcctgtttctgatcatgtatgcatgaatgtgcttcccatgcttaagcagaaatatgttcgcacaggctgcaagg

SEQ ID NO: 100601 - DNA, 305 bp, Zea Mays
gttacacaatgctacggttccttacaaagtttttggacatcactgttagcttttttggttgattgtccaggaggaaatagaggtcgagggaaagctgttgcgtgccggcaagtcagtcggtgtcgtctctgtcgatttcaggaagaaaaagacaggaaaactgatggcgcaggcccgtcacaccaagtatcttgtggcatcaagcagattgtgaggctgcccccttctgttaacaagatgtcaacataattgcgcccgaactgtccattactgatgccattattaataggcagcaacgatacaac

SEQ ID NO: 100602 - DNA, 495 bp, Zea Mays
gcagtccctctctttccgtcctcgatttgagaaggtggcgactgagcgactgacgactgacgagacatatgctgtttctgcttgcttgcttggctcgatctctggtgcccgtgcagagtcccgcggggtacctccgcagcggtgtcacagcgacgctcgccgaccagctgggatcggccgtgtttttctgcagcgggctccccagcagcggggtatccctcgaaatcagcgtctcctttgttgacgcggctgccgtcggggaggaaatagaggtcgagggaaagctgttgcgtgccggcaagtcagtcggtgtcgtctctgtcgatttcaggaagaaaaagacaggaaaactgatggcgcaggcccgtcacaccaagtatcttgtggcatcaagcagattgtgaggctgcccccttctgttaacaagatgtcaacataattgcgcccgaactgtccattactgatgccattattaataggcagcaacgatacaac

SEQ ID NO: 100603 - DNA, 692 bp, Zea Mays
ccacggcaccacccgcactgtgcagcagcctcctttcgtctcgtagttggctggggttgccaacgcgacacctcgtcggaatccggtcgcgcgacctccacttctcgccggccggagcgggtgcgccatcaccatggacccggaagcggtacggaaaagcctggagcccaccgcaaactgtcgaaaaaaatcaccggctccacccctgcgcggctccacttctacgacccctttcgtcctcagcggagtcagcatcgaagccgctgagcacggtcgcctcctctgctcctttgtcgtcacccctcgccttgcgagtcccgcggggtacctccgcagcggtgtcacagcgacgctcgccgaccagctgggatcggccgtgtttttctgcagcgggctccccagcagcggggtatccctcgaaatcagcgtctcctttgttgacgcggctgccgtcggggaggaaatagaggtcgagggaaagctgttgcgtgccggcaagtcagtcggtgtcgtctctgtcgatttcaggaagaaaaagacaggaaaactgatggcgcaggcccgtcacaccaagtatcttgtggcatcaagcagattgtgaggctgcccccttctgttaacaagatgtcaacataattgcgcccgaactgtccattactgatgccattattaataggcagcaacgatacaac

SEQ ID NO: 100604 - DNA, 1912 bp, Zea Mays
ctggacatcgagttgggttcgaggagacacactgggcggcaagaacgccaagtaccttgtatttgctcgtgttctaccctcagcaaggcacttttagctgcagcttaagcaatggtcgtctccctggtgctcccgttcaccctcctcgcgggcattctcctcctctccggatatgccttggctgggccggagaccgctgcggagccgggcgagatggtcctgacgctggacgctggtaacttctcggaggtggtggccaagcaccagttcatcgtcgtcgagttctacgctccatggtgtggccattgcaagcaactcgctccagagtacgagaaggcagccgccgttctgagggatcacgacccgccgttggtgctcgccaaagtggacgcgtacgacgagaggaacaaggatatcaaggacaagtaccaggtgcacgcgtaccccaccctcaagatcatagagaacggagggaaggacgtgcgtggctatggtggtccgagggatgccgatggcatcgtggagtacctcaagaagcaggtcggcccggcttccatcgagctcagttcggcggaggctgctcaggcgtccatcggcgacaaaggagtgattcttgttggagttttccccgagtttgctggtgtggagtacgagaatttcatggccgtggcagagagaaaacggtcagactacgatttctttcacacgtcggacgcgagcattctgccgcgtggtgatgtagccatcaagggccctgctgttcgtctctttaaaccatttgatgagctctttgttgattcacaggattttgatacggatgctcttgaaaaattcattgaagtgtctggtttccctgcagtggttaccttcgatgctgacccaaccaaccataagtttcttgagagatactacagcactcctagcgccaaagcaatgcttttcttgaacttcagcgacgacagaatcgaggccttcaagagtcagattcaagaagctgccacgaaattcagtgctaataacataagttttttaattggtgacgttgaatctgctgaccgtgccttccagtactttgggcttaaagaggacgatgtgccgctcctttttgtgattgcacagggtgggaaatatctcaatccgaccatcgaccctgatcaagtcataccctggttgaagcagtatacatatggaaacttgacaccttatgtgaagtcagcgccaatcccaaaggtgaatgaccaacctgttaaggtcgttgtggctgacagtatcgatgatgttgttttcaactctggcaaaaatgtactgctcgagttctatgcaccttggtgtggccattgccggaagctggccccaatcctggaggaagttgcagtctcattgcaagacgacgaagacgttgtcattgcaaagatggatggcactgcaaatgatatccctaccgactttgcggtggagggataccccacgatctacttctactcaaccaccggtgaactttattcctacaatggcggaagaacggccgaggacatcatcagtttcatcaagaagaacaagggccccagagcgggtgccgtggacgaacagacgggtgatgctagtgctgcagaggaggccgttacaccgccgtcgtcgtcagagcttctgaaagacgaactctgatcacggtgccatatgtaggcatgcagctagctacagcgagagaatcgggcacgtccagagattcagagaaaatattcagttataacttacagtactaaatgcactcaggtcgctagttttatttgtcccgagaattattattaatgatcaaaaccgttactgatttgaataaggctagtgtaatccaccactcaactttttccttgtttctgccaaattcatgtagaaatagttcgttttggtgctt

SEQ ID NO: 100605 - DNA, 2879 bp, Zea Mays
tcccccgttcgtatctctctctcccttcacctaaagcgaggcgccgtcggcttctgctccttacctcgcgccttcctcgcgcggcgcgcctcgccctcgccctctccctctccctctctcctcccccacccttcctctccctccatctctccgcggcagttcgagcttggcgggggaaccgtacccggcaagcgcgcggacgcccccccgggtgggggcgacagccagcggcgcgatgcccgcgtggtggccccgcagcaagctgaggtctaggtcgaaggccaagccgggcgcagggtccgtctccgcagcttcgtccccgcgcaagtccgcggacctcgagtcgccctccccgtccccgtcgccgacgccgacgccgcgggacaggaaggcgcacagcctcgacttccccggcgcggccgccgcgcgcggccggccagccggcgccgcgccggggcatgggtcggtagggtacaagctcccgacgccggtggaggcggtggagcctgtcgggactctgtacgaggtggtgctggcggcggcggcggccgccgctgccggtgacggctgctcgtccgcggaggagtctagcgtgtgctcggccgcgtcgttggacgagccgcactaccaacatgggtttaggcccatggatccggctgcttttgcgagggaaagaaatatgccttctgattcagataggatcttaaatgaagacaagtgtttcatgtcttgtagtatgccacgggagcatcagaagttctttgatgttcctgcggctagtgttagagaacttcatttgcaaagtgatgcaccttcaacgagtgaagccaattgttcacgtggaagaatgatatctggagatctttttgctccaagaacaaggagtctctctcctatcccaaaaggccatgcattcgctgtgagcaatggaaattctagagaatttggtttcagcccgaggtcaccagtaagaaagatggatggtttgaggagcccaccacatcccttgcctcttcctccagcttctggtgcatgctcgcctcttcatccagcttctggtgcatgctcgcctcttcatccagcttctggtgcttgctcacctcttcttccaacccacagtttttgctcgcctcttccttcgtctcccagttcctgcccacctcttcctgcatctcccactaactgctcacagtcccagtcacaatggaagaaagggaaattgctagggagtggtacatttggtcaggtttaccttggatttaacagtgaaaatgggcagttttgtgcgattaaggaggttcaagttattatggatgatccacattcgaaggaacgactcaaacaattaaaccaggaaatagatatgcttagacaactctcccacccaaacatagtgcagtaccatggaagtgagctgagtgatgaatcactttccatttgtcttgagtatgtttcggggggttcaatccacaaattattaagagaatatggctcttttaaggaacctgtgattcgtaattacactgggcaaattcttgctggccttgcctacttacatgggcggaacactgtccacagagatatcaaaggagcaaacatactcgtgggtcctaatggtgaagtcaagctggctgactttggcatggctaagcatatatcatcttttgctgaaatacgttctttcaaaggaagtccttactggatggctcctgaggttataatgaactgtaaaggctacagtttatcagtggacatatggagtctgggctgtaccattattgaaatggcgacggcaagacctccttggcaccaatacgagggggtagcagcaatatttaagatcgcaaacagtaaagatatacctgaaatcccagacagtttctcagaggaagggaaaagtttcttgcagctttgcttgaaacgtaaccctgcatctcgtgcttctgcagtccagctgatggatcatccttttgttcaggatcaccctgcagtgagagctgcaaaatccagtgtattgagaaacacaccatcttctccagcagatggcagacacacaatgtccaacagggagttgccatctcggaaaattataactcctctgaaggatattggactgggcatgagagattttactggattttccactactgttccttcaccacacagtcctattcctggaagagcaaacatgtctacgccagtttcaccatgctcaagcccgctgcggcagtttaagcaatccaatgtgaggggcatgcgttctccacctcatccaatgctctcccctggtcttggcaacacagtaagttacacccaaaatcagacaagacgcaatccagctcctgccatttcagatccttggatggatgttggccagatgaaactccaaagccccaatatttcccccagaaggttctgagaacgatttaaatataaaaaaagagaatcatgggcgcaatatatccatgacaagttagttattaagagatgttcagtaaggaacttgtttgtgtagttactacaatacgacactcaccagagattcagtacagcgaaatggggctcttgagaatttgtaacaggaagttctgtatatccttaggttttaaggtttgttgtcgcccttgctatatgtagttatacgtgtacacgtcctgatgtaaaggttcacaaaaaatcttacagatgaccacgggatgtaaattcgaaagtttgtgcaaactggtatttctgtgtagtagttaggacttccatggcagaagtaactatgcacttccgattgaatcgagtacaatgtccagtttcatttccatttcatcactggaatcaagcatgtaactaaaaagagagtaagagagcggggtgcagattatattttg

SEQ ID NO: 100606 - DNA, 1898 bp, Zea Mays
aaaactccccgtctctactccctactggcctcctcccacgagtcggataccgaacctcggcggcgtcggcgccacgcgagcaaaaaccctagtgcgagcaagcgagaggcagagacctcagtgcctcgagcaacgcgcgcccggcccgacggcatggagagcctcatcctcgcctcctcctgctccgcgtccccacggctcccgctactctcctccgccgcccgcttccgcgggctgcccgtttccgtgccgccgccgtcttcggcgtccatcagcggtgccgcgaggaaagggccgatgaggcccaggctcttcgttgccgcggcggcggctcctcgcggctccggaaacgttttcgagggattgagagcaaaaggctttgcaagcatgtcatcttcgactggcaatgagaatatgtctactggaactggtacactacctcccatgccacccacatcatcatatattggttcacctgttttctggattggagttggtgtagcattgtctgtggcgtttaccacggtctcttccatgttaaagagatatgccatgcaacaagcatttaagtcaatgatgacccagtcagcaccaaactcatttggctccaactcgcctttcccatttagcatgccgccacaggcatctcctactgctccaagcacttacccgtacttggaaccaaagaaagatacttccccgcatgtgtcaactgttgatgtctcagctaatgaagtggaagccactggaacatcgaaagaggtggatgttactgaaacgccaaaaccttcaaagaagtttgcatttgttgatgtttctcccgaagagttgcagcaaaagaacctccaatcttcaccggagacggtagatgtaaaacatgatagtacatacagtgaaagtaaggaggatactgaggaacaagttcccacaattagtacaaacactgaaagtaaggaggatactgaggaaaaagttcccacaaatggagcatcttttaagctgaacgaaggtgctgctcatgggccaactgaatctaataactcggcatctatgctatccgttgagacaattgagaaaatgatggaagatccagctgtgcagaagatggtgtatccctacttgcctgaagagatgcggaacccaaattcattcaagtggatgctgcagaatccaatgtaccgccaacaactacaggatatgctaaataacatgggcgcaactcctgatcaatgggataaccgcatgcttgatcaccttaagaacttcgaccttagcagtccagaagtgcggcagcagtttgcgcaagttggcatgactcctgaggaagtagtatcgaaaataatggcaaacccagatgtagctgttgcattccagaatccaaaaatacagacagccatcatggactgctcgcagaaccctcttaacattgtaaaataccaaaatgacaaggaggtcatggatgttttcatgaagatatcacaaatcttcccccaaattaacggctagctgatcttcgtcgtgggatagcacttctgatttttgtcggcccgtcatctccagtctggagggctgctgcggtagcatctatcaagaaaagggtcgtgacgctccgatataccctccccgtgtcaaggtttttgagtttcttatgtacatcatgtgatgtagcggccttggtttagctatgagtaattgagtatgacccttgccagttcattaagtcaggctattgacatagcagggtccaagtttttattaagccagccaatcagtggaaaggtgcagcagagacggttcgtatcagatcaattttgatatataattgttattattaatctgtaatatattagagacacaatggcaatgcaagtaatctgttacgacatttcctgaccata

SEQ ID NO: 100607 - DNA, 1065 bp, Zea Mays
atggcatcctccctcgcccagagacggcacgctgtggtatgcgggcggggacattcgaatcgtgtccgtaccgcgcggggtgtcgctgcaggacctcgtgcggctcgtcgtatggcgatgaagggacatccgtcgccgaggttcgccaagatcgacggcgtctgcgccgcgctctccatggaaggttcgcctagatacactctgattccctgctctgcgctctcccctgttctcgcgctctacatggaaggcgagatcgacaacgttcggccgctggtgcccggcgccaagctccacgccgtcgtcgacgcgtgccacagcgattccgtcctcgacttccccttcctctgcaacatgtccagggaactactcgtgtcattctataaggcaaatgggagccacaaaccaaataggaaaattttctatgggttcgtaattgtctgtttgaatgaattatgttgctgtctgaacttaaatctcttttccttgcatagacatgccagtgaggagcagtttagtcggttcttgctttatgaagtggatgcaattagaaaggcgtgtgccagcttggaagagggctaccttcctccggttacattcattgtggtgcaaaagcgccatcacacacgattttgtcctaaagatcatcgttcacacaaacagacagatcgacgtggaaatattttgccaggacactttggagacaatagttcttatggtgcagccaggctagcaggcttcctgaaaaatgttcttattgttcaagttatgaggtggagtgatggctcttatcttgaagatcaggatcactggaggttgggttactccttgattcttacatggtgccccattcctattagttcacttccagatatgacagatctaggggttgtgtgcgcacttagaatcaatggtgcagttgtcaaagttcaactagcatttgtttgcactttcttcttcaatttgaagtacttaaacgtcgcaatggtcatgatattaaagaacatgctgccaaatattataacggttataggagagagagatattcatgaagagtcagaataa

SEQ ID NO: 100608 - DNA, 1272 bp, Zea Mays
atggcgccgccgcttgttccggcggctgttcccgccaacgcggtgggcctacgagttcaacgcggcgctgaccgtgccctttttccactggcttgtgggcccctcagaggtggtggaggtggaggtcggcggcgtccgacagcgcagggggagcgcatcgagaagtgccagtacctggagagcagcggctgcgtggggatgtgcgtcaacatgtgcaaggtccctacgcaagacttcttcaccaacgagttcgggctccccctcaccatgaacccaaatttcgaagacatgagctgcgagatgatatacggccaggtgccgcctctattggaagaggacccagcgtcgaagcaagcttgctacccgagccactgttccatgtcgacgccgtctgcctcggcctgtcccaagcttcacacaagcttaaatgtcaactatttggccaaaggttatagagaactcatagatttgatggctaaacataaaagcgacttagaaggattcaagttagatgtatacggaagtggtgaggactcgcaagaagttcaatccactgccaggaggtataaggttttcaaaaatctgagcattagtgatgtcttgtgcacaacaacagcagaggctcttgcaatggggaaattcatgatctgcgtagaacatccatcaaatgagtttttcatgtcatttccgaactgtttgacatacaagacttcagaggagtttgttgcgagagtgaaagaggcaatggatagagaaccccaaccgctaacccctaagcaaagatacaacctttcgtgggaggcaacgactgagagattcatggagtactcagaccttgacaaggttctgaacaatgaggctgctcagcctaaacaagttgctgctgcggtagtcccccaaccgtcatcatgcagaacgaggaggggtgatgctgacagctcgttggacaggctgtggcagaagaagaaggctgagatcaagcagtaggtcttgcacgtagttccaccaggaatggactcttgagggatactgctttagttatgttttatctcatgtatccgtatcgtccagatgcaagtgttgtgctttcacttggtaccttaattctgaagactcaatattgtttgttgggttccatctgagttcgttgtgttttcacaaatgtttccaaacgaagctaaaaattgtgatagttttggatttgactttgctgctgaagtctggggtaagattccgatgtttggctggatgactaggttttagtttgtctgg

SEQ ID NO: 100609 - DNA, 1550 bp, Zea Mays
gatttctatgttcttttcttacaagtgaacagccgttgcccgtcggccgccgcccctccctccgcgccctcccgaccaccgctccttccccgccttccacctgcgctgtccgccagtcctcctccacctcgctccggcacgcagggcccacaagaagcgccccttccagaagttaatccgccccggtttgactagggtttgtcccgtctcctaatcgatcagattggcaggtaactgccgttgccgccgcgatgaagaggtacggactgcagctccgcacgaagccgccatcgtcctcgtcgtcacgcgcgccgccacctcccgcccggcccctggcggccttcgccgacgacgatgacgatgatgtggaggcagaaatcctccgccaggcggccaagaagcgctccctccagaaggttgaggagcagcaaaagaaggccatggaggaggatccctcggtgtacgcctacgacgagctgtacgacgaaatgaaagagaaggaagcccgccctaagatgcaggataaggtcgtccgcgagtcaaagtatattgcacaacttaaggaaaaagcagagctacgcaaacgagaacaagatataatatacgagaggaagcttcagaaagagagaagcaaggaggaccacctttttggggacaaggataaatttgtaacatcagcctacaggaagaaacttgaggagcagcaaaagtggcttgaagaagaaagagtgaggcagcttcgagaagaaaaggaagatgtaactaaaaagaaagacctgagtgatttttactttgggcttgtgaagaatgttgctttcggtgcacagacacatgataacacaaaatctggtcaccctctaaaggcggacaataaacctgaggatacaaatactagtagccttgatgctgaagcctctgaaccttctccaaagcgtagaagagaatccagtatagaatcagagaggactaagagtatggatatggaagagccgtcggcaagtcgaatgagggattcaacagttgctgcatctactgagaaaaatgctgctgatgtttcatcacatgctaaagagatcccacaaaacattcagccagcaaaggttactgatgatcactacaagagaagtgatggcgcacttgctgctgctagagcgcgagcactggcccgaaagaaagcgaaggaccagcaattgtgaagtacaaggcagaaaagtttaccgatccttgaggtacaatttcatgttttattcaataggatcgtgtaaagatgtcatctgaaatgatctgatagctcccttgcactttaagaagcattttttattgtggttgatgtgtatctatgttgtaaaatgacctcatcagatgccatcttctgccagtaactttggtgttttgacacgtcaactggtttgaacttatatggccgtgcaatagactgttttgcactgtagaatgtactgagtttgaaatagaaagtgtgatagtgagatatactgctcagaacatttcatgaagtaacctggcaagtatgcagatgtgttatttttatc

SEQ ID NO: 100610 - DNA, 2748 bp, Zea Mays
acacatcctaaatccaaaccaaccccacacccccaccaaactaccgaagcggaagggggggaaaatccacgcgacgacgacgcggcgaaacgaagggaagggaagcaggagcgagacaaatccccacccggctccaaaccctagccacctcccccgtcctgtccccagatctcgctgccgtctgacccgcctcgcttcgatgtgacccggccctagggtttgagacgtgttgcggtaggggtgttctcaaggattcacgacacgagagagattcggggaggcgtcgacggtgcgagcacacatgaaggacccggcgcaccgcacgaaggtggtgctccggcggctgccgccggcgatcgcgcagcaggccgttgtggaccaggtcgacttgcgcttcgctgggcggtacgactgggcgtgcttccgccccgggaatgccagccaaaagaaccatagacattctcgactttaccttaatttcaagcgccccgaggatgttgttgagttcgctgaggtcttcaatgggcacgtatttgtgaatgaaaagggtgctcagtttaaagctttcgtggaatatgcaccatcacaacaggttcccaagtcaactatcaagaaggatggccgtgaaggaactattatgaaagatccggagtacttggagtttcttgagtttatttcaaagcctactgagcatctgcctagtgctgaaattcagctcgaaaggaaagaagctgaaagggcagctgctggaaaggaggcacctgttgtgacacctcttatgatgtatgtccgccagcaaagggcagctaagagtatggttcatagacctggaagtagacttagcagaaaacttgcaagtgtcgtaagcagttccagtcctaaaaggtcttctgagaagcgcagatcctccacgtatgttgtacgagacaacactaaggagaaaccaacctatatcatggtgccaaagagagaggagcatacacaaagggaaaaagatgttgctggaaattcaggcgatgccacaagtgggggaacatctggatctggtcaggttgctgagtttaaaagggataaaattgtcatattgaaaggaagaggaaggattgattctaatacacctaatggagcaactcagcactcatcaacccctatcaagaatgtgccaccatcgcgttctagacaagaccagcgacttgaagccagtggaaaaattattaagactatactatcaaacaaggaagcccgcagttcaaatccttctgaacatgagcaggaaggtcacatgtttaatactgagaaggataagcggccaccacgggctttcaaccctcgtaccattgtgaaagatcaggtagttgaaaatgctgagaggagccattttgatgagaaggctaatcatctccatggctccgttcccattggtgagaaggttgaaaggcatgctagaaacagagatagacccgatcgtggtgtatgggcagctcgccgctatgacaaatctacatctgcaggtagttcacatccttcgtcgtcagagttccctcaaatgcagtcacattctggagataatattttgcaactagcagatggtcatggagacagaaagacagacacaaggggtcaaggtggtagccgtggtgttcctgttgaaaatggacataggcacgccaaccgtcgtggccttccacgtggaccaaaggaaactgaaatatctgcaagtgtgcctgatgcgaagaattcaaagaggggctctgctagctatggtgctcatgagagacaagtatgggttcagaagtcaagttcaggctcgtgagtttgttcattgatgatactcccatcgaaacaggtattgccagtcgtggtgaagtcttggattctgcagtgcattcttctttgttagctgttgatcctgtgaagtatgttaacaaaatgtccaacggtcaaatgctgctatgaagtgcaacctcagatttgtcaatcgaggtcttgctgctatagctgaaaagagagcttgctgatttgattcacagaaatagtgaagtaacataacccggcatgtaggtagctctcgaccacttttgggcaagatttgattcggtcccaaggttgatatttctggagcaatgggtggagattagtttggcaccagtacctcactacctcgtgacagtggtcacatatttccaagacccctggaggctacacgcaccctcgtcagagatggatgtaaatatctctagagaaagaagaggtctggttctgattgctgtttacaggttagaggtgcagcgtatttacaaagagatataagagttatcacttatcatcagactgcttggtttgctaaataaaggtgaatttagttactagattatgagaccccgtgttttgactgccgcaatcgtggttcgcggcagcagaaaggttacctagagtctaaaagtggcatctcattttggtattatggttctgaccaaatgggatatgatgtgacttgtgcggttgttttggacgcctggtgtgttttgctaccatgttccaccagacgacccgggggttctgtagtgtcagggatggatgatgtgtttggtgtacagcatcactggtgcttactgttttaaatcttaaaagtgatgttgccttgccttaatggttgatggtgtctgttctcttgtccattccgtcatgaaagttaaaaaaacatgcttgaaaacggaactctccagtattttggagtggttggacacc

SEQ ID NO: 100611 - DNA, 106 bp, Zea Mays
ggagaagcaggagcgaggacatatgtatttatatatatagaaggggagcgacggtttccttttcgcaggcatggtggggagagggagaggcggggcgaccacgaca

SEQ ID NO: 100612 - DNA, 2247 bp, Zea Mays
aaaaaccccgaaagcgccacgcgaccgagaaaaaacgcaaccgaaaaacctcgtctacattcgcatctaggcgcccctccacctcgttccgatccagctcgccggcgcccggcggccatgtcgcagccgacggcggcggtggccgcggaggcgcagccgcagggtcgcggcctcgcggggcgccagggcggcggtggcggccttgggcagagcatctctggcatcgtgcggatggcggtgttctggtacttcgcggccaagttcttcgggcccaagcgcccgcccgcggaccccgggatgctcatgtccaacctcttccagaagggcgagccaatggatatgtggatgtatttatcagagagtgacaagttcaatgattttgctaatgatgacgcacttatttggcatgagacaaacataccatatgcagtatggggacctaccagtactagaacacgatcattaacatactacccttcagaggctctcaagcataatggatctttgtatgctcatgtttactttgcccgctcgggttaccctgtggacccaacagatcctgaatatgagcagaaatctgcatttgggaggacgcaccctgttgtggcattcttgccaaaatcaaaagctggtaaaaagaagagcttgcttggggattcagaagagcctgaagagcaagcaccacctaaggagaataaagaacttgaggataaagatgagggtccgactgaatatttatcttattggaaaccaaatgtaacagtaaatcttgttgaagacttcacacggtatcccaacaataatgtacctgccatcgttgcttcatatctgaatgtggatccagctacaggcgattattatcctacagtattcttcaacgagttttggcttttgagggataaattaatagcgctcaatgagtctgtgaaggaattgcccttaaaccttgaagttggtcctattagcatgaccaagtggcagttttttttacagattgagcagtccttccaggttcatcgtagttatggaagtatgcttgaaggcgaggctgatgaactcaagagggttttccttgaaggaaatccttatcttcttggattgactatgattgtttctctattacactctctgtttgatttcctggccttcaaaaatgatattcagttctggaacaagaacaagtccatggaaggtctatcggcaaaatctgtggttctgaattttgtgtgtcaactaattgttttcctgtaccttcttgacaatgacacttcatggatgatccttgctagctctggaattggtgtttgcattgagttttggaagatcggaaaagcgatgcatattgaagtcgatagaagtggaaaaattcccatgttgaggttccgagatcgtgaatcatatgcacagaataagaccaaagagtacgatgctattgcaatgaagtacctcacctatgtcctcttcctccttgtgatcggtttctctatctattcactaaagtatgaaaagcacaagagctggtactcatggatactttcttctatgacaagttgtgtgtacatgtttggtttcatcatgatgtgcccccaattatttatcaactacaagctgaagtctgttgctcatatgccatggagacaaatgacctacaagttcctcaacactataattgatgacctttttgcattcgtcattaaaatgccaatgcttcatcgtctctcggttttcagagatgatgttatcttcttgatatacgtctaccagaggtggaaatatccggtcgacaagaagcgtgtcaacgagtttggcttcggaggcgaggaggaacccgcagcccaggagactttggaaggaagtgatccagcagctgcagcagcagcagccgagccaacggaggacaagaaaaccaagtgatctccaatcgttcgatcatccaaatgtagcacgccactcagcagcacctgccctcccacagcgggtgtgaaatttttcgctgaactggatgctggactcttgcggtcttgccttactgagatactgacgataagataagttgtgtgtgtaacaggggatacaatagtgtttctagggcagcgggcgaacaggcacactatcgcaattacgtttctagtttgtcttttagcagccattactaggcgatatgcttgtttatattgcttttttgtacaattttgtgcatcatttttcaaaatacataacggcgattcttagcttcctaataatgtt

SEQ ID NO: 100613 - DNA, 1148 bp, Zea Mays
gtaagatgtgttatgcatcaataacaagttattgcaaacaactatcttatatctttgttttcagatattcagttctggaacaagaacaagtccatggaaggtctatcggcaaaatctgtggttctgaattttgtgtgtcaactaattgttttcctgtaccttcttgacaatgacacttcatggatgatccttgctagctctggaattggtgtttgcattgagttttggaagatcggaaaagcgatgcatattgaagtcgatagaagtggaaaaattcccatgttgaggttccgagatcgtgaatcatatgcacagaataagaccaaagagtacgatgctattgcaatgaagtacctcacctatgtcctcttcctccttgtgatcggtttctctatctattcactaaagtatgaaaagcacaagagctggtactcatggatactttcttctatgacaagttgtgtgtacatgtttggtttcatcatgatgtgcccccaattatttatcaactacaagctgaagtctgttgctcatatgccatggagacaaatgacctacaagttcctcaacactataattgatgacctttttgcattcgtcattaaaatgccaatgcttcatcgtctctcggttttcagagatgatgttatcttcttgatatacgtctaccagaggtggaaatatccggtcgacaagaagcgtgtcaacgagtttggcttcggaggcgaggaggaacccgcagcccaggagactttggaaggaagtgatccagcagctgcagcagcagcagccgagccaacggaggacaagaaaaccaagtgatctccaatcgttcgatcatccaaatgtagcacgccactcagcagcacctgccctcccacagcgggtgtgaaatttttcgctgaactggatgctggactcttgcggtcttgccttactgagatactgacgataagataagttgtgtgtgtaacaggggatacaatagtgtttctagggcagcgggcgaacaggcacactatcgcaattacgtttctagtttgtcttttagcagccattactaggcgatatgcttgtttatattgcttttttgtacaattttgtgcatcatttttcaaaatacataacggcgattcttagcttcctaa

SEQ ID NO: 100614 - DNA, 1479 bp, Zea Mays
acccgccattgccactggttatgagaaacaatctaaactctggagcagagctgctccacccagagttttagagtagagctgctctggggtggagcagagccatgccaaacacacccttaaatacggaataactcacgcccttacctgtaataaaatccaatataaagtaatgcaaaaccgtccccggttaaaaaccccgaaagcgccacgcgaccgagaaaaaacgcaaccgaaaaacctcgtctacattcgcatctaggcgcccctccacctcgttccgatccagctcgccggcgcccggcggccatgtcgcagccgacggcggcggtggccgcggaggcgcagccgcagggtcgcggcctcgcggggcgccagggcggcggtggcggccttgggcagagcatctctggcatcgtgcggatggcggtgttctggtacttcgcggccaagttcttcgggcccaagcgcccgcccgcggaccccgggatgctcatgtccaacctcttccagaagggcgagccaatggatatgtggatgtatttatcagagagtgacaagttcaatgattttgctaatgatgacgcacttatttggcatgagacaaacataccatatgcagtatggggacctaccagtactagaacacgatcattaacatactacccttcagaggctctcaagcataatggatctttgtatgctcatgtttactttgcccgctcgggttaccctgtggacccaacagatcctgaatatgagcagaaatctgcatttgggaggacgcaccctgttgtggcattcttgccaaaatcaaaagctggtaaaaagaagagcttgcttggggattcagaagagcctgaagagcaagcaccacctaaggagaataaagaacttgaggataaagatgagggtccgactgaatatttatcttattggaaaccaaatgtaacagtaaatcttgttgaagacttcacacggtatcccaacaataatgtacctgccatcgttgcttcatatctgaatgtggatccagctacaggcgattattatcctacagtattcttcaacgagttttggcttttgagggataaattaatagcgctcaatgagtctgtgaaggaattgcccttaaaccttgaagttggtcctattagcatgaccaagtggcagttttttttacagattgagcagtccttccaggttcatcgtagttatggaagtatgcttgaaggcgaggctgatgaactcaaggtatacagctgtggatactcaaaagcgcatttagttcaacatttttggatatgttgggaccaattcctttgcagcattttatcttgtaaattatgtacttgtagtttgtattcttgagacgtggtttctgtccttattggtttactgtgtctgccagctgctcactgttttctgatatttgtatcacagagggttttccttgaaggaaatccttatcttcttggattg

SEQ ID NO: 100615 - DNA, 687 bp, Zea Mays
atgactcgagctggcagagctatccaggtgcagcatgtgctcacggcaacagttatatatcacgccatggctttggatttacctaagtgggctaccaaaactattgacaagattagacgtggctttatttggaaaggtcgaaaggatgtgctcggtggccactgcttagttgcttggggcaaagtgacacgcccaaaggagcttggtgggcttggcatctcagatttgcaaaggctgaattgggcccttcgagttagatggttgtggttggaaaaaacagatccctcgaagtcttgggctgacttacctctccagagttccaacactctgaaatctattctctctacagctttgactacagaagttggtgatggccgtaacaccttgttttggagggacagatggttgatggggctgagtgttgaggaccttacccctcatattttcgccctcgtcccagccaggattgccaataggagaatggtggcagaaggtatcgtggagatggcttggattcgggacctgggaggcaccatcacttgggctgtcctttctgattttttaactcttagtgaagtcattgcagatttctcccttagtgatggtgtgccagacaagcatatctggaaattttccccgacaggtcaatactctgcaaagtcggcatatgatatgttatttctaggt

SEQ ID NO: 100616 - DNA, 2136 bp, Zea Mays
atggtggccgcgtccaccgccgtctcaacggtgtccgcgatctccactcacattgccgccgggcacctcttcgcggccatcgacgccctgccctcgtgctccgcctccttgctcccgccctctctttacgcctcgctcctccgcttggcaacctcccgccgctccctcgccgccgcccgccggatcgcctcccacctggcctcctcttcgtcagcttccccttccacctcggtctcgttcactccaacattcctgttcaaccgcgccatcgagtgcctcgctgcctgcggcagtcttgccgacgcgcgggagatgttcgacgcaatgccacgccgggacggcggttcctggaacgccatcatctcggcctcgtcccgcgccgggcaccctgcagaggcgttctccctcttcgctgacatgaactctcttggcattcgccccaaggatgtcacgctggcatcagtgcttgcctgctgtgctgagtgccttgacctgcgtggtgcacagcagctacatggtcttatcgcaaagagggactttcagtccaatgtgattctaggcacggcactggtcgacgtgtacgggaagtgcctctcgcttacggatgtaaggcgagcatttgatgacatcctgcaacccaatgacgtttcatggaacataatcatccggagatatcgtcttgctggtatgggcgacatggcacttcatatgtttttcatgatggtacgggctggcgttaggccgctggtatatactgtcgcacatgcaatgcttgcttgccgggataactgtgcacttaaagaagggaagtgcatacatagttttgtgctccgccgaggatatgaccaccacatacatgcgcggagctctgttgtagacatgtatgctaagtgtggcgacattgatgcagcacaaaggctcttcaacttggcaccaaagaaggatgtggtgatgtccacttcagttgtgtcagggttggctgcttgtgggaggatcgctgatgcaaaaatggtgtttgatggcatggaacaacacaatttggtatcctggaatgctatgttgaccggttatgtcaagtccatggatctgactggtgctttagatttgttccagcagatgaggcacgagacaaaggagcttgatgtagttacacttgcttctgtactcaatgcttgtacaggcctgcttgaccttgggaaaggtgaggagctccatgcactcgctctcaagtgtggtttgttcagttgccccttttttaggaacgcacttgtgaggttgtattccaaatgtggatgcctgaggactgcaaaacgtcttcttctatttgaaatgggatcagagagagatagatacgcctggaactcaatcatctcaggttacgaacgccactccatgagtgaagacgctctgcatgccctacgtgagatgcaatccgaggcaaaacctagccagtcaacgttcagctctgcccttgcagcctgtgcgaacatatttctacttaagcatgggaagcagattcatgcatacatgatcagaaacaggtatgatattgacgatatactgcgaagtgcactggttgatatgtattccaagtgtaggctgtttgattattccacccggatctttgagttaggatcatctgatgatgtcatcctgtggaattctatgatctttgcatgcgcttaccatagtaaaggtgactatgggcttggattgttggatgaaatgcggaagcagggggttagaccagactctgtcacttttcttggtgctctggtttcatgtatctgtgagggccatgtcgggttgggaaggagttatttcactctgatgattgatgagtatagcatcgttccacgaatcgaacactatgaatgcatgatcgagctgttgggaaagcatggatacatggttgagctagaggatttcgtggaccacatgccctttgagccaacaaccgcgatgtggctcaggatctttgactgctgcagggaatatgggaacagaaaattagggcagagggctgcacagcgtatcaatgatagcaaacccctgactcccgttatatttgttgagtccgctccggtctacgaatgcagtgactgtgacgatgcagagcccatgtcattctgctga

SEQ ID NO: 100617 - DNA, 863 bp, Zea Mays
atggaatgccgcctccaccacctcgcgctgctgctcggcctcctcgtctgggcggcggcggccgccacgggaggcggggcgcagccggtgtgcgagccctccatcatcgccacccagatcgcgctcttctgcatgccggacatgcccacagcgccctgctgtgagccgatcatcgcttccatcgacctcggcggcggcgtcccctgcctatgccgcgtcgccgcccagccgcagctcgtcctcgcccgcctcaacgccacccaccacctcgcgctctacgcctcctgcggaggacaacacactatgggcgcccacctcgccgccgcctgccaacaagctccgtcacctcccgccaccgtcctcgtgctcgccccgccgccgccacaagcagccaacacgtacgtacgaacccgcgagacgacccctcccccgctgcagccgagcaagaagccgtcccctacaggggccaccgccgccgcccacggcctggccaaccccacgccagcccggccgccgcgcccacgatgcccccgcccccgccaccgcactccggctccgacaagggctgcgtcgtagtcgtctccgccgctctcgagctcgtcttcttcgtcatggctggcatcgtcttcgtcctcgagtgagcccacggcgacgccctggccggccgccaaccatcgccggttcctggcttgaggcagtagcaactgcagtcgtcgtagtgcaactcgttttcacgattcccttttggcagtagtatagtggtagtagtgccactaggccatcgtcgtagttcgatctgttgcatcttagcagtagcatcggtagtactagcttgatcggtggagttggaagaatgcggtgga

SEQ ID NO: 100618 - DNA, 1530 bp, Zea Mays
ctgcctgcctgcctcagtcctgacaccatccatactaggagccgtccctgtcctgcgagccgtcagaggattgcctcctcctctctctctctctctctctctctctctctctctctctctctctctctctctctctctctctctctctctctctctctctctctctctctctctctctctctctctctctctctctctctctctctctctctctctctctctctctctctctctctctctctctctctctctctctctctctctctctctctctctctctctctctctctctctctctctctctctctctctctctctctctctctcttcgtcctggacctggcctcctgtggcgtcacgctcacgcttataagagcacgcggccggcaacactcttccttgccgcgctttataaactttcgccgctgccgctgccccccgctctggttggcgagaaagagcagagggacaccgaaacagagaggagcagaggggagcgacgacaggtcagcggagatggaagcagcggcaggaggagtggaggcggagggggtgatgagggtgctggtggtggacgactcccccgtcgaccgccgggtggcgcagctgcttctcagcagcgactcctgcgccggctcattccacgtcatcgccgtcgacagcgcgaggaaggcgatggagttcctcggcctcaaggacggcggcgaggagcaggccgtcgacatggtgctcacggactactgcatgcccgagatgaccggctacgacctcctcaaggccatcaaggcactgaaccccctggagccgatcccggtcgtcgtcatgtcgtcagaagacgagccccagaggatcagccgatgcctgagcgccggcgccgaggacttcatcgtgaagcccctgcagagcaaggacgtgcagcgcctccggaactgctccgccgccgcgaggcccagcaagggcgccgcgccgtgcgaggccgccgtcgtggccaagaggaatcaaaagccgccgcatcctgccggcgccgcgtcgccgtctggacggcgagcgagcctcgccggagtcgccatggtgctgcactcgtcgggcgtggagtacctgccgctcctgctcaagctcgtcgtgctggcgtacgcggcgctgtgcctgggagagctcctgcacaggtgggcgtcgtcggacggccgctgctcgctctccccgtggtgcgcctgagcagcggtgcgtgtcctgggcaccagcaggagactggtgatgcaaatgcagagtttttcagctgctgaaccaaaaaaaaaaacctccaacagccgtggaggtctagcttagcctttaatttaggcactgtagaagattgactgctttgggattgggtacgctcgcgtctgccgtctgcgtggcgtttgtttcttgatttgagggagacgtatgtatgtacgtacgatacgaggccacggggggtacgctcccctgtatcctctcctctgtatagaatccactgaatcagaatgcaacgcgtgacccgagccaagt

SEQ ID NO: 100619 - DNA, 1807 bp, Zea Mays
ctgcctgcctgcctcagtcctgacaccatccatactaggagccgtccctgtcctgcgagccgtcagaggattgcctcctcctctctctctctctctctctctctctctctctctctctctctctctctctctctctctctctctctctctctctctctctctctctctctctctctctctctctctctctctctctctctctctctctctctctctctctctctctctctctctctctctctctctctctctctctctctctctctctctctctctctctctctctctctctctctctctctctctctctctctctctctctctctcttcgtcctggacctggcctcctgtggcgtcacgctcacgcttataagagcacgcggccggcaacactcttccttgccgcgctttataaactttcgccgctgccgctgccccccgctctggttggcgagaaagagcagagggacaccgaaacagagaggagcagaggggagcgacgacaggtcagcggagatggaagcagcggcaggaggagtggaggcggagggggtgatgagggtgctggtggtggacgactcccccgtcgaccgccgggtggcgcagctgcttctcagcagcgactcctgcgccggctcattccacgtcatcgccgtcgacagcgcgaggaaggcgatggagttcctcggcctcaaggacggcggcgaggtaacagccgctacctgccctgcccacagcgagctagcctgaaggcgacacacgggattagtcagcactcagcaccaccaggtccggccgccggccggcatccctttcccgtgccggggagctgctcacaaagagagcgcatgggctcctgcctcggtgcctcctgcaccacaggccgcgccgtatcgtacggcccacgcgtccgcgcatgcgcgcgtgacggcttctgttccccgccccctctttgggggagcaaaaggcagccgcttttccatggcggagcaggccgtcgacatggtgctcacggactactgcatgcccgagatgaccggctacgacctcctcaaggccatcaaggcactgaaccccctggagccgatcccggtcgtcgtcatgtcgtcagaagacgagccccagaggatcagccgatgcctgagcgccggcgccgaggacttcatcgtgaagcccctgcagagcaaggacgtgcagcgcctccggaactgctccgccgccgcgaggcccagcaagggcgccgcgccgtgcgaggccgccgtcgtggccaagaggaatcaaaagccgccgcatcctgccggcgccgcgtcgccgtctggacggcgagcgagcctcgccggagtcgccatggtgctgcactcgtcgggcgtggagtacctgccgctcctgctcaagctcgtcgtgctggcgtacgcggcgctgtgcctgggagagctcctgcacaggtgggcgtcgtcggacggccgctgctcgctctccccgtggtgcgcctgagcagcggtgcgtgtcctgggcaccagcaggagactggtgatgcaaatgcagagtttttcagctgctgaaccaaaaaaaaaaacctccaacagccgtggaggtctagcttagcctttaatttaggcactgtagaagattgactgctttgggattgggtacgctcgcgtctgccgtctgcgtggcgtttgtttcttgatttgagggagacgtatgtatgtacgtacgatacgaggccacggggggtacgctcccctgtatcctctcctctgtatagaatccactgaatcagaatgcaacgcgtgacccgagccaa

SEQ ID NO: 100620 - DNA, 1753 bp, Zea Mays
ctgcctgcctgcctcagtcctgacaccatccatactaggagccgtccctgtcctgcgagccgtcagaggattgcctcctcctctctctctctctctctctctctctctctctctctctctctctctctctctctctctctctctctctctctctctctctctctctctctctctctctctctctctctctctctctctctctctctctctctctctctctctctctctctctctctctctctctctctctctctctctctctctctctctctctctctctctctctctctctctctctctctctctctctctctctctctctctctcttcgtcctggacctggcctcctgtggcgtcacgctcacgcttataagagcacgcggccggcaacactcttccttgccgcgctttataaactttcgccgctgccgctgccccccgctctggttggcgagaaagagcagagggacaccgaaacagagaggagcagaggggagcgacgacaggtcagcggagatggaagcagcggcaggaggagtggaggcggagggggtgatgagggtgctggtggtggacgactcccccgtcgaccgccgggtggcgcagctgcttctcagcagcgactcctgcgccggctcattccacggtcagccacccctctggtgtctaccacagaaccacctgcccacctcctcccagtttctctttcctaccattcgattcttcttcttccgtccgcgtcgctcgcaccgcgagagctcgcaggctggctcccccctgtttttcaactctggaagagcaccacgcgtgcgtgcatgcatttccagagctgatctgcctctgcttttcatcggctgtcaccgtttccagttttcatcgccgtcgacagcgcgaggaaggcgatggagttcctcggcctcaaggacggcggcgaggagcaggccgtcgacatggtgctcacggactactgcatgcccgagatgaccggctacgacctcctcaaggccatcaaggcactgaaccccctggagccgatcccggtcgtcgtcatgtcgtcagaagacgagccccagaggatcagccgatgcctgagcgccggcgccgaggacttcatcgtgaagcccctgcagagcaaggacgtgcagcgcctccggaactgctccgccgccgcgaggcccagcaagggcgccgcgccgtgcgaggccgccgtcgtggccaagaggaatcaaaagccgccgcatcctgccggcgccgcgtcgccgtctggacggcgagcgagcctcgccggagtcgccatggtgctgcactcgtcgggcgtggagtacctgccgctcctgctcaagctcgtcgtgctggcgtacgcggcgctgtgcctgggagagctcctgcacaggtgggcgtcgtcggacggccgctgctcgctctccccgtggtgcgcctgagcagcggtgcgtgtcctgggcaccagcaggagactggtgatgcaaatgcagagtttttcagctgctgaaccaaaaaaaaaaacctccaacagccgtggaggtctagcttagcctttaatttaggcactgtagaagattgactgctttgggattgggtacgctcgcgtctgccgtctgcgtggcgtttgtttcttgatttgagggagacgtatgtatgtacgtacgatacgaggccacggggggtacgctcccctgtatcctctcctctgtatagaatccactgaatcagaatgcaacgcgtgacccgagcc

SEQ ID NO: 100621 - DNA, 1782 bp, Zea Mays
ctgcctgcctgcctcagtcctgacaccatccatactaggagccgtccctgtcctgcgagccgtcagaggattgcctcctcctctctctctctctctctctctctctctctctctctctctctctctctctctctctctctctctctctctctctctctctctctctctctctctctctctctctctctctctctctctctctctctctctctctctctctctctctctctctctctctctctctctctctctctctctctctctctctctctctctctctctctctctctctctctctctctctctctctctctctctctctctctcttcgtcctggacctggcctcctgtggcgtcacgctcacgcttataagagcacgcggccggcaacactcttccttgccgcgctttataaactttcgccgctgccgctgccccccgctctggttggcgagaaagagcagagggacaccgaaacagagaggagcagaggggagcgacgacaggtcagcggagatggaagcagcggcaggaggagtggaggcggagggggtgatgagggtgctggtggtggacgactcccccgtcgaccgccgggtggcgcagctgcttctcagcagcgactcctgcgccggctcattccacgtcatcgccgtcgacagcgcgaggaaggcgatggagttcctcggcctcaaggacggcggcgaggtaacagccgctacctgccctgcccacagcgagctagcctgaaggcgacacacgggattagtcagcactcagcaccaccaggtccggccgccggccggcatccctttcccgtgccggggagctgctcacaaagagagcgcatgggctcctgcctcggtgcctcctgcaccacaggccgcgccgtatcgtacggcccacgcgtccgcgcatgcgcgcgtgacggcttctgttccccgccccctctttgggggagcaaaaggcagccgcttttccatggcggccgtcgacatggtgctcacggactactgcatgcccgagatgaccggctacgacctcctcaaggccatcaaggcactgaaccccctggagccgatcccggtcgtcgtcatgtcgtcagaagacgagccccagaggatcagccgatgcctgagcgccggcgccgaggacttcatcgtgaagcccctgcagagcaaggacgtgcagcgcctccggaactgctccgccgccgcgaggcccagcaagggcgccgcgccgtgcgaggccgccgtcgtggccaagaggaatcaaaagccgccgcatcctgccggcgccgcgtcgccgtctggacggcgagcgagcctcgccggagtcgccatggtgctgcactcgtcgggcgtggagtacctgccgctcctgctcaagctcgtcgtgctggcgtacgcggcgctgtgcctgggagagctcctgcacaggtgggcgtcgtcggacggccgctgctcgctctccccgtggtgcgcctgagcagcggtgcgtgtcctgggcaccagcaggagactggtgatgcaaatgcagagtttttcagctgctgaaccaaaaaaaaaaacctccaacagccgtggaggtctagcttagcctttaatttaggcactgtagaagattgactgctttgggattgggtacgctcgcgtctgccgtctgcgtggcgtttgtttcttgatttgagggagacgtatgtatgtacgtacgatacgaggccacggggggtacgctcccctgtatcctctcctctgtatagaatccactgaatcagaatgc

SEQ ID NO: 100622 - DNA, 767 bp, Zea Mays
gggggcttttgtgttcctctgtctctgtgtttaatggtttaagggcagccataatagtgtagatagcacaccctctatagcaacatatatttcatctatatactatactatagtaaatctttgcaatgatgtatctatggtagatatctatagttgtttttaatacttaatacactatctgcaccacctcggtttctacgtatagacttactccaggttcatagatagcggcactctccttcttcatttaatttgttgtcacatataatagatgttgacatgaattttttttatagagagctgactgtgcatcattgtggctgtcctaagaacatgatctgtattatagtacatattattataactaacagttggaccatatctacttttgtagattggaaaagatccacgccttcatacacacgtacgtttcgtatcgtccaattcaaacgacgacaggctttgaatgaagccccgtgaatcgtgccgtcgtgaatactcctatcccgatccttttcgtacgtacgtacggtacatactgacgccttctcgtatcattaaattctggtcgtgacattcatttcactcatgcatcaaatattgtatcgcatgcgaatccggttcgtcgcacaggacgcgcggtacgctatcagagccaaatgaatgcaatggaggaacaaaacagtatcgatctgcgctgtcaatgaaccaactacctctttcttcgatcaaaatgttcgactgcaaaaaaaaaaaaaaaaaaaaaa

SEQ ID NO: 100623 - DNA, 3132 bp, Zea Mays
cacgcccacatcctctcttcttttctccccctcccgcttccttgtttcccctcgttctatttggattggaagcttctccgcggccaaggtcacgcacacccacccacctggacctggtgcccgccgtgtaggcctctcggccttcgtcgtcctccagccccaggcggaacacgaggcggcggacgtacgggctcgacggaggcgagctgccggccgagcgaccaggaagacgcattcagaagaggacatcgatcgatcgcggagagttccccgggtagctgacgacgatccatgcttgtggcggccggatcagttcgcccgtccaaccgggattgctaggcagaagcgcaggacggggcagcggcagcgtgagcgacgccaccacccaagcggacggcaataatggacgctaaccactcgccgccggcgcagccggagaggaatcatggcagcttaaactacgacatcgagagcacggacggcacgtggcgcggcgcgggggcgtggcaggagcaggacccatcgtcggaggccctgatgcggtacgacgacgacgggccccgggagccgctgctgcgaaggcgcaccatgaacaccacctcccagattgccatcgtcggcgccaacatctgccccatcgagagcctcgactacgaaattgtggaaaatgaccttttcaagcaggattggcgatcaagaaagaagcagcagatattccagtatattgttctgaaatggtcattagttcttcttattggcctgtgtactggacttgttggcttcttcaataaccttgcagttgaaaacattgctgggttcaagttgttgcttacaagtgatctgatgctcaagcaaaggtacttcacagcatttctggcatatggaggttgcaatctagtcttggcagctgctgctgcagcgatctgcgcttacatagcacctgctgctgctgggtctggtatccctgaagttaaagcataccttaatggagttgatgcttatgctatattagctccaagcacactgtttgtgaagatatttggttcaatacttggagtttcagctggatttgtccttggaaaggaaggtcccatggtacatacaggagcatgcattgccaacttacttggtcaaggggggtcacgcaagtaccatctgacatgtaactggctcagatactttaagaatgatagagataggcgggatttgattacttgtggctctgctgctggagttgcagcagcattccgtgcgcctgttggtggtgtgctctttgctcttgaagaagcagcatcatggtggcgaagtgctctcctgtggagaacattctttacaactgctgttgttgctgttgtactgaggggtctgatccagttctgtcgtagcggaaaatgtggtctttttggtcagggagggttgattatgtttgatcttagctcaaccgtaccgagttacagtacccaggatatcattgcaattattgtccttggaataattggtggggtcttcgggggcctgttcaactttctcttggataggattctccgagcttatagttttatcaacgagagaggtgctccatacaagatccttctcaccgtcacaatatcaatcatcacatcagcatgctcctatgggctaccttggctcgccccatgcactccgtgccctgctgatgctgtggaggaatgccctaccattggccgctctgggaattttaagaactttcagtgcccgccgggctattacaatggtcttgcgtcgttgttcttcaacacaaatgatgacgccatccgcaatctattcagcagtggcaccgagaatgagttccacatgtccactcttttcgtgttcttcactgcgatttactgccttggccttgtgacatacggtattgctgttccatctggtctcttcatccctgttatacttgctggggctacgtacgggcgcatagtggggacccttcttggtccaatttcagaccttgatcctggactattcgcacttcttggcgcggcatctttcctcggtggaacaatgaggatgactgtgtcagtctgcgtgatacttctggagctcaccaatgacctccttatgctcccgttagtcatgctcgttcttctgatatcaaagaccatagccgacagctttaacaaaggggtttatgatcagattgtggtgatgaaaggcttgccattcctggaagctcatgccgaaccatacatgacgcacttggttgctagcgatgttgtgtctgggccactgatctccttttcaggcgtcgagagagtggggaatatcgttcaggcgttgaggatcacaggccacaacggatttccagtggtcgatgagccacctctatcagaggctccagaacttgttgggcttgtgctcagatcccatctgctggtcctgctgaaaggtaagggcttcatgaaagagaagatgaaaaccagcggtagcttcgtgctggaaagatttggtgccttcgattttgccaagccaggctcagggaaaggcctgaagattgaggacctggatttcactgatgaggaaatggacttgtatgtcgatctccatccaattacaaatacatcaccgtacacggtggtagagaccatgtcacttgcgaaggctgccgtccttttccgggcactgggactcaggcacatgctcgttgtgccaaagaccccagggagacctccaattgttggaatcctgacgaggcacgatttcataccggagcatattcatgggctgtttccaaatatacacaagtcacactaatggaacactcaatcagtccatatcttttcttttcttttttgccgtcgccttgtaggttgtagctagctgtacgaaaacgaagctacttttgtccaatatttgctatcggccatctggccttttcttttccattttgtttcttcaggagtactccagaatcatataatcactggataatattgtatttgttcaagagctggttccctggcagaacactccataagtgatatttctgtctttttctcaaatacgcagaagatctacgtatcaatatattatataggaaaacgaccaaattactaccatcacatatggacagagtttacctaatcttttgattta

SEQ ID NO: 100624 - DNA, 3096 bp, Zea Mays
cacgcccacatcctctcttcttttctccccctcccgcttccttgtttcccctcgttctatttggattggaagcttctccgcggccaaggtcacgcacacccacccacctggacctggtgcccgccgtgtaggcctctcggccttcgtcgtcctccagccccaggcggaacacgaggcggcggacgtacgggctcgacggaggcgagctgccggccgagcgaccaggaagacgcattcagaagaggacatcgatcgatcgcggagagttccccgggtagctgacgacgatccatgcttgtggcggccggatcagttcgcccgtccaaccgggattgctagcgaagcgcgagcagcagatgacttgggggcatgtacagtgatgtttaatgtagatgcttttaaggtgtctaaatgagtccaggcagaagcgcaggacggggcagcggcagcgtgagcgacgccaccacccaagcggacggcaataatggacgctaaccactcgccgccggcgcagccggagaggaatcatggcagcttaaactacgacatcgagagcacggacggcacgtggcgcggcgcgggggcgtggcaggagcaggacccatcgtcggaggccctgatgcggtacgacgacgacgggccccgggagccgctgctgcgaaggcgcaccatgaacaccacctcccagattgccatcgtcggcgccaacatctgccccatcgagagcctcgactacgaaattgtggaaaatgaccttttcaagcaggattggcgatcaagaaagaagcagcagatattccagtatattgttctgaaatggtcattagttcttcttattggcctgtgtactggacttgttggcttcttcaataaccttgcagttgaaaacattgctgggttcaagttgttgcttacaagtgatctgatgctcaagcaaaggtacttcacagcatttctggcatatggaggttgcaatctagtcttggcagctgctgctgcagcgatctgcgcttacatagcacctgctgctgctgggtctggtatccctgaagttaaagcataccttaatggagttgatgcttatgctatattagctccaagcacactgtttgtgaagatatttggttcaatacttggagtttcagctggatttgtccttggaaaggaaggtcccatggtacatacaggagcatgcattgccaacttacttggtcaaggggggtcacgcaagtaccatctgacatgtaactggctcagatactttaagaatgatagagataggcgggatttgattacttgtggctctgctgctggagttgcagcagcattccgtgcgcctgttggtggtgtgctctttgctcttgaagaagcagcatcatggtggcgaagtgctctcctgtggagaacattctttacaactgctgttgttgctgttgtactgaggggtctgatccagttctgtcgtagcggaaaatgtggtctttttggtcagggagggttgattatgtttgatcttagctcaaccgtaccgagttacagtacccaggatatcattgcaattattgtccttggaataattggtggggtcttcgggggcctgttcaactttctcttggataggattctccgagcttatagttttatcaacgagagaggtgctccatacaagatccttctcaccgtcacaatatcaatcatcacatcagcatgctcctatgggctaccttggctcgccccatgcactccgtgccctgctgatgctgtggaggaatgccctaccattggccgctctgggaattttaagaactttcagtgcccgccgggctattacaatggtcttgcgtcgttgttcttcaacacaaatgatgacgccatccgcaatctattcagcagtggcaccgagaatgagttccacatgtccactcttttcgtgttcttcactgcgatttactgccttggccttgtgacatacggtattgctgttccatctggtctcttcatccctgttatacttgctggggctacgtacgggcgcatagtggggacccttcttggtccaatttcagaccttgatcctggactattcgcacttcttggcgcggcatctttcctcggtggaacaatgaggatgactgtgtcagtctgcgtgatacttctggagctcaccaatgacctccttatgctcccgttagtcatgctcgttcttctgatatcaaagaccatagccgacagctttaacaaaggggtttatgatcagattgtggtgatgaaaggcttgccattcctggaagctcatgccgaaccatacatgacgcacttggttgctagcgatgttgtgtctgggccactgatctccttttcaggcgtcgagagagtggggaatatcgttcaggcgttgaggatcacaggccacaacggatttccagtggtcgatgagccacctctatcagaggctccagaacttgttgggcttgtgctcagatcccatctgctggtcctgctgaaaggtaagggcttcatgaaagagaagatgaaaaccagcggtagcttcgtgctggaaagatttggtgccttcgattttgccaagccaggctcagggaaaggcctgaagattgaggacctggatttcactgatgaggaaatggacttgtatgtcgatctccatccaattacaaatacatcaccgtacacggtggtagagaccatgtcacttgcgaaggctgccgtccttttccgggcactgggactcaggcacatgctcgttgtgccaaagaccccagggagacctccaattgttggaatcctgacgaggcacgatttcataccggagcatattcatgggctgtttccaaatatacacaagtcacactaatggaacactcaatcagtccatatcttttcttttcttttttgccgtcgccttgtaggttgtagctagctgtacgaaaacgaagctacttttgtccaatatttgctatcggccatctggccttttcttttccattttgtttcttcaggagtactccagaatcatataatcactggataatattgtatttgttcaagagctggttccctggcagaacactccataag

SEQ ID NO: 100625 - DNA, 3019 bp, Zea Mays
cacgcccacatcctctcttcttttctccccctcccgcttccttgtttcccctcgttctatttggattggaagcttctccgcggccaaggtcacgcacacccacccacctggacctggtgcccgccgtgtaggcctctcggccttcgtcgtcctccagccccaggcggaacacgaggcggcggacgtacgggctcgacggaggcgagctgccggccgagcgaccaggaagacgcattcagaagaggacatcgatcgatcgcggagagttccccgggtagctgacgacgatccatgcttgtggcggccggatcagttcgcccgtccaaccgggattgctagtccaggcagaagcgcaggacggggcagcggcagcgtgagcgacgccaccacccaagcggacggcaataatggacgctaaccactcgccgccggcgcagccggagaggaatcatggcagcttaaactacgacatcgagagcacggacggcacgtggcgcggcgcgggggcgtggcaggagcaggacccatcgtcggaggccctgatgcggtacgacgacgacgggccccgggagccgctgctgcgaaggcgcaccatgaacaccacctcccagattgccatcgtcggcgccaacatctgccccatcgagagcctcgactacgaaattgtggaaaatgaccttttcaagcaggattggcgatcaagaaagaagcagcagatattccagtatattgttctgaaatggtcattagttcttcttattggcctgtgtactggacttgttggcttcttcaataaccttgcagttgaaaacattgctgggttcaagttgttgcttacaagtgatctgatgctcaagcaaaggtacttcacagcatttctggcatatggaggttgcaatctagtcttggcagctgctgctgcagcgatctgcgcttacatagcacctgctgctgctgggtctggtatccctgaagttaaagcataccttaatggagttgatgcttatgctatattagctccaagcacactgtttgtgaagatatttggttcaatacttggagtttcagctggatttgtccttggaaaggaaggtcccatggtacatacaggagcatgcattgccaacttacttggtcaaggggggtcacgcaagtaccatctgacatgtaactggctcagatactttaagaatgatagagataggcgggatttgattacttgtggctctgctgctggagttgcagcagcattccgtgcgcctgttggtggtgtgctctttgctcttgaagaagcagcatcatggtggcgaagtgctctcctgtggagaacattctttacaactgctgttgttgctgttgtactgaggggtctgatccagttctgtcgtagcggaaaatgtggtctttttggtcagggagggttgattatgtttgatcttagctcaaccgtaccgagttacagtacccaggatatcattgcaattattgtccttggaataattggtggggtcttcgggggcctgttcaactttctcttggataggattctccgagcttatagttttatcaacgagagaggtgctccatacaagatccttctcaccgtcacaatatcaatcatcacatcagcatgctcctatgggctaccttggctcgccccatgcactccgtgccctgctgatgctgtggaggaatgccctaccattggccgctctgggaattttaagaactttcagtgcccgccgggctattacaatggtcttgcgtcgttgttcttcaacacaaatgatgacgccatccgcaatctattcagcagtggcaccgagaatgagttccacatgtccactcttttcgtgttcttcactgcgatttactgccttggccttgtgacatacggtattgctgttccatctggtctcttcatccctgttatacttgctggggctacgtacgggcgcatagtggggacccttcttggtccaatttcagaccttgatcctggactattcgcacttcttggcgcggcatctttcctcggtggaacaatgaggatgactgtgtcagtctgcgtgatacttctggagctcaccaatgacctccttatgctcccgttagtcatgctcgttcttctgatatcaaagaccatagccgacagctttaacaaaggggtttatgatcagattgtggtgatgaaaggcttgccattcctggaagctcatgccgaaccatacatgacgcacttggttgctagcgatgttgtgtctgggccactgatctccttttcaggcgtcgagagagtggggaatatcgttcaggcgttgaggatcacaggccacaacggatttccagtggtcgatgagccacctctatcagaggctccagaacttgttgggcttgtgctcagatcccatctgctggtcctgctgaaaggtaagggcttcatgaaagagaagatgaaaaccagcggtagcttcgtgctggaaagatttggtgccttcgattttgccaagccaggctcagggaaaggcctgaagattgaggacctggatttcactgatgaggaaatggacttgtatgtcgatctccatccaattacaaatacatcaccgtacacggtggtagagaccatgtcacttgcgaaggctgccgtccttttccgggcactgggactcaggcacatgctcgttgtgccaaagaccccagggagacctccaattgttggaatcctgacgaggcacgatttcataccggagcatattcatgggctgtttccaaatatacacaagtcacactaatggaacactcaatcagtccatatcttttcttttcttttttgccgtcgccttgtaggttgtagctagctgtacgaaaacgaagctacttttgtccaatatttgctatcggccatctggccttttcttttccattttgtttcttcaggagtactccagaatcatataatcactggataatattgtatttgttcaagagctggttccctggcagaacactccataag

SEQ ID NO: 100626 - DNA, 84 bp, Zea Mays
acctcggaagacagactcgacctcgacctcggaggagcctccgcctcgcccgacccagggctcggaccgaccacgtcgcaggag

SEQ ID NO: 100627 - DNA, 1776 bp, Zea Mays
ctatacattgctattccagttcagtaatcggcagctctgacttgcgcgcttctcggagcaagatcgatcgcgagagatgagataacaataacataaacaaagcgcccacatgcagtttacgccgctcgccgtataaaaccccgcgcgtcggcgtctcagtgcactgtagacgcggtgaggaggacgatgagctctacatcggcagcgggaccgatgacgaggccagcaccaccatcatcgcaggctctagtgcttctcgccgccgtcgccgtctcgctccttctttcccgctccagccatgtcgctgccggcggacaccctgattacgcggacgcgctcgccaaggcgatactcttcttccagggacagaggtcaggccagctgccgccggaccaggctgtcacgtggaggtccaactccggcctctccgacggctccgccgcaaacgtcgacctcaccggcgggtactacgacggcggcgacaacgccaagttcggcttcccgatggccttcacgacgacgatgctgtcgtggagcgtgctggagcacggcgggcggatgaaggcgcgcgtgcgcgacgcgcgcgacgccgtacggtggggcgcggactacctgctcaaggccgccacgcagaccccgggcaggctgtacgtgggcgtgggcgaccccggcgcagaccaccgctgctgggagcggcccgaggacatggacacgccgagggccgtgtactgggtgtccgcgtcggcgcccggctccgacgtcgccgccgagacggcggccgcgctcgccgccgccagcatggtgttcagggccgccgaccgggcctactcccggaggctgctcgccgcggcgcggggcgtgatggagctcgccgtgcagcaccaggggaagtacagcgacttcgttggcggcgacgtcggcgcgtactaccagtcgtactccggctacaaggacgagctcctgtgggggtcggcgtggctgctctgggccaccaacagctcctcgtacctcgcctacctctactccttgggggacaacgacggcgtcgacatgttcagctgggacaacaagctcgccggagcgcgcgtgctgctgtcacggagagctctggtgaacggcgacacgaggctggagccgttcaggcagcaggccgaggacttcttctgcaggatcctgcgcgactccccttcctccacgacgcagtacacgccgggcggcctgatgcacaagtcggggtacgccaacctgcagtacgtcacctcggccagcttcctgctcaccacctacgccaagtacatggccgccaccaagcacaccttctcctgccagagcctccccgtcaccgccacctccctcagggctctcgccaagcagcaggtggactacatcttgggcgccaacccccagggcatgtcctacatggtgaacttcggcgcgcggtggccgcagaggatccaccaccgggcgtcgtcgctgccgtcggtggccagccacccggcgcacatcgggtgccaggagggcttccagagctacttctattccagcggcgccaacccgaacgtgcacacgggcgccgtcgtcggcgggcccgacgagcacgacgagttcccggacgatcgcgccgactacgcgcggtcggagccgacgacgtacaccaacgcgcccctcgtcggctgcctcgcctacctcgcgggcacgtacaggacctagctgcagcctgatcgatcactggccactggccacgcgatgatgatcgtttagcttcactgccactgc

SEQ ID NO: 100628 - DNA, 1565 bp, Zea Mays
ttccatcgagccttacgagtggagaagaacacaaaccaatcccagtggccacacgagatagtgcacccacgcgacacgcgccctatcgttgatagccgacacgccggcgccgtgggactcgctagcgcgccgttggcatcccgctggcctgcctcagcgctccggtgcagtgttctgcccctggctcaaccgacgctttctcttggctgctcaatctcgcgaactcgttcagtttcctctcgtagtattccgttcagtttctaggatgtgagagcagcttttgcgttgatgataaaagtgaggatgcttggttatctggatttgtggtgctttatgtgatgcacgtgatcacatatttcaccaacatcattggtgtagtaaccattgctctggtctccatagtatccatcttgggcctaatatgcctctgctgcttagtgtacttccaactgtggatcagaagaagaggctaccggtggcttagctacttcaacgagtcatggctgactcgaataacattgatgctcgttgcattttggtggggtattggcgaggtactcaggctcacctttgtgaacggggaggggaggctgatctctgaccgggcatggcaagagaacgtgtgcaaattctacatcatttcaaatatgggatttgcagaaccagggctgttcctcttgctctctttcctcagcgtagctttgcagaagcaagagcttggtacctagaataggaaatggaaccagaagaccatatgcgcagtattcatcctctgctcgccttgtttgatctgggaagcttgtgttgtttttgttggtggtcttgttgccttagatgacggtcagcgatcaaaggtttcgaagtactggtattctgcctctgcaatccacaacggcgagattacatgcacgtatccattgttgagcagcacatttcttggagcattctacatcgttttgattgtctacgtcatgtttgtcggacatcagatgctatctttggtgatcaacaagggactccgatgaaggatatatgctcatctttgccaccaaaatattactttcccgagcgatacttctcgggttatctgttcttccttggcctggtgaagtagaacatgaggttcttgtgtttgtttccttccttgtgttgatgcttgctgccatggtcggtatcgttattctggtttattttctagacgctgacactttttccattggtgaccaagagcacattgagatgcaaacaagttgtgacatgatcttatgatagcccaacttttgacttgatgttctgctttttgttcaagggctaactgagggggattcccatgctacttcccctggctctagccatattttagtcttgcaactctggttgtgactttgtctccaaagttttgtgaatatagaacagattgaagtagggataacattctcgtgtttactttttcctctccatcttagctcatgtggcatgagaagtcctataaaatagttccttagatagtgaactttactttgtacattgaggcaaagcttttagtatcaaccttttggatgagc

SEQ ID NO: 100629 - DNA, 709 bp, Zea Mays
caagacgcgcatctggctcggcagcttcgagtcggccgagatggccgcggtggcgcacgacgtggcggcgctgcgcctgcggggccgcgacgcgcagctcaacttcccgggctgcgtcgcctggctgccgcgcccggcgacctcgcacgcgcgcgacgtccgcgccgcggcggccgaggccgcagaccgcgtgcgctgcgacccggcgctgctgctgctccagcaggcggcggcagcgcggtgccacgactacgaccacgaccacgagttcggggccgggccggcgccggtggtcgagctcgggagcgacgaggagttcgagctggacctggactcgcccagcctctgggccgagatggcggaggccatgctcctggacccgccgggctgggccaccggcgtcgtcggcgacgcggcggaggtggccctgtgctggccacacggctccctctgggacgcctgctagctcggccaggcaccccggctctgggtcgtctggctgcgagtgtttggccatggccgatgtggccaccggacgctgtttggtctcacaagtgtcgcagtgcttttggtgtgtgccactgtgagcgcgtctctgttgattctcccccgcgtgtggttttgctttacgtctgctgctgttgggcttgctgttttcgttcctcttatcatcttacctgtatcactaccattagctagccaaaatgat

SEQ ID NO: 100630 - DNA, 853 bp, Zea Mays
gcttccatggtggatccaagtcgccatctgcctcatccagtgcaagagggagatcaaactggccacagcagtctcagaagctagtcaaaactagtgggaggctgtgtgcacagaactagaaaagaaaaggcttggagatcgaatggctcgtggtaaggttcagatgaggaggatagagaacccagtgcaccggcaggtcaccttctgcaagcggcgaatgggcctgctgaagaaagctagggagttgtctgttctctgtgacgctgctatcggtgtcatcgtgatctccccccatggcaagatctatgacttagccaccaatgggaacatgcaaggtttgatcgagaggtacaggagagcctgttcagaaatgcatggcgaaagtagcaaccacaacgaaactcagacgataaaacaagaggtgttagcattaacgcatgaaattgatttgcttcaaaagggattcaggtacatgcatggagagaatgatataaaccacatgaatcttgtcgagctccagaccctggaaaataatcttgaaatgtgggcaaataacattcgctcccagaagatgcagatcatctccagggagattgacatgctcaggaacaaggaggccatactgcaggctgtcaatggcgtgcttcaggaaaggataatcgagcagaatgggattctgaatttcagcggcacggcgatgacaccgtcccagctaaccatggagagtaactactatttgtaggcaaagctgtcatcctacgaatttatatacgtttggttccgaaaatgtatggtgtttcattttgttccaagtcaaacatcttgaccaagtttgtagaaaatacagtaacaa

SEQ ID NO: 100631 - DNA, 710 bp, Zea Mays
ccactaggttggatatgacacatatgtttccaagggaaggtgcctcatctagctcaacctcaatgagcagccagaggagtgaaactcatgatgataggatgattgcaatggttctctccgaagaatatgccaagttagatggtgctatggccaagcatcttattaatttaacatcaattcctcatgttccccgtattaacacatagtttccaacatatagtgatgccactatggaccattatcgcctccttgataggctaaatgcatacggcttgtttgaggtgagagtatctggtgatggaaattgtcagtttcgtgcattctcagaccaactatatagatcacctgattattacgagcgtgttcgaaaggagattgtaaagcagctcaagaaatgtaacaccttatatgaaggttatgttccaatgaaatataaaaaatattgcaagaaaatgaagaagtctggtgaatggggtgaccatgtcacgctacaagcagctgctgacaagtttgctgcaaagatatgtctcctaacatcattcagagatacatgttttgttgaaattgttccgcaatatcaagctccacagagagagatttggctgagtttctggtctgaaattcactataactcactgtacgatgctcgagtacagcagttgtggtacaacctgccaagtggtggaaaccctgagtggctgagtgactga

SEQ ID NO: 100632 - DNA, 954 bp, Zea Mays
ccactaggttggatatgacacatatgtttccaagggaaggtgcctcatctagctcaacctcaatgagcagccagaggagtgaaactcatgatgataggatgattgcaatggttctctccgaagaatatgccaagttagatggtgctatggccaagcatcttattaatttaacatcaattcctcatgttccccgtattaacacatagtttccaacatatagtgatgccactatggaccattatcgcctccttgataggctaaatgcatacggcttgtttgaggtgagagtatctggtgatggaaattgtcagtttcgtgcattctcagaccaactatatagatcacctgattattacgagcgtgttcgaaaggagattgtaaagcagctcaagaaatgtaacaccttatatgaaggttatgttccaatgaaatataaaaaatattgcaagaaaatgaagaagtctggtgaatggggtgaccatgtcacgctacaagcagctgctgacaagtttgctgcaaagatatgtctcctaacatcattcagagatacatgttttgttgaaattgttccgcaatatcaagctccacagagagagatttggctgagtttctggtctgaaattcactataactcactgtacgatgctcgagatctcccaagcaaatacaagcctatgaagaagcactggttgttgttttaatatccatgcgggagtttgcttcatactggtggaatcatattgtttgaccctttcgaccaccgttcgccaaatgatgcaccgtacaactatagcacgatccaggcatacaacagtaggtgtagagttacaatgcggaacctgagccttgtgaatagatattcttaatacaggttgactgtaatgccctatcttatttgttcaccgtgtatattctttatttatacagctacatgttagttctattcaccagttc

SEQ ID NO: 100633 - DNA, 357 bp, Zea Mays
ttggcatatcaagagcatccccctatggatccgaccaccacgccttgctccaccccactcgctcgtcatccctgacatgggagatccaaggacggtcgcaggcctttgcatagctcctcggggcccattgacaccttcagcgtgcttgtggcggtcctgctgctcaccttggtgtcctgcatctttggccgggtgtgcgcgggccacaccgaggggcccaacgagcggtatgactgcaggaggctggctccacagtggtgcggctggcgggctcctcgatggaccgttctgaagtgggaggcgaaggcgtcgcccgtagtagaagtgcccgctgcatcaccgccgtccgaggagccg

SEQ ID NO: 100634 - DNA, 1261 bp, Zea Mays
atgacaccggattcctcgccgacctccacctcacgtgcctcgcctccacctccactcgcctccacctccactcacccccacctgacatctcgacccggtcccgatacgacgaagagaaaggggaggaggcaagctcctacggagatgcagaaggatagggccccgtcgctgccccaaccaccccgacgccgatccactccctctggctcccttcgactgtccgacctccagtgcgccgccttcttgcctagatcccttcgcctctcgccccactacggactcagcggctcaaccaggcacctaggcaccagcaataggcaccaccactaccaccacgcccatgtccaaagcaccggaggtcgtccacatcggtgtttagactcagttcctgccaaaaagtcgcatccttggaggtttttcgacccgtagtcaatccaagatttttttctgttattttttgcgcactacttttgattggaaagttcaagatttgttccttccttccttgctatcagcatgcgtgggttgttgagtttggctcatgggtctcgaatcgaactcttgtttcagggcagggagccggaggaggaggaggaggggagctggcgagccgggcgaaggcggcggcgcgcgcgtggccatgttgtgatagctgcggcgggtgcaccaggccggagccaccgtggtgccagcgcctggacgcggcgccctgcgggtgccacccagcctgcagggactgcgtcaaatccagcctaagcatcgacccgccggtgtaccagtgcatggaccgcgtccccagcttctgcatcgccgccgccgccgcgcactgaccgacgcgcggggcagccgagctagccgacagctggtttctgagtgcagcttggtattattgacccagcaacctttttgctcacccaccctcccgctcgcccgccggcgaatcatggcgtctcgagtctttaaactttgaagccagccgtggattaggatttttgtttgtgtgtgtttgtgtagaatgtaactgtaaagagagatgaggaatctgtaatctggtgagcgagcaaccaatctgagtttacgttgtcctccgtctgtggtgtggtgtccttcttcttctgttctgttttctttctttcagttacaccattttgaaagaggttttactaggttagccttaagactacgatttccgttttctccatcttttagtttgtaaaatagtttttataatgattacaattcaataacaatagtaaaaata

SEQ ID NO: 100635 - DNA, 1054 bp, Zea Mays
atggcggccttctcctccagcaacggcgtgccgccgggcttccggttccacccgaccgacgaggagctgctgctatactacctcaagaagaaggtcggattcgagaagttcgaactcgaggtcatcagggaggtcgacctcaacaagatcgagccatgggagctgcaagagacgtgccggatcgggtcggcgccgcagaacgagtggtacttcttcagccacaaggaccgcaagtacccgacggggtcgaggacgaaccgcgccacgacggccggcttatggaaggccacgggccgggacaagtgcatccggaccagctaccgcaagatcggcatgcgaaagacgctcgtcttctaccgcggccgcgcccctcacggccagaagaccgactggatcatgcacgagtaccgcctcgaggacgccgacgacgacgacgcccagggcggcaccagcgaggacggatgggtggtgtgccgcgtgttcaagaagaagtgcttcttcaagattggcggaggcgaagggagcaccaccagcagccagggcgcggatgccggcggccacctggccaccatgtcgccgccgctcggcggacaccacgacctggcgtacatgcacccgcacccgtactaccaccacgccgcctcctactactcccagatgcaggccccggggccgcatgccaccgcatactcgcaccacgtgcaggtccaggacctcctcaccaaccaccgacccacggacgacgacggcgccggcaccggctacgacttctccggcctgcccgtcgagaatcaacccggcggcggccttgacgtcggcagcagcgatggcgtcgccacagacgacggtggccagctggctggcgaaaggagggatcagaccaccggtacagccgcagatcatcagtggcaggcgatggatggtttcagcaacggcgggagcgccgaggtgcagcaaatgaccggcgcccaacgaggcggggagatggatttgtggggttacggaagattgtgtggccatgcagaagaaactaataagcacaaggattgaactt

SEQ ID NO: 100636 - DNA, 597 bp, Zea Mays
atgcttacttccatcctaatgttgaaagatggatggagaagctggaagaatctgagactaaggttggctttctatggtatgaacatatatacaagctagacaaagaagccccgtgcaggtcggctcaggcttcttatgtttcagattctcctgcaaccatttggtgttgtttttggctgagttagaagctccgtccaggataaacgatgctccataaatcatgaagcagatgcccccgccacctaaggatttggagattgctatagttcggagctcgagctgcccttcgatcgaaccaagaataaccctgctgccctcacaacatcaaagtttggtatcagcaagatggagcttctcaaggcatgcttttgtagggagtgactgctgatgaagaggaactcatggatgaagatcattgatccctttcatgtcatggtctattcaaaaggaaaatccacttctgagattaacagttgagaactgtgagttgtccagtattggtgtgattatacttctggactgcctcacaaatgcgaagcaactccttgatgtgttatctattgcagacaatcatctagggagtcctgtggcagctgc

SEQ ID NO: 100637 - DNA, 216 bp, Zea Mays
ttctttctttgttttctctgttgatacgtttttagcagttattctgtttaatccttctatttcacatatagggtcatttattggattgtttgtgttgaaggcagttggttactacaatgctggaacagtggagtttattgtggacactctttctggagagttctacttcatggagatgaatactcaactccctcctcccctcctagatcccgtgat

SEQ ID NO: 100638 - DNA, 98 bp, Zea Mays
ggcccaactgctatgacggagaaggaaagcttcttgcagggattgatagaagttcgatcagactaccctggtgcatggttggtgcatggatacaactt

SEQ ID NO: 100639 - DNA, 1247 bp, Zea Mays
ggggttgcggccaggggagacgaatgaacccctgcccccgcctggatcccatcgcaaaagccccctccccctctccgccttcgcgcatattatattcgcgcaccatcgcagcaacttgcacgggcgccgatgactagttgcgccagatgcactgcatctgctcggcgtggtgcctccaacgtccaacccctcttcctcttgtctctcgtctacctctcttctgcccctctgcgtccgtgtctccatcgtcgtcgctgcgtgaggttgacgacgaccagtcacaggatctgttcgttcctcatgcgacccagctagctaaaactggcatgcatggacatgctacgctgctgcgtcaatccatctcaccagtgctagctagctagatctggcctgattcgccgatcgagcggtggtgagacggagtgcttcagctcaaagactgctagtggtaggctggtagctagctgtgtgcctgtgtgcagtgtgcactgccactgcatgcgcggcgccttggacttaagacggcagcacacgcacgcgaggaggcgtcggctgaagcgagcgctccggcggctccgcttcgctcatcaggttcttgagccccggaaacgatgagcacgacccggccggaggacacccagcaactgatcaacagtgccgccgctagccccaaccgcagcgcaccgtccgccgcgcccagcgatatggagaggggcagcggaaccgccgcgtcctcgtcgcgcgcttcgacgacgtctcactcccaccagagggccacccacagggtggtggaggaggaggaggaggaggagcctagtagcagccgtggcggcggcagcctctgctccgggtacctgtcgctcccggctctgctgctcgtcggcgtcaccgcgtcgctggtgatcctcccgctcgtcctgcccccgctgccgccgccgccgtcgatgctgatgctggtccccgtggcaatgctgctcctgctgctcgtgctggcgttcatgcccacgtcgtccaccggcggccgcggtggaaccggaccgacctacatgtagataatcacatcggttttttttttcctttctttctcttgtcgtcctttcgtttggattttgtgacagagggaggtcttgcgatggatcagttagtcctcagcttctgctcttctcgatcgtacgatgtctctgttcggctaattaatttgcataggggtatatatatgctgcctagatcttaaaagtatttaactc

SEQ ID NO: 100640 - DNA, 1539 bp, Zea Mays
ggggttgcggccaggggagacgaatgaacccctgcccccgcctggatcccatcgcaaaagccccctccccctctccgccttcgcgcatattatattcgcgcaccatcgcagcaacttgcacgggcgccgatgactagttgcgccagatgcactgcatctgctcggcgtggtgcctccaacgtccaacccctcttcctcttgtctctcgtctacctctcttctgcccctctgcgtccgtgtctccatcgtcgtcgctgcgtgaggttgacgacgaccagtcacaggatctgttcgttcctcatgcgacccagctagctaaaactggcatgcatggacatgctacgctgctgcgtcaatccatctcaccaggtacgctgctgtacatgctgctacgagcctacgatcgatagcagtctgtgccttcctttgctcgatgccgatgtttatctgcatgtgatcgtattcgtatgcacggccctccgccctctcaagctgagtgctttttggtgggcccatcgtcctatatacgctcatcagttcactgacgacgatataacgactgttggggttcagaaactacatattgtggtgctcgcccgatctctttcttgtatattcttcttattattagtctctctctctctgaaagaacaaggaactagatgtcttgttttgtgcctcctactatacctttgcgtgtttttcttgcttttgtccatggcttttcaccggtctgctgggtgaagtaatttacacgcatgtcttacgcacgcgctccttcagttgtccgcatatctgatcataacatcgcttcattcatgtgctgacgagatatttttcgccgccgagactgcagtgctagctagctagatctggcctgattcgccgatcgagcggtggtgagacggagtgcttcagctcaaagactgctagtggtaggctggtagctagctgtgtgcctgtgtgcagtgtgcactgccactgcatgcgcggcgccttggacttaagacggcagcacacgcacgcgaggaggcgtcggctgaagcgagcgctccggcggctccgcttcgctcatcaggttcttgagccccggaaacgatgagcacgacccggccggaggacacccagcaactgatcaacagtgccgccgctagccccaaccgcagcgcaccgtccgccgcgcccagcgatatggagaggggcagcggaaccgccgcgtcctcgtcgcgcgcttcgacgacgtctcactcccaccagagggccacccacagggtggtggaggaggaggaggaggaggagcctagtagcagccgtggcggcggcagcctctgctccgggtacctgtcgctcccggctctgctgctcgtcggcgtcaccgcgtcgctggtgatcctcccgctcgtcctgcccccgctgccgccgccgccgtcgatgctgatgctggtccccgtggcaatgctgctcctgctgctcgtgctggcgttcatgcccacgtcgtccaccggcggccgcggtggaaccggaccgacctacatgtag

SEQ ID NO: 100641 - DNA, 335 bp, Zea Mays
aggttacaaagtagacatcccctatttctatagttcatgcttcatggatatgatgatcacacttcatgatctccggtgctgagggaacagtgatagattgatatgaggtttgcaggtgtaatccttgcttcctagctgtagctagaatacatagcgttatgctcttatcagctttgcttggcctctacatcacacaagttgtctgccttgagggcattcattcatgtggccaagtgttggtttgtgatctcccttgctggtgaattcctggagaccctccgccacagaagaagtccctatctaaagcttatcgtatatacaaaattaaagtactt

SEQ ID NO: 100642 - DNA, 1512 bp, Zea Mays
atggaatacactttattacctgatttagcaccgcataagatacatgcaaagattcaagtacatgtatctagaaagtggcttttccgaggtgctactgatagtggaccactacaacatgttgatatggttttgtctgatcgagagggtaatgctatttatgctgaaatccctggaaatttagctgaacaaaaagcaacaaatattgaagaaggaggagtttatgatatcaacagattcagagtgtgcgcagcaaaaactgttttcaaaatagtggatggggacaaaatgatccaattcacatttcataccatagtaaaatgtgccacaagccctccaacaacatttccattatatgtttatcggctaacatcatttgatctaattgagcctcatgttcaaactacaaataactttgttggtgtctacctaagtggtggtcctgcctgtagatggtacttcaatccaacaattccagaggcagaaccttatcttaccagccagtctacaaaaagaattgtgttacagcttccccaaaatttacaacatcctccagcgatggaaacgaagccaattgtcgaacataaatccctctatgaacttcttacagttaacccatatgatttcccggaaacaggatttgaatgtactatcacaatagcagaaataccagctgaacacaaatggtggtttccatcttgcacaaaatgcaataaagcaacaatccctcacactacaggttatcactgtgaatcatgcaattgggatggatacaaatttaaatacaagctcaaattcctggcatctgatgaaacagatattgcagaaatgttttgttttgacactgtagcaaggcacatcgttggtaaatcctgtgagattgttttacgaagtgtcactgaacagtctcctatcccacctgatctagcacaaatcatatctctgaaatttacattcagagtcacaattgacaatcaatctcttttccaacaaaccagttgcccaaacgtgttccgcattaattctattgttgctgcacatgggagacaacgttctttaccaatgcaaataggaatttctgatcaacaaggaccatcaacacctcaaaacaaatcaaaaccgatgttattggaagactctccatctacaactttggaaaaattatctactacaactcctacaactgtagtaaggaagcttctatattccgaaactgacaacacgccgaaaacgcactcaatttcttttactcaattatcttttattcattttaagatttatgcaaacaagagtaatatcaatagcccagaaaaagatgatggcgataaggaaaccgcacagaacttcgatatatgcagcttgatacaatacccactaacaaaggaaaaggaccagcagatacaattgaatcgccacctaaaaggttcaaacaagggacgatacgcatcggaaaagaaatggacatcaaatcctccgagaactaaagtttcactcagatcttcgtcgaccttttga

SEQ ID NO: 100643 - DNA, 455 bp, Zea Mays
atatcggtcagtttgccatcagaacaaggagaaaaaaaggttccggtcttcatcccttccatttccaaaggacgacgctctcaccattcacgaacggcgactgcggatcgatcgtgcgtcgtctcctgcgccggcctctcttcaagtcagcgcgcggtgtcctgtgttggacgcgctcccacgacaacgcctaccccctccccctgcgcccaacggagccatcagtttcagatagtgtctttagtgccatggcgccgctacgccagggagcaagtcggtccgccatggctgggtggggcatataccacagactgaagcataaaccaacgcaaatccaatgattgtaaaacagcagtttcgatggttcccaagcagcccacagattctattgattgtgggtgtctttcagcatctgagggtttctaccagtccaggttacacacaagcttcaaatt

SEQ ID NO: 100644 - DNA, 1052 bp, Zea Mays
tgtgttttgaattgaagggatagtgctgtaggtttttatttctcagtcaagatcgcacactttctctgcctctccatacaatacaggtggagataccggatacgtcgtggaacatacagaacatacccaaaaaaaaaaaacgcgaacacccctcgtttgactgttcagagctccaccttcttggtctgatgatgaccatccccggcgccgccgccaatactcttcttcgcgtcgccgtcaccgtctcccccggcaatcccaacgacgcgcgggcccttgacctgctcgggggccagcttccggaaccgcacggtgaggacgccgttgtcgaggctggcgccgacggagtcgaggtcggcgttctcggggaggcggaactggcgccagaacctgccgtgggagcgctcctcgcggtgccagtggtcgcccctgtgctcctccgcgcgccgccgctcgccgctgactcgcagcacccggctgtagtcctccacctcgatcttgaggtcctccctgcgcatcccgggcacgtccaccacgatctcgtgcgcgtcgggagtctcgcgccagtccgcgcgcgccatggagaccatggccacgtcgtcccggtcgaagcccaaggggacgtgctccaggatccggaacgggtcggccaggaggcccaccccgggcccggacagcggagacgccgccgccgccgcggcctcgtcgcccccgcgcctcccttcgccgaaccacgggagcagcgcgccgtccgccagtgccgccgccatcacggcgaggcacgcgagcgcgagcgctgctgcggctctcctcgacatcgtcacggacccgaaggcttcagggcagtgcgtgcgcactttaaagttcaatctaacagaactcgctgatcagtgagcaaaaaactacgcccgattgattaaaggtcgacactcgcgccaagatttcaacttcaagacaagaatcgacgcgcaagccagttgacgtacgcttcctgatgcgctcttcctagctagtgcctagtgtgccttcgatcggtggtatgatgatgcgat

SEQ ID NO: 100645 - DNA, 892 bp, Zea Mays
ttaaaaagaagaagaaaacatcgtgtgtggagcagaaagctccggctccgtgcgaagaggatggatagataagcaacgggtgggcctcgatgaggagaagcctgggccactaaccgccgccgcatcgggagccttcgtttggccacggttcagctagctatcacgcgcgaaggcccacccagacccaggtgcgtgtttgattccgaggcggggatgacgagcccaatggtggccaccccggtccagttccacacaaccggccgcctcagcttctgctccttttcctttcccagcgcatcagggaggcggcgattcgcggcggtgagggcgtccgcggagacgatggcgacggagaagctgggcatcaaggtggagcgcaacccgcccgagtcccgtctctccgagctcggcgtccgccagtggcccaagtgggggtgcgagaagagcaagttcccgtggacctactccgccaaggagacgtgctacctgctgcaggggaaggtgaaggtgtaccccgaaggccacggggaggagttcgtggagatcggcgcgggagaccttgtcgtcttccccaagggcatgagctgcacctgggacgtcgccgaggccgtcgacaagcactacaacttcgagtagccgccgccgccgactagccctgcggcgctcgatgtagacttgctgtgctcttgtactctgaacctatgatgctccactccagagttaacagaccgtgtaataaagctccggattaggggactacaatgctgtactatctgtttcagatcccgttcggttagctgtgataagacctgaaactattccagctgatcagttttaatacaaataaaactatggaacagttttagaggatccgttccgaacaaaacgaaac

SEQ ID NO: 100646 - DNA, 1003 bp, Zea Mays
ttaaaaagaagaagaaaacatcgtgtgtggagcagaaagctccggctccgtgcgaagaggatggatagataagcaacgggtgggcctcgatgaggagaagcctgggccactaaccgccgccgcatcgggagccttcgtttggccacggttcagctagctatcacgcgcgaaggcccacccagacccaggtgcgtgtttgattccgaggcggggatgacgagcccaatggtggccaccccggtccagttccacacaaccggccgcctcagcttctgctccttttcctttcccagcgcatcagggaggcggcgattcgcggcggtgagggcgtccgcggagacgatggcgacggagaagctgggcatcaaggtggagcgcaacccgcccgagtcccgtctctccgagctcggcgtccgccagtggcccaagtaagtgagcgagcgtgcgagccgccctccctccctcccagccggcgtctcgatctcgaatctccccgccgccctccgcccgctccgtgcccgtgctgactgcggcctgctgatgaatgaatggaccgatcaggtgggggtgcgagaagagcaagttcccgtggacctactccgccaaggagacgtgctacctgctgcaggggaaggtgaaggtgtaccccgaaggccacggggaggagttcgtggagatcggcgcgggagaccttgtcgtcttccccaagggcatgagctgcacctgggacgtcgccgaggccgtcgacaagcactacaacttcgagtagccgccgccgccgactagccctgcggcgctcgatgtagacttgctgtgctcttgtactctgaacctatgatgctccactccagagttaacagaccgtgtaataaagctccggattaggggactacaatgctgtactatctgtttcagatcccgttcggttagctgtgataagacctgaaactattccagctgatcagttttaatacaaataaaactatggaacagttttagagga

SEQ ID NO: 100647 - DNA, 1785 bp, Zea Mays
caatttcttcgaggaggtcgtaccatggacggaacgtggtggacgagcggtcttcctgccggccgacgcgtccggatcgggttccaaccagcccaaaccaccccgccgccggccgtttccccgcactccaccacctgcgccggcccatcctcccggcctggcccatgccaacgcgccccgcgctgcccttgccgtgcctcagccggatccccctcaaagcacgaccacaccacgccgccggtaccggcgcaccatcgaaaccaaccctagccaaaccaaatcagatcagatccccttcccctctccacgcccaaatcgctccgatccgccgcgaccgcgatggacgacgacgacgacgtgtcgccctcctcctccccgtcgccgccctcctcctccgcgctccccgtggacggccccgtcaccgtcgccgctgcgccgccgggcgcttccatggcggtcgcgctcccgatccataggaccgcggcgtccctgtacgctagcgccggcggcgatggcggcggcggcggcgggagggaggacgcctggagcgacggcgccacgtccgcgctcatcgacgcctggggcgagcgcttcgtcgcgctcggccgcggcagcctccgccacccgcagtggcaggaggtcgccgaagccgtctcctcccgtgacggctactccaaggcgcccaagtccgatatccagtgcaaaaaccgcatcgacacgctcaagaagaagtacaaggtcgagaggatcaagccggtctccggctggcagttcttcgaccgcctcgattttctcctcgcgcccacctacggcaacaagcccggcaacggcggcggcgggcacaactccaacagccgcagccagatgcctgcggcgccgcgagtgggcttccctcaacgcagccgcacgccgctcatgcccgcagcaggatccggggccaagcggagggcgccttcgccggagccgtcggtgtcctccgattcctccgacggcttcccgccaatgccggcccttccggcggtgaacgggaagaggaagaggacggacgatgggcgctccgacggaggcggcgaccgcgcgcaggggcttcgggagctggctcaggcgatacggcgcctcggcgaggcgtacgagcgcgtggaggccacgaagctggaacaggaggccgagatggagcgtcggcgcatggacttcgcgcaggagctggagtcgcagcgcgtgcggttcttcctcgacacgcagatggagctcacgcaggccaagaatcacgcgtctcctgccacggccgccgtccctgctgttggctcgtcgaggaggattccgaggatgtcactggttaccgacgccggtggcagcagcaatcaccatagccgttaccggatcagccatgttgacaggcaccgccatgctccacgcccacattaccagcagtaccatgacaacaataacgcgggggcagcggctgcaagtgacggtgagcagtctgacgaggaagattatgaagaagagagccagtaactgcatcattgttcgccataattcatagggttaattaattggatctctatgccatgacaattccgtgttcgtagtgtctaactgagtcgttcttttttatacgctcgcaacgacgtttgatccacctccaggtcactatattttagtacgaaccaaagtaactcttctttctctggcttctgttcttcgtatggcggtgagtcaccggtgggaggggcgagcccggttggtggcgcgcggtcacggcggacggagcaacgccaacga

SEQ ID NO: 100648 - DNA, 324 bp, Zea Mays
gaagctccgcctccaccctcgcgcgccgtggtcttgccacgccgcgccgccgccgccgcgcactcctccttccgcctgccccgccgccgcaaggtgcacgtcgtccggctcggcggcggcgcgcgcgggcgcgggcccgggcccgggctccggcggtggctgcggcgcgcggcgtggcgcctcgccgagctctgcgtggcggcgttgtcgtcgggctcgggccgcccgggcgaggcgtacccgccgtgggccgacgtggagcgctacttcgccgcgcccttcgtccccgtcgcgcgggaccgcaggcggcctgctaggtcgtag

SEQ ID NO: 100649 - DNA, 1707 bp, Zea Mays
cacgctgccacgcacacgctccgacacggcgacaccccatcctccgcattcccccatgtccccccgccacgatacgctccgcctcctccgcctccgcttacctcctcaccaccccctacgccgcctcctccactacgcgtgcagccccgacgcccacccgccgccgcaacacccggccccggcagcgccgcacgccgctgagctctggatagccaaggcgctcgcgtcagcggccctccttcgtccgcactgcctcccggccttctgccgcctcgcgccctccccgcttgctgccgcggcctctgtccggctcgcgccgtgcgccggctctgccctccgcctcttctccgcctgcactcccagccgctctctgtacctccttctgagcagtcctacatccacgttatcgcgtcgctgtgccgatcaggtcgccacagggacgcactcaagctgttcgaccaaatgacggatcagtcagggtacgtacctgacgcagggttcttctcgttcgtggccggctcctgcaccaacgccggccttcttgatgctgcggcgaatttgctcacaaagggctcctggtttggttgccgcattgagtggtatgcatataacaacctcttgaacacgttaattgcccatggccgtgcgcaggatgctgttgctttgtttgagagttggattcaggatgggctgtattctcccgatgtctggagttttaatgttgtcattaagggggtgtgtcgggtggggaatttgcagaaggcacttgagttagttgaaaggatgactgagtttgggtgttccccggataccatcacacaaaatattcttgttgatgggctatgcagggtgaagcaggtgaacaagggccatgaggtattgaggaggctccagagggatggtgtttgcatgcccaatgttgtgacatacacctcagtaatatcaggttattgtaaggctggcaggatgaaggatgcattttcagtgtataatgacatgcttcaatctggaacaagacccaacacggtcacatacaacgtgcttattaatggatatggaaaggctttggacatggaatctgcagtgagaatgtattggcagctgattctccatagttgccctcccgatgttgtgacatttaattctttgattgatggatattgtcgatgtggacagcttgatgatgccatgaggatttggatggagatgggtcagcatcatattcaaccaaatgtatacaccttctccatcataatacactcactttgtacgcagaacagatcagcagaagctctcagtcttctaagggaattgaatatgcgagccgacattgttccacagacatttatatataacccgatcattgatatactgtgcaagggaggaaaggtggatgaagcaaacttgattgttacagacatggaagagaaagggtgtcatcctgataagtatacatacactattctaataattgggcactgtatgaagggtaggataccagaggcagtcactctttttcacaaaatggtggaaactgggtgtcgccctgacaatattacaattaattcttttattagttgtgttttgaaggctgggatgcctaatgaggtacatcaaataatgcttattgcttcaggtcatgcttcagctagtcagaaagttcattctcaccagtgccaaagactagatatgtcagttgctgtatag

SEQ ID NO: 100650 - DNA, 1451 bp, Zea Mays
cggcaagaggtggctgctgctgctgccgctgtcgcggtacgtggaggtggacgagcagcaaggtgtgcagctcttctactacttcgtgcgctcggagcgcgacccctacgaggacccgctgctgctgtggctgtccggcggcccaggctgctccggcatctccggccttgcctacgagataggacccttaaaatttgatgcccgagggcaaggtgaatttcccactcttctctaccgaccggagacatggaccaaggtgagcaacatcatatttgtggactcgccggtggggactgggttctcgtacgccaagtccgaggaagggctcgagaccggcgacaccaagcaagtgaagcagctagtcattttcctcaggaagtggctccaagaccatccccggttcgtgatgaatcctctttatattgctggagattcatacagtggtctcatcattcctactcttgcattagaaattgacagaagcatagaactcggtgaaaagatattttccggtctcaaggggtacattgctggcaacccgttgactggcggacagtttgatacagacagccaaattccatactttcatgccatgggacttgtatccgatgaactttacaagtgcacacgggatatcaataagcaatacatcttggatcctgcttgcccggatgatgatctgttgagccccaagactgtagcagagacagatggaacgagcaggttgatgctagagtctgcagattttctacttggttccaaatgtgcagaagctttatacattctatcctacgcttgggggaatgatgatacagttcaggagagcctcggtatccgcaaggggacaattggagcatggaaacgatacagccatgcattgccttacaattatgatatccagagtgtagtggattaccattcaaggctagccacaaaaggatacagggcgctgatatacagagcggcgaccacgatgctgttgtaccccatgttggcacacaagcatggattagatacctcaacttgacaatcgttgatgattggcgaccatggtacgttggaggccaagttgctggattcacaaggagttatgcgagcggcctaacatttgccaccgtgaagggtgctggacatgttgcgccgttgtataagaccttggaatgccaaaaaatgtttataacatggatttcagggaatcctctttgatgcaagtctgatagaatgacccatcggttatctgagtgggcgtcagccgtcaggaatcctctttgaagggtgaacgtgcatatgttgttgctatatgcatacatggggacatggggtgtaggggtgcttgtgcgttcgtacaaaaaataaagtgccaatttggattacttgtttggtccccatgcaggtgtatgtgcagttgcgtgtaaaaattctttgcataaaacaattataacttgcttcct

SEQ ID NO: 100651 - DNA, 1617 bp, Zea Mays
cggcaagaggtggctgctgctgctgccgctgtcgcggtacgtggaggtggacgagcagcaaggtgtgcagctcttctactacttcgtgcgctcggagcgcgacccctacgaggacccgctgctgctgtggctgtccggcggcccaggctgctccggcatctccggccttgcctacgagataggacccttaaaatttgatgcccgagggcaaggtgaatttcccactcttctctaccgaccggagacatggaccaaggtgagcaacatcatatttgtggactcgccggtggggactgggttctcgtacgccaagtccgaggaagggctcgagaccggcgacaccaagcaagtgaagcagctagtcattttcctcaggaagtggctccaagaccatccccggttcgtgatgaatcctctttatattgctggagattcatacagtggtctcatcattcctactcttgcattagaaattgacagaagcatagaactcggtgaaaagatattttccggtctcaaggggtacattgctggcaacccgttgactggcggacagtttgatacagacagccaaattccatactttcatgccatgggacttgtatccgatgaactttacaagtgcacacgggatatcaataagcaatacatcttggatcctgcttgcccggatgatgatctgttgagccccaagactgtagcagagacagatggaacgagcaggttgatgctagagtctgcagattttctacttggttccaaatgtgcagctaagttccaaagatcatatcctttaactaattcaatccccttgtccctacactgtcaagtccttgactgcttatctgacctacactttcctttggccgcaggaagctttatacattctatcctacgcttgggggaatgatgatacagttcaggagagcctcggtatccgcaaggggacaattggagcatggaaacgatacagccatgcattgccttacaattatgatatccagagtgtagtggattaccattcaaggctagccacaaaaggatacagggcgctgatatacagagcggcgaccacgatgctgttgtaccccatgttggcacacaagcatggattagatacctcaacttgacaatcgttgatgattggcgaccatggtacgttggaggccaagttgctggattcacaaggagttatgcgagcggcctaacatttgccaccgtgaagggtgctggacatgttgcgccgttgtataagaccttggaatgccaaaaaatgtttataacatggatttcagggaatcctctttgatgcaagtctgatagaatgacccatcggttatctgagtgggcgtcagccgtcaggaatcctctttgaagggtcagttgcttgggtttctttggtgtcaactggttcaaatccttgatcgatatggttgatcgtaatatttttggaacttatttcaagatttattaacggtattgttctcttaagacctgcctgttgattctgttcatataggtgaacgtgcatatgttgttgctatatgcatacatggggacatggggtgtaggggtgcttgtgcgttcgtacaaaaaataaagtgccaatttggatta

SEQ ID NO: 100652 - DNA, 1850 bp, Zea Mays
gaccggagtggcatttgaccagctgaagtcaacaggcatgccgaacggtggcggcaagaggtggctgctgctgctgccgctgtcgcggtgggttctcctcctcggcagcctccagctcccggcggtcggcggcagcggccatgtcgtcacgcgcatgcgcgggttcgacgggccacttccgttctacctcgaaaccgggtacgtggaggtggacgagcagcaaggtgtgcagctcttctactacttcgtgcgctcggagcgcgacccctacgaggacccgctgctgctgtggctgtccggcggcccaggctgctccggcatctccggccttgcctacgagataggacccttaaaatttgatgcccgagggcaaggtgaatttcccactcttctctaccgaccggagacatggaccaaggtgagcaacatcatatttgtggactcgccggtggggactgggttctcgtacgccaagtccgaggaagggctcgagaccggcgacaccaagcaagtgaagcagctagtcattttcctcaggaagaccatccccggttcgtgatgaatcctctttatattgctggagattcatacagtggtctcatcattcctactcttgcattagaaattgacagaagcatagaactcggtgaaaagatattttccggtctcaaggggtacattgctggcaacccgttgactggcggacagtttgatacagacagccaaattccatactttcatgccatgggacttgtatccgatgaactttacaagaatgctagggagaactgtggtggaaagtatagtgctccactgaatgctgtatgtgcagaggctgtccaagctatcaacaattgcacacgggatatcaataagcaatacatcttggatcctgcttgcccggatgatgatctgttgagccccaagactgtagcagagacagatggaacgagcaggttgatgctagagtctgcagattttctacttggttccaaatgtgcagctaagttccaaagatcatatcctttaactaattcaatccccttgtccctacactgtcaagtccttgactgcttatctgacctacactttcctttggccgcaggaagctttatacattctatcctacgcttgggggaatgatgatacagttcaggagagcctcggtatccgcaaggggacaattggagcatggaaacgatacagccatgcattgccttacaattatgatatccagagtgtagtggattaccattcaaggctagccacaaaaggatacagggcgctgatatacagagcggcgaccacgatgctgttgtaccccatgttggcacacaagcatggattagatacctcaacttgacaatcgttgatgattggcgaccatggtacgttggaggccaagttgctggattcacaaggagttatgcgagcggcctaacatttgccaccgtgaagggtgctggacatgttgcgccgttgtataagaccttggaatgccaaaaaatgtttataacatggatttcagggaatcctctttgatgcaagtctgatagaatgacccatcggttatctgagtgggcgtcagccgtcaggaatcctctttgaagggtcagttgcttgggtttctttggtgtcaactggttcaaatccttgatcgatatggttgatcgtaatatttttggaacttatttcaagatttattaacggtattgttctcttaagacctgcctgttgattctgttcatataggtgaacgtgcatatgttgttgctatatgcatacatggggacatggggtgtaggggtgcttgtgcgttcgtacaaaaaataaagtgccaatttggatta

SEQ ID NO: 100653 - DNA, 1674 bp, Zea Mays
gaccggagtggcatttgaccagctgaagtcaacaggcatgccgaacggtggcggcaagaggtggctgctgctgctgccgctgtcgcggtgggttctcctcctcggcagcctccagctcccggcggtcggcggcagcggccatgtcgtcacgcgcatgcgcgggttcgacgggccacttccgttctacctcgaaaccgggtacgtggaggtggacgagcagcaaggtgtgcagctcttctactacttcgtgcgctcggagcgcgacccctacgaggacccgctgctgctgtggctgtccggcggcccaggctgctccggcatctccggccttgcctacgagataggacccttaaaatttgatgcccgagggcaaggtgaatttcccactcttctctaccgaccggagacatggaccaaggtgagcaacatcatatttgtggactcgccggtggggactgggttctcgtacgccaagtccgaggaagggctcgagaccggcgacaccaagcaagtgaagcagctagtcattttcctcaggaagtggctccaagaccatccccggttcgtgatgaatcctctttatattgctggagattcatacagtggtctcatcattcctactcttgcattagaaattgacagaagcatagaactcggtgaaaagatattttccggtctcaaggggtacattgctggcaacccgttgactggcggacagtttgatacagacagccaaattccatactttcatgccatgggacttgtatccgatgaactttacaagtgcacacgggatatcaataagcaatacatcttggatcctgcttgcccggatgatgatctgttgagccccaagactgtagcagagacagatggaacgagcaggttgatgctagagtctgcagattttctacttggttccaaatgtgcagaagctttatacattctatcctacgcttgggggaatgatgatacagttcaggagagcctcggtatccgcaaggggacaattggagcatggaaacgatacagccatgcattgccttacaattatgatatccagagtgtagtggattaccattcaaggctagccacaaaaggatacagggcgctgatatacagcggcgaccacgatgctgttgtaccccatgttggcacacaagcatggattagatacctcaacttgacaatcgttgatgattggcgaccatggtacgttggaggccaagttgctggattcacaaggagttatgcgagcggcctaacatttgccaccgtgaagggtgctggacatgttgcgccgttgtataagaccttggaatgccaaaaaatgtttataacatggatttcagggaatcctctttgatgcaagtctgatagaatgacccatcggttatctgagtgggcgtcagccgtcaggaatcctctttgaagggtcagttgcttgggtttctttggtgtcaactggttcaaatccttgatcgatatggttgatcgtaatatttttggaacttatttcaagatttattaacggtattgttctcttaagacctgcctgttgattctgttcatataggtgaacgtgcatatgttgttgctatatgcatacatggggacatggggtgtaggggtgcttgtgcgttcgtacaaaaaataaagtgccaatttggatta

SEQ ID NO: 100654 - DNA, 1757 bp, Zea Mays
gaccggagtggcatttgaccagctgaagtcaacaggcatgccgaacggtggcggcaagaggtggctgctgctgctgccgctgtcgcggtgggttctcctcctcggcagcctccagctcccggcggtcggcggcagcggccatgtcgtcacgcgcatgcgcgggttcgacgggccacttccgttctacctcgaaaccgggtacgtggaggtggacgagcagcaaggtgtgcagctcttctactacttcgtgcgctcggagcgcgacccctacgaggacccgctgctgctgtggctgtccggcggcccaggctgctccggcatctccggccttgcctacgagataggacccttaaaatttgatgcccgagggcaaggtgaatttcccactcttctctaccgaccggagacatggaccaaggtgagcaacatcatatttgtggactcgccggtggggactgggttctcgtacgccaagtccgaggaagggctcgagaccggcgacaccaagcaagtgaagcagctagtcattttcctcaggaagtggctccaagaccatccccggttcgtgatgaatcctctttatattgctggagattcatacagtggtctcatcattcctactcttgcattagaaattgacagaagcatagaactcggtgaaaagatattttccggtctcaaggggtacattgctggcaacccgttgactggcggacagtttgatacagacagccaaattccatactttcatgccatgggacttgtatccgatgaactttacaagaatgctagggagaactgtggtggaaagtatagtgctccactgaatgctgtatgtgcagaggctgtccaagctatcaacaattgcacacgggatatcaataagcaatacatcttggatcctgcttgcccggatgatgatctgttgagccccaagactgtagcagagacagatggaacgagcaggttgatgctagagtctgcagattttctacttggttccaaatgtgcagaagctttatacattctatcctacgcttgggggaatgatgatacagttcaggagagcctcggtatccgcaaggggacaattggagcatggaaacgatacagccatgcattgccttacaattatgatatccagagtgtagtggattaccattcaaggctagccacaaaaggatacagggcgctgatatacagagcggcgaccacgatgctgttgtaccccatgttggcacacaagcatggattagatacctcaacttgacaatcgttgatgattggcgaccatggtacgttggaggccaagttgctggattcacaaggagttatgcgagcggcctaacatttgccaccgtgaagggtgctggacatgttgcgccgttgtataagaccttggaatgccaaaaaatgtttataacatggatttcagggaatcctctttgatgcaagtctgatagaatgacccatcggttatctgagtgggcgtcagccgtcaggaatcctctttgaagggtcagttgcttgggtttctttggtgtcaactggttcaaatccttgatcgatatggttgatcgtaatatttttggaacttatttcaagatttattaacggtattgttctcttaagacctgcctgttgattctgttcatataggtgaacgtgcatatgttgttgctatatgcatacatggggacatggggtgtaggggtgcttgtgcgttcgtacaaaaaataaagtgccaatttggatta

SEQ ID NO: 100655 - DNA, 1860 bp, Zea Mays
gaccggagtggcatttgaccagctgaagtcaacaggcatgccgaacggtggcggcaagaggtggctgctgctgctgccgctgtcgcggtgggttctcctcctcggcagcctccagctcccggcggtcggcggcagcggccatgtcgtcacgcgcatgcgcgggttcgacgggccacttccgttctacctcgaaaccgggtacgtggaggtggacgagcagcaaggtgtgcagctcttctactacttcgtgcgctcggagcgcgacccctacgaggacccgctgctgctgtggctgtccggcggcccaggctgctccggcatctccggccttgcctacgagataggacccttaaaatttgatgcccgagggcaaggtgaatttcccactcttctctaccgaccggagacatggaccaaggtgagcaacatcatatttgtggactcgccggtggggactgggttctcgtacgccaagtccgaggaagggctcgagaccggcgacaccaagcaagtgaagcagctagtcattttcctcaggaagtggctccaagaccatccccggttcgtgatgaatcctctttatattgctggagattcatacagtggtctcatcattcctactcttgcattagaaattgacagaagcatagaactcggtgaaaagatattttccggtctcaaggggtacattgctggcaacccgttgactggcggacagtttgatacagacagccaaattccatactttcatgccatgggacttgtatccgatgaactttacaagaatgctagggagaactgtggtggaaagtatagtgctccactgaatgctgtatgtgcagaggctgtccaagctatcaacaattgcacacgggatatcaataagcaatacatcttggatcctgcttgcccggatgatgatctgttgagccccaagactgtagcagagacagatggaacgagcaggttgatgctagagtctgcagattttctacttggttccaaatgtgcagctaagttccaaagatcatatcctttaactaattcaatccccttgtccctacactgtcaagtccttgactgcttatctgacctacactttcctttggccgcaggaagctttatacattctatcctacgcttgggggaatgatgatacagttcaggagagcctcggtatccgcaaggggacaattggagcatggaaacgatacagccatgcattgccttacaattatgatatccagagtgtagtggattaccattcaaggctagccacaaaaggatacagggcgctgatatacagagcggcgaccacgatgctgttgtaccccatgttggcacacaagcatggattagatacctcaacttgacaatcgttgatgattggcgaccatggtacgttggaggccaagttgctggattcacaaggagttatgcgagcggcctaacatttgccaccgtgaagggtgctggacatgttgcgccgttgtataagaccttggaatgccaaaaaatgtttataacatggatttcagggaatcctctttgatgcaagtctgatagaatgacccatcggttatctgagtgggcgtcagccgtcaggaatcctctttgaagggtcagttgcttgggtttctttggtgtcaactggttcaaatccttgatcgatatggttgatcgtaatatttttggaacttatttcaagatttattaacggtattgttctcttaagacctgcctgttgattctgttcatataggtgaacgtgcatatgttgttgctatatgcatacatggggacatggggtgtaggggtgcttgtgcgttcgtacaaaaaataaagtgccaatttggatta

SEQ ID NO: 100656 - DNA, 1955 bp, Zea Mays
ggaccggagtggcatttgaccagctgaagtcaacaggcatgccgaacggtggcggcaagaggtggctgctgctgctgccgctgtcgcggtgggttctcctcctcggcagcctccagctcccggcggtcggcggcagcggccatgtcgtcacgcgcatgcgcgggttcgacgggccacttccgttctacctcgaaaccgggtagtaaactgcttccgtgcttgactgcaaaccgcccaagttttaattttcttctcaccggcaccgccggtgcggcggcttcgtattgcgatgcaggtacgtggaggtggacgagcagcaaggtgtgcagctcttctactacttcgtgcgctcggagcgcgacccctacgaggacccgctgctgctgtggctgtccggcggcccaggctgctccggcatctccggccttgcctacgagataggacccttaaaatttgatgcccgagggcaaggtgaatttcccactcttctctaccgaccggagacatggaccaaggtgagcaacatcatatttgtggactcgccggtggggactgggttctcgtacgccaagtccgaggaagggctcgagaccggcgacaccaagcaagtgaagcagctagtcattttcctcaggaagtggctccaagaccatccccggttcgtgatgaatcctctttatattgctggagattcatacagtggtctcatcattcctactcttgcattagaaattgacagaagcatagaactcggtgaaaagatattttccggtctcaaggggtacattgctggcaacccgttgactggcggacagtttgatacagacagccaaattccatactttcatgccatgggacttgtatccgatgaactttacaagaatgctagggagaactgtggtggaaagtatagtgctccactgaatgctgtatgtgcagaggctgtccaagctatcaacaattgcacacgggatatcaataagcaatacatcttggatcctgcttgcccggatgatgatctgttgagccccaagactgtagcagagacagatggaacgagcaggttgatgctagagtctgcagattttctacttggttccaaatgtgcagctaagttccaaagatcatatcctttaactaattcaatccccttgtccctacactgtcaagtccttgactgcttatctgacctacactttcctttggccgcaggaagctttatacattctatcctacgcttgggggaatgatgatacagttcaggagagcctcggtatccgcaaggggacaattggagcatggaaacgatacagccatgcattgccttacaattatgatatccagagtgtagtggattaccattcaaggctagccacaaaaggatacagggcgctgatatacagcggcgaccacgatgctgttgtaccccatgttggcacacaagcatggattagatacctcaacttgacaatcgttgatgattggcgaccatggtacgttggaggccaagttgctggattcacaaggagttatgcgagcggcctaacatttgccaccgtgaagggtgctggacatgttgcgccgttgtataagaccttggaatgccaaaaaatgtttataacatggatttcagggaatcctctttgatgcaagtctgatagaatgacccatcggttatctgagtgggcgtcagccgtcaggaatcctctttgaagggtcagttgcttgggtttctttggtgtcaactggttcaaatccttgatcgatatggttgatcgtaatatttttggaacttatttcaagatttattaacggtattgttctcttaagacctgcctgttgattctgttcatataggtgaacgtgcatatgttgttgctatatgcatacatggggacatggggtgtaggggtgcttgtgcgttcgtacaaaaaataaagtgccaatttggatta

SEQ ID NO: 100657 - DNA, 1957 bp, Zea Mays
ggaccggagtggcatttgaccagctgaagtcaacaggcatgccgaacggtggcggcaagaggtggctgctgctgctgccgctgtcgcggtgggttctcctcctcggcagcctccagctcccggcggtcggcggcagcggccatgtcgtcacgcgcatgcgcgggttcgacgggccacttccgttctacctcgaaaccgggtagtaaactgcttccgtgcttgactgcaaaccgcccaagttttaattttcttctcaccggcaccgccggtgcggcggcttcgtattgcgatgcaggtacgtggaggtggacgagcagcaaggtgtgcagctcttctactacttcgtgcgctcggagcgcgacccctacgaggacccgctgctgctgtggctgtccggcggcccaggctgctccggcatctccggccttgcctacgagataggacccttaaaatttgatgcccgagggcaaggtgaatttcccactcttctctaccgaccggagacatggaccaaggtgagcaacatcatatttgtggactcgccggtggggactgggttctcgtacgccaagtccgaggaagggctcgagaccggcgacaccaagcaagtgaagcagctagtcattttcctcaggaagtggctccaagaccatccccggttcgtgatgaatcctctttatattgctggagattcatacagtggtctcatcattcctactcttgcattagaaattgacagaagcatagaactcggtgaaaagatattttccggtctcaaggggtacattgctggcaacccgttgactggcggacagtttgatacagacagccaaattccatactttcatgccatgggacttgtatccgatgaactttacaagaatgctagggagaactgtggtggaaagtatagtgctccactgaatgctgtatgtgcagaggctgtccaagctatcaacaattgcacacgggatatcaataagcaatacatcttggatcctgcttgcccggatgatgatctgttgagccccaagactgtagcagagacagatggaacgagcaggttgatgctagagtctgcagattttctacttggttccaaatgtgcagctaagttccaaagatcatatcctttaactaattcaatccccttgtccctacactgtcaagtccttgactgcttatctgacctacactttcctttggccgcaggaagctttatacattctatcctacgcttgggggaatgatgatacagttcaggagagcctcggtatccgcaaggggacaattggagcatggaaacgatacagccatgcattgccttacaattatgatatccagagtgtagtggattaccattcaaggctagccacaaaaggatacagggcgctgatatacagagcggcgaccacgatgctgttgtaccccatgttggcacacaagcatggattagatacctcaacttgacaatcgttgatgattggcgaccatggtacgttggaggccaagttgctggattcacaaggagttatgcgagcggcctaacatttgccaccgtgaagggtgctggacatgttgcgccgttgtataagaccttggaatgccaaaaaatgtttataacatggatttcagggaatcctctttgatgcaagtctgatagaatgacccatcggttatctgagtgggcgtcagccgtcaggaatcctctttgaagggtcagttgcttgggtttctttggtgtcaactggttcaaatccttgatcgatatggttgatcgtaatatttttggaacttatttcaagatttattaacggtattgttctcttaagacctgcctgttgattctgttcatataggtgaacgtgcatatgttgttgctatatgcatacatggggacatggggtgtaggggtgcttgtgcgttcgtacaaaaaataaagtgccaatttggatta

SEQ ID NO: 100658 - DNA, 1854 bp, Zea Mays
ggaccggagtggcatttgaccagctgaagtcaacaggcatgccgaacggtggcggcaagaggtggctgctgctgctgccgctgtcgcggtgggttctcctcctcggcagcctccagctcccggcggtcggcggcagcggccatgtcgtcacgcgcatgcgcgggttcgacgggccacttccgttctacctcgaaaccgggtagtaaactgcttccgtgcttgactgcaaaccgcccaagttttaattttcttctcaccggcaccgccggtgcggcggcttcgtattgcgatgcaggtacgtggaggtggacgagcagcaaggtgtgcagctcttctactacttcgtgcgctcggagcgcgacccctacgaggacccgctgctgctgtggctgtccggcggcccaggctgctccggcatctccggccttgcctacgagataggacccttaaaatttgatgcccgagggcaaggtgaatttcccactcttctctaccgaccggagacatggaccaaggtgagcaacatcatatttgtggactcgccggtggggactgggttctcgtacgccaagtccgaggaagggctcgagaccggcgacaccaagcaagtgaagcagctagtcattttcctcaggaagtggctccaagaccatccccggttcgtgatgaatcctctttatattgctggagattcatacagtggtctcatcattcctactcttgcattagaaattgacagaagcatagaactcggtgaaaagatattttccggtctcaaggggtacattgctggcaacccgttgactggcggacagtttgatacagacagccaaattccatactttcatgccatgggacttgtatccgatgaactttacaagaatgctagggagaactgtggtggaaagtatagtgctccactgaatgctgtatgtgcagaggctgtccaagctatcaacaattgcacacgggatatcaataagcaatacatcttggatcctgcttgcccggatgatgatctgttgagccccaagactgtagcagagacagatggaacgagcaggttgatgctagagtctgcagattttctacttggttccaaatgtgcagaagctttatacattctatcctacgcttgggggaatgatgatacagttcaggagagcctcggtatccgcaaggggacaattggagcatggaaacgatacagccatgcattgccttacaattatgatatccagagtgtagtggattaccattcaaggctagccacaaaaggatacagggcgctgatatacagagcggcgaccacgatgctgttgtaccccatgttggcacacaagcatggattagatacctcaacttgacaatcgttgatgattggcgaccatggtacgttggaggccaagttgctggattcacaaggagttatgcgagcggcctaacatttgccaccgtgaagggtgctggacatgttgcgccgttgtataagaccttggaatgccaaaaaatgtttataacatggatttcagggaatcctctttgatgcaagtctgatagaatgacccatcggttatctgagtgggcgtcagccgtcaggaatcctctttgaagggtcagttgcttgggtttctttggtgtcaactggttcaaatccttgatcgatatggttgatcgtaatatttttggaacttatttcaagatttattaacggtattgttctcttaagacctgcctgttgattctgttcatataggtgaacgtgcatatgttgttgctatatgcatacatggggacatggggtgtaggggtgcttgtgcgttcgtacaaaaaataaagtgccaatttggatta

SEQ ID NO: 100659 - DNA, 1548 bp, Zea Mays
cccaagaaccaatttaattttatcaaacaattataattcgtcaatagtaatactaaccatattattgtctagacattttaaaatactaaatttaacctacgtgtcaccgaaatactatattatacaaaatagaactagttcgaatatattcagcaactaaactcctcgaagcacacctcgccttactggtatttctaacttaatcgtatgcgcatacgtagcgtcttattttacgatcataaaaccgatagtaaaaatagcgaatcagctcaccacatcacaactcgatttggtagttgcctgaacgatgacatccttcggctgaagtccttgatcgaacatctggcgagcgtgaccgacgagataaggctaaggcgaagcttgacgacgagatcgtgtttgaagcgagctggtgaggtggagtttgagcagaggatgacgagttcgacgactcgacggtaaacgcgagcacgcacgaaacccgacgacaaggacctaggatgtgcgacacacgtcacgcaatcagcctgttgtgcgaccgagcgatgacgacgaacaaagagcttcgcgacggcgccaagattggaggcagaaaagacggccaggacggagcacagatcgacgccacagaaacgaaaaccgggcgcagggacgcgcaccatttctctgggcgcgacggtggcctgggccaaaaccgtccatggccaggaggcatgcacagccaccatggccggccaagcgagcagaaaaccgcggcgccggaggagcaaggcgagcagggagatccgggctggggaaaaatggaggctgggccgactctgcaggggcaaacacgccgaacagagggccaagccgagctggggcagacaaccatgggaggtcaggggcgagcgccaggtgagtgcagggagcttcgacgcctggacgcacagggaaaagaaccagggagcttggaccaggaagtggcgctggtcataaatggaggggatccagtgagggggcgcctgggcagagggagttaacgcacgcgcaggcgagccaggaagcaggcgcgccagagctgggaccaggggctacggcgacgagcgagcagagcatatgggtgcgcgccatagaaacaagcaggggaagcagagaagggagcgggcgccgcagggaaggagctggggactggcacacggctggaagaggctccagccatggggaaaacaaggggccggggaggaagctgtagggggaattgtagaagatccaccaccgggagcaaaggagatgggcgtccgagccggagcatttgaagcagacgcccaaggtggaagataaggctgaagctctgctggacgcaggggagatggacaccgcggctggagaagataagacgcgcgcgagcaggaaaaaaatcacggcagaaaaatctacagcgagcgacgaggatagagattggctgtgggatattttccctggtgaaaagtccaagcacgttgaggatcagaccaagggaaggcgttggaaaaatgcagctggtggagaccgtggcgaggagaagcc

SEQ ID NO: 100660 - DNA, 1101 bp, Zea Mays
atgttcctatacggagcaacaccgacaggcgggggccattttccagtccagttcctattcctccacaatattcagttccgctggatcaacggacgtgaactcaccctcctgcgagaacaagccgctggcctcgacaaccttcctctgcgggatgtggctgatcttgagccggtcgtcatcggtcagctcccagtcgaatatctcgaggttctgcttcagcctctccctgttgtagctcttgacgatgcacgtcactccctgctcatgtatccatcgcagcgccacctgtgccacggtcttccccctcgccctggctatctccgcgagcacctccgagtcgagcacggcgttgccccgcccgtcccagttctgccctcccagcggcgagtaggcggcgacgtggacgccccggtcggcgcagtacgcccgcagcgtccgctgctgccacgccgggttcagctccacctggttcaccgcgggcgggaccgcggcgatggccaggaccttgtccaggtgcctggtggtgaagttgctgacgccgatcgccctggcgaggcccagccgctggcactcctccatggcgcgccacacgcccgccacgtccagcggcaccgcgtcctccttcctgttcgggaacttgggcggcccgccggccggcctgaggcacaccggccagtggatcaggtacaggtccacgtactccatctgcaggttctcgagagtttcccgcagggacggcagcacgaggtccgcgtgggtctgcgaacaccacagcttggacgtgacgaagagctcctcccgggacctcaggaggccgcgccgcagcgcctcggccacggcgtcgccgagcggcttctcggtgccgtacaggaaggccgtgtcgaagtggcggaaccccacctcgatggccgccagcacggcgtccctgacggcctcgtgcaccacggggaacgacgccgtgcccatgcccaccatcggcatcggctttccgttgcccgaccgcagggtcacctccggcaccgccgccgccgtcgtccccgtggatgccatgctgatgcggtcaagtatggcgcgctgcagttggaggtgcgtctagtctag

SEQ ID NO: 100661 - DNA, 593 bp, Zea Mays
tagcagggatggccggatttggggcgaaaaagctctgggcgagcaggggttgggcgaattgggtctggcctggagctggactgcgtgggggagagctttctgcgcctggggaaaggaaggggtggcgttgggtagaggaggccggctgggagacatggcgccatggatctgatgggggaaggggcgcctgcaccaggggagtcggatccggcgcagcacgagggggaagaaagctaatcgagctccacggtggctacacgaacctggctgtgggcaagcgcgttggagctatggcctgcggcctggcatccagtgctggtgcgccagggaggccgccatgggagaaactcggcggcatgcgagcttggagctcctgcgctggcagaggaaggggaagacgccaggagggagagcgatggtgtgggagcgtcagcagggaaatggcgtggaaggaagacgacggggaacctcgagggctatagagggcgcggcctgccaggcgattggctcactgggcggcgcggcgcattggcctagaggcgcggtcgctcggcactggttgaaggagctgctgcaggccattggctgggatt

SEQ ID NO: 100662 - DNA, 1238 bp, Zea Mays
atcagcgacaagtaacgaccgcccggaaagagagccggaaaaaaaggactggaaatcgccaccgcccgcccctatttgagcagccgcttgttccttccgcgtcctcgctgctcctcaattcgattggctccgtgccgacctccatgttgagaaggaaagcatcgcgagttcgccatacggatgggttccaaagcgcctttctgtctcacgctcctcttgctgctcgccgcggcctgtggacctgctgcacatgcccacgatgctgtcgagctcccgcatcatggctcagccttgaaggaacagatttcttcaaccaagattcctgcccgtctcaagagtggcagcggactatgctcggcctgtgaaaacttcacgagcgaagccgtcacttatctcggcaaggaacagacacaggacaggatcatggagttccttcatgatgcttgctcccaatcattctcctttgaacagaagtgtgtcgagctgatggactcttatgcgactctcctgtttgccaagatcacggagatcagaccggaagcgttctgcaaacggtatggcctgtgcagggacacggctcttctctccggtgtgggaagtgacagcacgtgtgtgttctgccaccatctgctcgatgaaatcatgtccaaactgaaagatccagatgcggagtttgagataattcagattcttgtcaaggagtgcaataagatcgaaggtcacgtccagcagacaatgtgaggacgaaccagaagggcgagttctgggtggcgatccactgtcggagaagtatgtatcctcggctaatgagctgccatgtcaagctgaggaagtttttgctcagcttcccaatccctgccaagtaccactacctgatgcatatcgatagcaagctctacgcgttgatcatcagggacagcccgatggccagatgcttcacatcatggaggacgacaagggagaggtggtgagagttatcatcgaagtggagggtccgtctgatgccattcatcgctgtctttgacctcgtgaaggcgtcttagccacttcaatttgattggaaatattgttgttttaagatacgggtccatggttaatgttgtatgcttctctgagaagacctgtcattccaataatttggttctggagcaacctggagctgtatactgatctagcttcttttagtaacaaatgtaagttgctcacattttctttagattgtctatagaactttgaac

SEQ ID NO: 100663 - DNA, 1831 bp, Zea Mays
atcagcgacaagtaacgaccgcccggaaagagagccggaaaaaaaggactggaaatcgccaccgcccgcccctatttgagcagccgcttgttccttccgcgtcctcgctgctcctcaattcgattggctccgtgccgacctccatgtcagacgacctttcctcctctttagatcgctgtatttattttttgttccctaccccagcacctagcccggaatctgcaacctcgccagcggttgctgggggttcttccccttgttcgatcggttgagaaggaaagcatcgcgagttcgccatacggatgggttccaaagcgcctttctgtctcacgctcctcttgctgctcgccgcggcctgtggacctgctgcacatgcccacgatgctgtcgagctcccgcatcatggctcagccttgaaggaacagatttcttcaaccaagattcctgcccgtctcaagagtggcagcggactatgctcggcctgtgaaaacttcacgagcgaagccgtcacttatctcggcaaggaacagacacaggacaggatcatggagttccttcatgatgcttgctcccaatcattctcctttgaacagaagtgtgtcgagctgatggactcttatgcgactctcctgtttgccaagatcacggagatcagaccggaagcgttctgcaaacggtatggcctgtgcagggacacggctcttctctccggtgtgggaagtgacagcacgtgtgtgttctgccaccatctgctcgatgaaatcatgtccaaactgaaagatccagatgcggagtttgagataattcagattcttgtcaaggagtgcaataagatcgaaggtcacgtccagcaggtaggctttttggctcttcctctgtccttgtgattctgtgcaaaaggcgagctcgtcctcttccttaatgaggttcttaagagtgtttcctcagctgtattggttacccttactactttggattttggaaacagtccgagacccttattagttaacaatatcatagttgttgcaaagatactctactttttttcatcatctcttctttaccattcatatctcccagttgttgcaagggaaaattaactccagtaattctttcttgaggggtagaacaggagtgtcgttctcagattcaatgattatcaaacaacatgtactaattatattttagcaagctggcagttgatgtgattctctatgtttacattttgtcaaattaacgacaagagggttaagttttagaagcaactaccctgcactggttaataatatctgtgaggacccaagttggtcccagtcctcttcgattggtgctctgtgcctgtgatttgaggaaagtttcagtacaacacattgtattttgattagtgaatgaagcatttagacgatattgttgcagacaatgtgaggacgaaccagaagggcgagttctgggtggcgatccactgtcggagaagtatgtatcctcggctaatgagctgccatgtcaagctgaggaagtttttgctcagcttcccaatccctgccaagtaccactacctgatgcatatcgatagcaagctctacgcgttgatcatcagggacagcccgatggccagatgcttcacatcatggaggacgacaagggagaggtggtgagagttatcatcgaagtggagggtccgtctgatgccattcatcgctgtctttgacctcgtgaaggcgtcttagccacttcaatttgattggaaatattgttgttttaagatacgggtccatggttaatgttgtatgcttctctgagaagacctgtcattccaataatttggttctgg

SEQ ID NO: 100664 - DNA, 1945 bp, Zea Mays
taataaactatatcgttccttaaaccaaacacgctgtaaatacattgaaagcaataagtactctatactctctacttatcctatgtctctgcgtttgtgtctgaggctagaacggattatggatacaatacaaataagtaccgcaggtagaaatccgcgaggtgtgagcaaaccatgacgtaagttaggcttctagccacttgtcgcgttgggacaaaatgaaaagggaataaataaaaagagagaataactggctagttgtcgtctgcctctcgatttctgcgtgattcgcctgcctgccttccttcctgttggttgcttctttctactcgcgctcgcaccaaccagaggagcaaccgagcagtagcgactcctctgcgtgaggcctgccgtcatcccccgtgggccgtggccgtggccgtggccgtgcgcaaaaaaacaaaccatcctcgattcgaccggaggggaaggagacgcgccgggagaagggggaagagacgcggcgaccatgtctccgatctgggtgttcgggtacggctcgctgatctggaacccaggcttcgcctacgacgaccgcgtcgtcggctttgtcagggactaccgccgcgtcttctaccaagggagcacggaccacaggggcacgccgcagttccccgggaggaccgtcacgctcgagcaccagcccggagcgacttgctggggagttgcttacagaataaaggaggaagataaggagatagctttggagtatcttgaggtcagggagaagcaatatgatgagaaggtttaccttgacttgtatactgattcatcgcccaaagtaccagctgtcgaaaatgtgatggtatacttcgccaccagtaacaaggagaacaatcaaaactatcttggtcctgcacctctggaagaaatgaccaggcaaatttaccttgctcaaggcccatctggacctaacaaagagtatgtgttcaaactcgaggacgcgttacacaaattaggagttgtagaccaacatgtccaagaactggcaaatgctctgcgtgagtattctgacaccgagttatctaagtgaaagatcacatttaccccttgtttggagggtaaggatttataaataaagttagaattcattcatgcatgtcccaacatggatatattcttgtaagctgcgttttgagtgactacattacgattatattcctgtgcacatgtggtttgcaaaaatctgttggtttcccctgttcactttttctgatctaggagagcgatcatttgctttgctttctacttctagcaatgagcaacaaaaaggcgaccaggaaaaaagatgaatggaccaaagaaacgatgggcaatctattatatgctaccaaaaaaaaagtttacatcattgtagactttccaggtttatctcactatcggtgttaataaacggatttcatattcgaccaatcttatcagcagttatagagtttctcctcgagcgctgctccctcctttcgctactctgattactgaatggatacgcttttctgcaaatacacttcaggaatttctgacaaatgctaatatagagcaccgatgtctagtccccaatctcaatgtacaaattctctaaaatcctgtcacggagtacaagatcacgagaccaagtttccagtccatgcggaacctatctgttgcaaggagtcgcagatggccttggtgaaggtgatcttgccccggcgcaggtggtagaggacatgcatattctcctgctggaagttcccaagaatggacaccccgctcgtcttgccgatcattgggcttgggcacatcatcctgcggtgttgccagcggttttgccttgtttgggccatataaaactgaggatgctggtgacaatcctgggctgcagcacgtgttttctacgcggcagggtcggcttggcccagttagctaggct

SEQ ID NO: 100665 - DNA, 1939 bp, Zea Mays
taataaactatatcgttccttaaaccaaacacgctgtaaatacattgaaagcaataagtactctatactctctacttatcctatgtctctgcgtttgtgtctgaggctagaacggattatggatacaatacaaataagtaccgcaggtagaaatccgcgaggtgtgagcaaaccatgacgtaagttaggcttctagccacttgtcgcgttgggacaaaatgaaaagggaataaataaaaagagagaataactggctagttgtcgtctgcctctcgatttctgcgtgattcgcctgcctgccttccttcctgttggttgcttctttctactcgcgctcgcaccaaccagaggagcaaccgagcagtagcgactcctctgcgtgaggcctgccgtcatcccccgtgggccgtggccgtggccgtggccgtgcgcaaaaaaacaaaccatcctcgattcgaccggaggggaaggagacgcgccgggagaagggggaagagacgcggcgaccatgtctccgatctgggtgttcgggtacggctcgctgatctggaacccaggcttcgcctacgacgaccgcgtcgtcggctttgtcagggactaccgccgcgtcttctaccaagggagcacggaccacaggggcacgccgcagttccccgggaggaccgtcacgctcgagcaccagcccggagcgacttgcgtaggccctttctcatgtccaccctcctactctgtcaatgtaactgctaaggacagactgattactaggacacgcaaaccaaatgaattagtaaattcatggttgatgacatgtcactcccactacgtcatgttatcatgtagtacatcttttttacttatcgttttggatagcctggtaatcctcttcgcagtccatgcgattgattttgcgagctaatctgtctattttacatctttcagtggggagttgcttacagaataaaggaggaagataaggagatagctttggaggtatgtttattgcaagccaggcagatgcagatatgttttgttcactagtactgatcgcgcacaaatatcccatgatgatactcagattgtttgatgattgggatattgctgatgttacttgtcattatggagatttagagattggtcgatgtaccaaaactcatatgttctttcctacaaactgattatatctagatactatgacgatttaagtcatgaatgggcttatgaaatttcggtatatatatcaacttatatgtgtttatcgcgatggtatacgtagcagcaaatctctgcacattctgatactccgttgcttacagctttatattgcttctactggcatttatcttcagatttaaatttgcagtatcttgaggtcagggagaagcaatatgatgagaaggtttaccttgacttgtatactgtaagatacgagggctggatctatttccctttggataatgttcgatatgtaactattacggagtattaagttgtaataactttcaggattcatcgcccaaagtaccagctgtcgaaaatgtgatggtatacttcgccaccagtaacaaggagaacaatcaaaactatcttggtcctgcacctctggaagaaatgaccaggcaaatttaccttgctcaaggcccatctggacctaacaaagagtatgtgttcaaactcgaggacgcgttacacaaattaggagttgtagaccaacatgtccaagaactggcaaatgctctgcgtgagtattctgacaccgagttatctaagtgaaagatcacatttaccccttgtttggagggtaaggatttataaataaagttagaattcattcatgcatgtcccaacatggatatattcttgtaagctgcgttttgagtgactacattacgattatattcctgtgcacatgtggtttgcaaaaatctgttggtttcccctg

SEQ ID NO: 100666 - DNA, 850 bp, Zea Mays
ctccccggtaaatactgctgacgcggttgtgcacgccatcgccttgtcgcgcgacgtgcccgcgtggcctcgctatgcgaccgcctcgtggcgtggccacaccgcgacgcagcccgcgtcgcccgctcgccgatctagcagcgctgccgtgcctctgcgccccccgtcgccgaccgcgttgtgccctgcgtgtgcgtcgtgccgcggccacaccgccgcctgtgtcccggcctgagctcggtgggctcgacgcctgtggcgaggaggaaaccaggattgaggacatagagcggtcagccgaagaagtcggtgcgctgtcgaccattgtggtggtggatcctattcgcttccaagaagacacgaaatatcatcatcatcaatgcctcacaatcatctatgcatgccatagcgtacgccgggggcgataaataatatggtgcaaaatccatcattaatgtttgggagcccaagattcagcaggctaacaaatttggcttgtcctagctctggatctttgggggttcatttaaggaggatgtcaatagtatagaggctggttgatagaaatagaataatgtgtaccaggccatagggtgctagatgttgtgctctgattttattcagataaacaccaagatgactatcgtgactagcattctcaacatctcgaactacgcaggctcccaatgtgatatcaacatcttgatctagaaggttagcatttagcaattaaagcgctccttccacctcaacacattatattagtttgtatatacaatgtacatatacaatctacaatatatatgaatattatatctgaaaaatatagttgctacttatattacaaata

SEQ ID NO: 100667 - DNA, 887 bp, Zea Mays
attccaaaactttctcacagaaaccgccgcccctttccgtcctttagcatcggccgccactgcgccctcgcgtccacgctgggggtccgttggatcaggtcccggcgtcccgcctccctggcctccggcatcagccgccaccgcgcgttccgtcgtccgcctcggtctagattaacacagattggacttttaggaaaacacagcccacggcttgccgcgatttagtttcccaaatcccagggccgatgtcagcccacgacgaggacggcggccgccgccgcaggacccttgccaaggtttcactctcgttggtctcggccaccatggcggaggcctccacctactccttagacgcagtcaagacgcgccgcctccagttccaccgcagccccggcggcgcgggcgggcgcggcgtaatccgggtcgcggccgagctcgtccgcgatggcggggtttaacggggcttatccccctccgtcctccgccacctgatgtacaccccgctttgcatcgtggggttccagcatcttcggcccaccctcgctagcgacaggcgggaggttggcctggttgggaaggcgctcgccggtggactttcaggcgttgctgcgcagggtgctgaacacgctcccatacgaatccgcgagaagtgggaaggcgcaggcgcagccgcaacaggcaacagcaagttcttcaggcagcatgaatgaagacaacagtcactatcctatcatctgctagaggtgctacagtgcgacactctaaacacacaaaggacagaagatgcgtcaaagcagatgttttttttgcatccatgcagaggtgaaacatgattttgaatcctctcaactaacgtattgagataaagaaattttagttctacgaca

SEQ ID NO: 100668 - DNA, 1322 bp, Zea Mays
attccaaaactttctcacagaaaccgccgcccctttccgtcctttagcatcggccgccactgcgccctcgcgtccacgctgggggtccgttggatcaggtcccggcgtcccgcctccctggcctccggcatcagccgccaccgcgcgttccgtcgtccgcctcggtctagattaacacagattggacttttaggaaaacacagcccacggcttgccgcgatttagtttcccaaatcccagggccgatgtcagcccacgacgaggacggcggccgccgccgcaggacccttgccaaggtttcactctcgttggtctcggccaccatggcggaggcctccacctactccttagacgcagtcaagacgcgccgcctccagttccaccgcagccccggcggcgcgggcgggcgcggcgtaatccgggtcgcggccgagctcgtccgcgatggcggggtttaacggggcttatccccctccgtcctccgccacctgatgtacaccccgctttgcatcgtggggttccagcatcttcggcccaccctcgctagcgacaggcgggaggttggcctggttgggaaggcgctcgccggtggactttcaggcgttgctgcgcagaagccgttcagatgctaatgactcagcttcttccctatccgtaaacggcttgtaccagtcttcagttttctgaactttaagcagataccaataccagaaagacatgctactatggcgtgcaagaataaggctttcatctgactgatctcgggagtgatcatgggccctgaaaaagattttactctatgaccttcatgtgattgtccagcagttagggtagactttaccgggaactggatggaattgaggccccgtttcaatctcacgtgataaactttagcttcctgctaaactttagctatatgaattgaagtgctaaagtttagcttcaattaccaccattagctctcctgtttagattacaaatggctaaaagtagctaaaaaatagctgctaaagtttatctcgcgagattggaacagggcctgagtctgtttaaatcataagttgaaatccattcgaatccctctgaatccacatgtatgtttgttgggctgtgtctgtctttgagtttggttcagctaggaagataatagctatacaaccgccttttgccttatttttttcttcacattttgtttgttcgacctatggggttcgtccctcaatttatgtgaaaccttttcttttgaattagaccaacttatgcaaaacctacatgctatgttccggatgaagggtgctgaacacgctcccatacgaatccgc

SEQ ID NO: 100669 - DNA, 714 bp, Zea Mays
ttttttattctgcatgaatttcaaagaaaatccagcagttcaagaaactggcgctggtggaagaacaaatcataccctatctgactcagcgccagatatactgtattacatgatcaaagtatacgtgccgtaaacaactatatactgtattacatgatcaaagtgttactgtatacgtgccgtaattacaatatggcttctagatgtacaatattttgggtgatgataccaacaatgtacacagtccgacaacagctaagttatccctatcgtacaactcagttcctctcgtagaactgaaacttcatcatttaaatccgttaggtgctaggattcaaaatcctgtttcgcatctgcatggatgcaaaaatcacatctgttttgacgtatcttttacgcttttttacgcgttggagtatcgtgtatctcccgattgctatacagtacagtgtcgctgatgatgggatggtgactggtgtctccattcatgctgcctggaggacttgctcttgctgcagcccctgctgcttcccacttcttgctgattcgtatgggagcgtgttcagcaccttcacccggaacatagcctgtaggttttgcacaagttgattgtaattcagaagaaaaggtttcacattgattcagggatgaacgccacaagacgaacaattggctaaataagaggaacaaaccaaatgtgaagaaaaataaaag

SEQ ID NO: 100670 - DNA, 2075 bp, Zea Mays
atggatcagaagaaggcgatgaggtctcaccactctcacatgtcaccatggccgcgtgggttagcggcgcgacgggggtggtgccagcaggcggcttcgcggccgacgacggttcttgtgatcgtgctgaccgtgtttgccgcgctgctcttggccgtcgtcctcttcggcgtccggctcacgcccttgggcgccaacaatacctgggtctcggccggggtacgcgtcgtcctcaaagccgtgtccgactccgaccacggccctgatccactggcgaaggtgccggaccccagcgaccggctgctgggcggcctcctctcgccggacttcgacgaaagctcctgcctcagccgctacaacgccgcgctctaccgccgcccgtcgctgcacgccgtttcaacctacctcgtctccgcgctccgccgctacgagtcgctgcaccggcgctgcggcccgggcactccaggctacgcgcgcgccgtcgagctcctgcgcgccaacgcctccgcttcttcttcgtcctccggatcatgcagctacgccgtgtgggccccgatcgaggggctcggcaaccgcatgctctccatcacctccgccttcctctacgcgctgctcacggaccgcgtgctcctcctccacagcagcggcggcggcggcgacctcgacggcctcttctgcgagccgttcccgggctccacgtggatcctgccggcggcgccgggcgacacgggcttccccatccgcggcatcgagcggctcacggaccggtaccaccaccagagcctgggctccgtgctgaggcgcggcgaggaccccggcgcggcgccgtggctgtacgtgcacctccggcacgactacaccaaggacagccgcgaccagcagttcttctgcgacgacgtgcaggccaggctgggggcagtgccgtggctcgtgttccggtcggacaactacttcgtgccggggctgttcctggtcccgcggcacgaggcggagctggcgcgcatgttcccgcgccgcgacgtcgtgttccaccacctcggccgctacctcttccacccgagcgacacggtgtggggcatggtgacccagtaccacgactcgtacttcgccagcgcggacgagcgcgtggggatccaggtgcgcaggttctactgggcgccgatctccaccgacgacctcttcgcccagatcctcaactgctcgcagcgcgaggacatcctgcccagcgttggcgttcccgcggcaaaaggcggctccgacggccagcagcctgcgaaacagaaggccgtggtcgtcgtgtccctgcacggcgagtactccgagaagctcagggacctgtaccaggggcacggcggagcggcgggcggccaggaggcggtgagcgtgcaccagccgacgcacctgggctcgcagcgctccggcgagcagcagcacaaccagaaggcgctcgcggagatggtgctgctcagcttctcggacgcgctggtcacctccgcggtctcgacgttcgggtacgtagggcaggggctagcggggctgagaccttgggtgctcacgagccccgtcgacaggaagggccccgggatgccgctgccgtgccggcgcgccgctaccgtcgagccttgcttccatgcgccgctcgactacgattgtcgggccaaagcaaaaggtgacgccggtaggagggtgcggcacatccgacactgtgaggacttcccgcgaggtgtgcagttggtggaatgatgaactacgcactagtattacatcacatgggcgctcaggagctaccaagcaccagtttttcattatattacaattaaacatggggaataaatacggcattcagtctaagaggttactgtaaaaaaagttatgtaagatgaccatcgcaaatagcgtgcgttgctaggttttcttttaccacaacatttgattttttattaaaaacatttttgttaacaaatttgtttctttgtatttgtatcggtttttgctccatatgtctccgttgtatttataggcataaactctatatctgtcttccaaatgaaaggtggtattcaatttcgtttaga

SEQ ID NO: 100671 - DNA, 2279 bp, Zea Mays
gccgcgggctcccgtctcccccctcctgccgcttttcgggatttcgtttcgtttcactcgagggcgaggctggatttgcgcgtcctgtaccgagcgttccatgtgacaggtcgctcgcttgcccccgccccgccgctccccctcctcgtctcgcaaagcaaccgcaacgcgccgagccggcagcggggtccccccaaaagacgaggcagcgagcaaggtaggcaggcaggcaggcagcgggctggcggaaaagactagtgcgcgctcgtgctcgtgctggtgctccccgaccagactagaccagcttgctagcgccagcaaggcgagcggcgatgctcgcacgatctactacagctgccgccgcggccgccgccgggatctgcctgtgattaaggatgtcggcgtcgcggagcgggaggcggcggaccggtagcgtggcgctcggagaccttctgcagcgggaggcgtcggcggagcgggccgcgttgggatgcggcgagcggccctcggtcgcggcggggcaggcctgccgggcgaagaagggtgaggacttcgcgctgctcaagcccgcctgcgagcgacgccccggcgcgccgtccacctccttctccgccttcgccctgttcgatgggcacaacgggagcgccgccgcggtgtacgccaaggagcacctcctcggcaacgtgctcagctgcgtcccgaccgatctggcctgggacgactggctcgccgcgctgccgagggccctcgtcgcggggttcgtcaagaccgacaaggatttccagactaaagctcattcctcggggacaaccgtgacgcttgccataattgatggctccgttgtaactgttgcatctgttggtgattcacgttgtgtccttgaagctgagggatccatctactatttgtcggctgaccatcgcttcgacgctaatgaagaggaggttggacgtgtaaccgaatgtggaggtgaagttggaagactaaatgtcgtcggtggtgctgagattggtccccttagatgttggccaggtggtttatgcctctcaagatcgattggtgatcaggatgtaggtgaatttattattccggttccttatgtgaagcaaattaagctgtctaatgctggaggccgtcttattatttcaagcgacggtgtttgggatgctttgactgcagaaatggcttttaaatgtgcacgagggcttcctcctgaggccgcagctgagcaaattgttaaagaagcagttgaagcaaaaggattgagagatgatacaacttgcattgtcattgacataatatcaccagagaaaccaaaacgcactatacaatctcaaagaacgccaggaaaaggccttgtgcttctaaaaaatttctttttaaggaaaacaacatctgactcgttgtctctccctgataaggataattatcctgagccagatttagaggaggtctttgaggacggatgcccatccctttcaaggaggcttaattctgagtatcctgtccgagacatgttcaaactttttgcatgtgcaatttgtcaaattgacttggaatctggccaaggcatatccatacacgagggtttgtcaaggccagggaagctgcgtccctgggatggccctttcctttgtcacagctgccaggaaaagaaagaggcgatggaggggaagcgccattcacgagattcctcgtccagaaatagcgggtcaagtgaatcgtgactgaagccgagaatcatcttgaggcaaacgcctagcggtgtgacgagctaattatcgttgctgctgttatcttgcagcactttctcatggattaccattgaattgagacatgttggaagtcgccatgcctatatatatgttggagctgtacggtactggaccgtagagcaaatccaatcgcctctagataccacaccagcgtcttcggcagggcttgtgacagcagcttatgcagggaatgatgacaagaggttattattagtgaagaatgtcgacagtggccaacagtcatgtaaattattcgtcgtgtagaggtgcaagtgacaaatagccacggttttgtaattctcaactaggattaggtattgagacctgtaattcgtctgggcagacctcaaactgaaggtcaacaacgtagcctggccctattgtagaatgtatgttgccctacaatctaaatgattcaacgctgcaattaaatctaagatctttgcagaccaccataattctttttcggttactatactagtgtaatgtttgtccaatcatatt

SEQ ID NO: 100672 - DNA, 130 bp, Zea Mays
tttttttttggcttttctggcccgaacccattcgacacgaagtatgatgggcttgggccgggccggcccgacccggcccaattcccagcactagtcttgtcgatccctaagctttgttcttcctagaccc

SEQ ID NO: 100673 - DNA, 729 bp, Zea Mays
atgaatattgtagcaattggagtctacccaactaaagggaggctgacagttgaagtattcaaggacccagacagggagttcaccggacaaggtggaaagaggcgaccccaacccttggcagcgccccccgttccaacagtggccatccacggcggctgcgctacccccgctcgggtccacgacctcggtcaccaacccaccgcctcccccgttcccggcgcgtccgacattgttgccgccgacgaggtctgcaccatcttcatggacctgcctgcagatgtcaaggaaagggagctacacaacctattgtgctggctcttgggattcgagacgtctgagatgaacttcaagggcaaccagcccatgggctttgcgctcttctccactgtgcaccaggccatcactgcaaaggctatgttccaggatacagtgttcgatgctgagactaaggtggcgctgcaaactgatatggccaagaagaacctcttcgtcaagagatgtgagatttgtccacttgtcattcacatgatgagagtggcagccagtgagaaagctaaggctgagaagatacaccagatcaagagagccgaaggagaggaagaatccaagtacctgactggcgtcggtattgcaaggcagtgccaggcaattgtggatgggctgagggacactgtgctcgccttatcagagaatgttccaggcaccacgccaagggcatcatggacatga

SEQ ID NO: 100674 - DNA, 924 bp, Zea Mays
atcagctcgtcgtcacccatcccagctatcatcttctccgtccagaggcgtccatcgccggcgtacgtcctcggtccaaataaaaagtaatggggcgcctccgttgtgggtcgttggccgaaccctcctcgctccatttccacccgccttttgcatctcgacggggcctacttgccttcacgcctccactccacttcaatggatggagcctataaaacgggagcacccccggcggccattgccaaccaccagtccactcatcatcgccatctcttctcttgttttgctcgctctatacataccagagaggtaggtagctagctagctagtggtgaacgtacaataatacaatcagcacagcaagacagtaatggcgcagcggcagggaagaggcagtggtgctgtggcccttgcggcggcggcggcggtgctcctctgcgtgctccttcatgcccacgtcgcggagtcggccgtgttcaccgtcggcgaccgtggcggctggagcttcagcaccggtacctggactaacggcaagcgcttcaaagctggggacgtcctagtgttcaagtacgactcgacggcgcacaacgtggtggtggtgaacgcggccggctacaaaggctgctcggcgccgcggggcgccaaggtgtacacgtccggcaacgaccgcgtcacgctggcccgcggcaccaactacttcatctgcagcatccccggccactgccagtccggcatgaagatcgccgtcaccgccgcctgagtcctgaccgatcgcggccgccgccggcacgcctgctgccgcgggctacatacatctacctatcgactgcctgattgtcagttcgactggcttgtatcgactccctgattgttatatatatatgaataaaacacaccatcatgattcgatgtgtaaagtaacaa

SEQ ID NO: 100675 - DNA, 1228 bp, Zea Mays
atcagctcgtcgtcacccatcccagctatcatcttctccgtccagaggcgtccatcgccggcgtacgtcctcggtccaaataaaaagtaatggggcgcctccgttgtgggtcgttggccgaaccctcctcgctccatttccacccgccttttgcatctcgacggggcctacttgccttcacgcctccactccacttcaatggatggagcctataaaacgggagcacccccggcggccattgccaaccaccagtccactcatcatcgccatctcttctcttgttttgctcgctctatacataccagagaggtaggtagctagctagctagtggtgaacgtacaataatacaatcagcacagcaagacagtaatggcgcagcggcagggaagaggcagtggtgctgtggcccttgcggcggcggcggcggtgctcctctgcgtgctccttcatgcccacgtcgcggagtcggccgtgttcaccgtcggcgaccgtggcggctggagcttcagcaccggtacctggactaacggcaagcgcttcaaagctggggacgtcctaggtactgtaccagtgaccttccttcctgtcgcatcgatcgatatatatccaaggcagggcgatatgtcttatgcttatgcagcagagaatcttggccgaccgatcgaattgaacacacgacacgtaccagtagtggccttttaaatgctcataaacataagcaggcgtgttaaggcgtacgattaactatatagattcgtagctctgtatactacatagactacagctgcatgggttgagattttagatcgaattatctgaacttttggtggtggtggtggtcggcgccgccggccgcggtgcagtgttcaagtacgactcgacggcgcacaacgtggtggtggtgaacgcggccggctacaaaggctgctcggcgccgcggggcgccaaggtgtacacgtccggcaacgaccgcgtcacgctggcccgcggcaccaactacttcatctgcagcatccccggccactgccagtccggcatgaagatcgccgtcaccgccgcctgagtcctgaccgatcgcggccgccgccggcacgcctgctgccgcgggctacatacatctacctatcgactgcctgattgtcagttcgactggcttgtatcgactccctgattgttatatatatatgaataaaacacaccatcatgattcgatgtgtaaagtaacaa

SEQ ID NO: 100676 - DNA, 464 bp, Zea Mays
cgctttcccgtttgtactctttttttaaagacctgattgtttggacttgtcatgctaggacatagctattgccacatgtttcttctttccaatctgaccattttgtcgtgcaagattcaagaatgccaaatgactttagctataaccctataatgttggagacatgcttttgtttctctccaccattgtttaaaatttcttttattgttatcttgcagggattataataatccgtatcttccaatcaattattctgccatggatggtacattacagcctactgttggagctgacggaaggaaagtggaggctcaaggcaatgttcttcttgcatcaattgagaatatgcaatatgatgttactgtagatgttcttcatactgtgttctcatcatttggttcagtccaaaaattgctattttttagaagaatggggggacacaagctttgattcagtaccctggt

SEQ ID NO: 100677 - DNA, 1354 bp, Zea Mays
gcagcgacgacgtttgcggtccctggttgagcgcctctatcccccttcatctcgctccttcgcagaggtactagctatcatcatcttctatctgatttttgtcggctacggttttggaaagaaatgttgcgcgtcgtcatccatggcggagcaagtcagctgctgaatggcggcgtcgaagcccccatcggccgaatcactgtctgagaagcgaacgaagcgcagtcgcgagaagtgctgatccgtctcaaacatttgggactgtgattttcttttgttttctactacaacaatcccatttttctctgtttgtagacacgtacggagttaataaactaaaacatttgtattactagaataattcagtggtgaggacaatgtcaatataataacgtaattctttgttttattcctaacaattgagaggaatgttttgatagtaaatggttactctattactagaataattcagtaacaaatcaagatcttgtatcgttcggtagaaagcatcaattgtggctgtaatctaatacggtttttaccacacttttgactagaaacacataaatagttagttgggttacgatcctgattaatttgccttttgccatcgctaagcatcttttctccgtcagtatatatggacaccatgatggggcgtcgtcttctagtgagccttgtaccactactcatggcggtcatggtggcggcggcgttcgacatctcaagaggcccaccggcgttcggggtccgaagaggggctccaaaggagtactgcgactggcgcggaccttggggcgctgcgcccttcctgctggggtcagctgcggccatccacctcggcaacaccaactcgtgcatcgccgcctacaactttcgcacatggagccacgagtactaccagctctgcatgccctcttgggtggccgtcacggacaacggtacggtcctctccggcgaggctgctatgaaccacgccaccatcggccctaggacggccatctcgggcttcacgcgcctcctcgaccaaaagctcacggacgatgtggggaagagcgagatgaagctttcgccgccgtacaagttctccgagagggcgggaccggtcgccatgcaatttaatcatccaagccggcgtggccaggtcatagagttctcccccgtggatctcgccgttgtcctcgtctctgagctgaagcacagggcggaggctcacctaggacgtgagctctcggctgctgtcatcgccatgccgcgtcacctcaactacaacgaaaggcatgacatcgtcaatgtgggacggcacgacgctggcttccaccggggcgccaaggccatcgaccggtagatcgtg

SEQ ID NO: 100678 - DNA, 858 bp, Zea Mays
tctccgtctccggctctcccacacactctctcgctgtctcacaggctgtctcaccgccgcacagagcagagcacaatggccgctcctcacctcgccgtgttctccgtgctcgccctcctcgccgtggccgccacggcgcaggcgcccagcggcgctccagcggcggcgcccaaggcccccgcgaccccgcctccggcgatgccgcccccgacaccggcaccggtcgccccgcccaaggcggccccggcaccggcccccaaggtcgcgcccaccccagcccccacgccgtccgcgtccgcgccggcgcccgaggcccccaccgcctcccctccggcgcccagcccagacgcgtcctcgccctcgccctccgccgagcccccggcgtcctccaccccggccggcgccgccgccggcctccgccccaccgtcgccttcgccgtatttgccgttgccgcggctgtctactccttctagattatccagtggtcctgatccatcctcagcttcttcgtcacttcgttgttccttactcccgcttttgttttgttttgtttttttcttccctttttcttctctgtcctcacacccgcgttcttgttcgtatgaactgttgtaattacgataattgatttaatttatctatttctacattttttatattataaatagggatgaaagtctgtgcgcaattcaataaattttttgcaggttatatggataacctgtaaaattaaacttatttaaatgttctgagcataagttgatcctactcataagagacgctattgtgagatttctacgaccttaggtatgttagggcatcttcaataactctttatttttttcattctcaatacc

SEQ ID NO: 100679 - DNA, 329 bp, Zea Mays
acccaaaacaccgacatccggggtcatgggccacaacacgccaccaccggtgataccagcaccaggaggagcttatgcaggggagggagctactacaggagagaatccaaacccgttacacgacttcgtcaacgagtttttttgcttatggaggtagtggtcacaactccaacaaccccgatatgtgatggtttgagtttttctcttctggagggagttattatgttgtaatgaactatttgtgaactgtgatgttgtatttgtgaacattgatgtggtgaaccatttgtgaacttaatgttggtaaactacaatgtggttgtgaagaa

SEQ ID NO: 100680 - DNA, 387 bp, Zea Mays
gcaaccgcgccgccgctccctgggccgcccagctcccacgccgccaaccgcgcggagcacccacgccgctgctccccggccgcccccgcgccgcccagcgcccctagcgtcgcccgcccgccctcgcccagcgccggccgcctgtgccgcccgagccgccaccgtcgtccgtcgccgttctaagcttccgtcgaccagccgtggccaagccctcctcgtgcaaccactccgccgtcgtcgccaagctcttccccatcgaaaggtattttttgcgttttttattccatattttcggcggccgttatttaattgccaccgaaattagtatgtatttgtaattgtgtttgtttgattagtgtgtgtgattattattattgtttagttcga

SEQ ID NO: 100681 - DNA, 2069 bp, Zea Mays
cggagcaagaaacctctctgttgaagtgctgatgatggattacaatgaatttcagtccacagcagaaaaaaaaaaccccggttagatctgtgtagaaagagtaaagaaatacagataggcccggggtccacaggtccagtgaaatgcttgcccacgaacagaaacagcaagaaccaccacaaggcgagtccgattctagatcaagcgagtcctcccgtttcatcgcctcggaaaaaggcgagaaatctgcaacagaagaagcagcagcgacagcgattccttcctcgtacctttcgttgcgctcgcgcactcggatcgacccctctagggttttgcatcggcctcccgccagctcctatccctcccctctccctccgccgcgcgcccgcgcggggagccaccaaaccctaggacggcaaatccggtgcgatcacccacggtggaggcctcgtcggcggccgagaggagccgctcagggctcgggtcagggttccggtacctcgccggcgccgcctctggctggtgggaccggtggatggtcatgggagccagcggctccaagcttgagaaggccctcggagaccagttcccggaaggcgagcgctacttcggcctcgagaacttcggcaacacctgctactgcaacagtgtccttcaggcactttatttttgcattccattcagggagcagttactggaatattatgcaaataacaaaactccaggagacgctgaggaaaatcttctgacttgtttggccgacctttttatgcagataagccaagcaaagaaaaagaccggtgttattgctccaaaacgttttgttcagagagtgaagaaacagaatgagttgtttcgcagctacatgcaccaggatgcacatgagttcttaaatttccttttgaatgaacttgttgatattctggaaaaagagtcaagtgctgctaaggactcaccccaatcgtcgtctcctgaaaaagctccaaatggcccagttcaacctttagccaatggagttaaaaaagaaccaccagttaccctggtccataaaagttttcagggcatattgaccaacgaaacaagatgcttaagatgtgaaacagtaactgcaagggatgaaacatttcttgatcttagtgttgacattgaacaaaatagttcaatcacaagctgcctgaaaaatttctgttctacagagactttaaatgcagaggataaattcttctgtgacaaatgctgcagtttgcaagaagcacagaagagaatgaagattaagaaggctccccacatattggtgatccatctaaagcgtttcaagtacattgagcagcttggccggtataagaagctttcatacagggttgtattccccatggaactgaagctcagtaattcatccgacgatgtagacactgagtactccctctttgctgtcgtggtccatgtcggaagtggcccgaaccatgggcattatgtaagccttgtcaaaagccacaaccactggttgttcttcgacgatgaaaatgtcgagatggttgaagagcagaccctacaaacattcttcggtacttcacatgaatactcaggcaacacggaccatgggtatatcttgttttacgaggggcttggtgggaagagttagattggtctattaacctttcctgttcctttttttccttctctttggagcttgcaagttccactcttgtacctacacagctactatatcattacctccatggaaaacggtcaatccaagaggttgtatgaggcgacgatgccagattttgggtggtttcagtgtacaggggataatggaatctagctcccaacgatgaaataaggtgtaattttgaagttcgcctgaccagttccttctcagggctaacatcttctgttaaagtgtgggactttactattgggcacactgtacatcaattctcgttcataactttgtacgcattttccagttctgatccatgtacgtgctgaaacttgtgagcatttggcatgtttgattttgtttttcagtttacccatgtaactgtattttctcagggcgaacagag

SEQ ID NO: 100682 - DNA, 2043 bp, Zea Mays
cggagcaagaaacctctctgttgaagtgctgatgatggattacaatgaatttcagtccacagcagaaaaaaaaaaccccggttagatctgtgtagaaagagtaaagaaatacagataggcccggggtccacaggtccagtgaaatgcttgcccacgaacagaaacagcaagaaccaccacaaggcgagtccgattctagatcaagcgagtcctcccgtttcatcgcctcggaaaaaggcgagaaatctgcaacagaagaagcagcagcgacagcgattccttcctcgtacctttcgttgcgctcgcgcactcggatcgacccctctagggttttgcatcggcctcccgccagctcctatccctcccctctccctccgccgcgcgcccgcgcggggagccaccaaaccctaggacggcaaatccggtgcgatcacccacggtggaggcctcgtcggcggccgagaggagccgctcagggctcgggtcagggttccggtacctcgccggcgccgcctctggctggtgggaccggtggatggtcatgggagccagcggctccaagcttgagaaggccctcggagaccagttcccggaaggcgagcgctacttcggcctcgagaacttcggcaacacctgctactgcaacagtgtccttcagggagcagttactggaatattatgcaaataacaaaactccaggagacgctgaggaaaatcttctgacttgtttggccgacctttttatgcagataagccaagcaaagaaaaagaccggtgttattgctccaaaacgttttgttcagagagtgaagaaacagaatgagttgtttcgcagctacatgcaccaggatgcacatgagttcttaaatttccttttgaatgaacttgttgatattctggaaaaagagtcaagtgctgctaaggactcaccccaatcgtcgtctcctgaaaaagctccaaatggcccagttcaacctttagccaatggagttaaaaaagaaccaccagttaccctggtccataaaagttttcagggcatattgaccaacgaaacaagatgcttaagatgtgaaacagtaactgcaagggatgaaacatttcttgatcttagtgttgacattgaacaaaatagttcaatcacaagctgcctgaaaaatttctgttctacagagactttaaatgcagaggataaattcttctgtgacaaatgctgcagtttgcaagaagcacagaagagaatgaagattaagaaggctccccacatattggtgatccatctaaagcgtttcaagtacattgagcagcttggccggtataagaagctttcatacagggttgtattccccatggaactgaagctcagtaattcatccgacgatgtagacactgagtactccctctttgctgtcgtggtccatgtcggaagtggcccgaaccatgggcattatgtaagccttgtcaaaagccacaaccactggttgttcttcgacgatgaaaatgtcgagatggttgaagagcagaccctacaaacattcttcggtacttcacatgaatactcaggcaacacggaccatgggtatatcttgttttacgaggggcttggtgggaagagttagattggtctattaacctttcctgttcctttttttccttctctttggagcttgcaagttccactcttgtacctacacagctactatatcattacctccatggaaaacggtcaatccaagaggttgtatgaggcgacgatgccagattttgggtggtttcagtgtacaggggataatggaatctagctcccaacgatgaaataaggtgtaattttgaagttcgcctgaccagttccttctcagggctaacatcttctgttaaagtgtgggactttactattgggcacactgtacatcaattctcgttcataactttgtacgcattttccagttctgatccatgtacgtgctgaaacttgtgagcatttggcatgtttgattttgtttttcagtttacccatgtaactgtattttctcagggcgaacagag

SEQ ID NO: 100683 - DNA, 1537 bp, Zea Mays
tattgttaaaacttaaatataacatcgatatcactgcgaacgttcggttaacatttaacaactttgcatgacgtattcctgtattagaaaaaccacggacagggcacacgcattggctttcagccttcgtccacagacaactcttcctcagacgacgaccacactgcaaccattgacacacacaacgtccggaagcgtgtcacgtccacaacagaaggccgcatcagtcactcatcactcatcaggggtcctccgcaacagaaggctgcacgaaccgtctccagtaccagtggcgctcccagatggcgcccatggcctcgagcggtacccccttggtctccggcaggaacgccacgacgaaggcggtcatgacggctacccaggccgcgtagtagatgaaggtggcgtacttgagcgtgcacagcatggagaggaacgtctgcgtgagcaggaacgtggcgcccaggttgacggccacgctgacgccctgccccgccgaccggatctccacggggaatatctcgccagggatcacccaggtcagcgggccccacgaccagccgaacgccgccgagaagacgcacgtcagcgccagcaccgcgagggagtagggcctggccatcgcggacccgccgtcggccccgatctgggaccccatgatccacgcgaccgcgacctggcagatgatcatgacgaagccgccggtgaggaacagcggccgccggccgtaccggtcgaccgtgacgatggacaggagcgtggaggcgaggttgacggcgccgaggatgacggcgcccatgagcgcggcgttgctgccgaacccggccgtctggaacagcacgggcgagaagaaggcgatgacgatgacccccgtgagctgctggaacagcgggaccgccacggccacggccaggtggtgccggtgctcccgccggaggatcctgcggaacgcgccctgctcgtgcgcgcgcgcggcctccacggcgcgggccacgtcctccagctccgcgtccacgtccgccttggcgcccctgacgcgccgcagcgcggcgcgggcctcctccgcgcgcccgcgcacgaggaggctgctgggcgtgtccgggatgagcagcgcccccgcgaggatgacggcggcgggcgccgcggccaggcccagcgagaggcgccacccccacgccgggatgcgcgaggtgccgtagttcaccaggttcgccgccaggttgccgatgctgaggaagagctggaaccccgtcgtgaaggcgccccgccacttggccggcgccgtctccgccaggtacaccggcgccgcctgccatgcattcgtcactcatgcgtgtgaagtaaaacacttgggatcctggatgttagaaaggacagccaactaccccaagaaagccggcaggatgacgccatcttaggcatcgctatcccgtcaggtcggcgcttgagagcgatgtgctggctcaaaaccaaccactagtcctagctacctcgagagacagtgagcaaacgaagcaggagtgtcgtaggacggtgc

SEQ ID NO: 100684 - DNA, 1624 bp, Zea Mays
gaacaggcatggatgtgtaccagtaccagtacaaaccagtggcaggcagcggtgtcgccggcaaaaaatttcgaaacgagaggtgtctgcctatcacttgcgaagaaatcgcgaggggaagcgtgacacctgacgagctgagcaggcaggcggtagtggccgagcgaaagcatcctcgatctcgtcgtatcgtagctgccgccgctcagagcaatggagagagcggtgccagttcggaagtcgcacaccaacacggccgaccttctctcctggtcggccacgggccctgacgcatctgcctcgccggccgcgtcctcccgccccagcctcaagccggccgcggggattacgccggcgatgttcggcgcgccggtcaccgagcaggaggccgaggatctgagcaagagtgaaaggaaattttgctctggctcaaagttgaaagagatgggtgggagtgggatttttgctgagaagagtgaaaatggtgatgcagaggcttcaaatcctgctaacaagacttccttgaggatgtaccagcaaactgtgactggaataagccagatttcatttagcgctgatggaagtgtttcaccaaagaagccatcgtcgatacctgaggtggctaagcagcgagagcttagtggcaccctggaagatgctgatgctaaaatcaataagcagctttctgaagccaagaccaaggagcttagtgggagtgacatctttggtccgcctcctgagattccagcgaggccattggctgctcgtaacatggagctacaaggaaatgtcgatttttcacttccacagcgaagcgtccacacatcagttaaagtatctaatcctgccggaggtccaagcaacatctctttcagcgaagagcctgtagtgaagacagcaaagaaaatccacaaccagaagttccaggagctgacaggtaacaacatcttcaaggaggacgtccctgcctcggccgagaagtctctgagctctgcgaagcttaaggagatgagcggcagtgacatcttcgccgatggaacgccagctccccgagaataccttggcggcatccggaagccccctggcggtgagagcagcatcgcgctgatctgattgttctgggctgctctaattcgcactggctagcagcgccccctcgccagtcgtcactgaagcagcacacagagtgcatttcttgacctcttggttctcgaatcgtgttggggatcataatttatgttgggtgtcgttagtctaatataatttggagtcagcagaatctgatccggttacctccgtatcatctgatacgcgggtgtgtgatctcatctgtgatccatgctacattattatgttatgccatccgaactgagaacttatgcaacaattatttttggactcgtttctgggactatggcatcatataggatgttttgcttgtgctgtcgatgattccaaaggtacatagttttgaaaagaagacatgctacattattatgctatgtattagtacaaccgaactgagaacttatgcagtaattattttggactcgtttctgggattatggcatcatagatatgatattttgttttgtgctgttggtgatgcaaaggctccaatact

SEQ ID NO: 100685 - DNA, 1474 bp, Zea Mays
gctgcgaggctaccacggccgatgactgcagccagtagcccgcagcgcacaccgtctggagcggcgagccaacgtgcccaccttcggaagtcgcacaccaacacggccgaccttctctcctggtcggccacgggccctgacgcatctgcctcgccggccgcgtcctcccgccccagcctcaagccggccgcggggattacgccggcgatgttcggcgcgccggtcaccgagcaggaggccgaggatctgagcaagagtgaaaggaaattttgctctggctcaaagttgaaagagatgggtgggagtgggatttttgctgagaagagtgaaaatggtgatgcagaggcttcaaatcctgctaacaagacttccttgaggatgtaccagcaaactgtgactggaataagccagatttcatttagcgctgatggaagtgtttcaccaaagaagccatcgtcgatacctgaggtggctaagcagcgagagcttagtggcaccctggaagatgctgatgctaaaatcaataagcagctttctgaagccaagaccaaggagcttagtgggagtgacatctttggtccgcctcctgagattccagcgaggccattggctgctcgtaacatggagctacaaggaaatgtcgatttttcacttccacagcgaagcgtccacacatcagttaaagtatctaatcctgccggaggtccaagcaacatctctttcagcgaagagcctgtagtgaagacagcaaagaaaatccacaaccagaagttccaggagctgacaggtaacaacatcttcaaggaggacgtccctgcctcggccgagaagtctctgagctctgcgaagcttaaggagatgagcggcagtgacatcttcgccgatggaacgccagctccccgagaataccttggcggcatccggaagccccctggcggtgagagcagcatcgcgctgatctgattgttctgggctgctctaattcgcactggctagcagcgccccctcgccagtcgtcactgaagcagcacacagagtgcatttcttgacctcttggttctcgaatcgtgttggggatcataatttatgttgggtgtcgttagtctaatataatttggagtcagcagaatctgatccggttacctccgtatcatctgatacgcgggtgtgtgatctcatctgtgatccatgctacattattatgttatgccatccgaactgagaacttatgcaacaattatttttggactcgtttctgggactatggcatcatataggatgttttgcttgtgctgtcgatgattccaaaggtacatagttttgaaaagaagacatgctacattattatgctatgtattagtacaaccgaactgagaacttatgcagtaattattttggactcgtttctgggattatggcatcatagatatgatattttgttttgtgctgttggtgatgcaaaggctccaatact

SEQ ID NO: 100686 - DNA, 1524 bp, Zea Mays
atggcgggagaagtgctcgttccggtggagggaggccgggcgcgcgactacggcggcggcgtgacgttctccgtcgcggtcaccagcctcatggccgcttcctgcggcctcatcttcggctacgacgttggcgtctcaggcggtgtgacgcaaatggactcgttcctgaacaagttcttccctgaggtgctccgggggatgaagagcgcaaagcgcgacgcctactgcaaatatgacaaccagctgctcacggcattcacgtcgtcgatgtacatcgccgccatgctggcgtcgctggtggcgagcagcgtgacgaggagggtgggccgcaaggccgtcatgctgatcggcggcatcatgtttctcgccggttccgtcatcaacgccggggccgtcaacgttgccatgctcatcgtcggccggatcctgctcggcttcggtgtggggttcacagcgcaggcggctccgctgtatctggccgagatatcacccaccagatggcgcggcggcttcaccacggcctaccatttcttcctcgtcgccggcacgctcgccgccaacgtcgccaactacgtcacgaaccggattcccgactggggctggcgcgtctccctcggcctcgccgccgtgccgtccgccgtcatcgtcatgggcgcgctcctcgtctcggacacgcccagcagcctcgtgctgcgcggcgagccgtacgcagcccgcgcgtcgctgcagcgcgtccgcggggcgggcgccgacgtggaggccgagctcaaggacatcatctgcgccgtggaggcggcgcgccgggacgaggaggagggcgcgttcaggaggctgcgcgccgaggggtaccggcactacctggtgatgatggtggccatccccgcgttcttcgacctcaccggtatggtcgtgatctccgtcttctcgccggtgctgttccgcacggtcgggttcgacagccagagggccatcttcggcgccgttataattagcctcgtcagcctgtgcggcgtggcgctgtccaccctcgccgtggaccgctgcggccggaggttcttgttcctcgccggcggcaccgccatgttgcttttccaggtggcggtgtcatgggtgttggcggatcacctcgggaagcaccaggcggtgacgatgcccaagaactacgcgatgggcgtggtggtgctggtgtgcctgtacacgttcagcttcagcatgtcgtgggggccgctgaagtgggtggtgccgagcgagatctaccccgtggagatcaggtcggcggggcaggccattaccctatcggtcgcgctcaccctctccttcacgcagacgcaagtgttcatctccatgctctgcgccatgaagtacgccatattcctcttctactccggatgggtcctggccatgacgcttttcgtcgcggcgttcttgccggagacgaaaggcgtgccgctggagaccatgcggtcggtgtgggcacggcattggttctggaggaagttcgtcgtcttggacgctgccaggtag

SEQ ID NO: 100687 - DNA, 138 bp, Zea Mays
atgctgcattttcgatcgaagaaaatatgcctttcagtggactcaggtcgatgttctgtccaaatacttcaaacttctccggtagcacaacggagtcggtcaactgtggtgtcccaacaatgccttcatcaaatttga

SEQ ID NO: 100688 - DNA, 225 bp, Zea Mays
atggcaaaagagtatgctcctcctggtacccttaccaggacatcgatcatgctgggctgtggggagactccagaccaggttatcagcaccatggaaaaagtgcggcctgctggctgctggtgtcgacatgtcataacatttggccagtacatgaggccatccaaacgccacatgcccgtttcagagtatgtcacacctgaagccttcgagaagtaccaaccataa

SEQ ID NO: 100689 - DNA, 2326 bp, Zea Mays
tttttgggtcggcctccacacgcaagcctcgccaagtttttaaaacccccgagctgaaaaaaaaaacacaaggtaaaaaaatatagggagagaaatctctcgcctcccgtcggagagtatcggtgaccgatgtgtcccgacggcggcggaagctgagggaggtcctggcggcgtcgtcagctcaggggtggcgctgtggcaacctgcgcgcgcgcggttttggctaccgagaggcgggtcgggcgtcggcgggatggcggcgtcgctgaggtggtggtggtcggcggtggtattttcggtggtggtcggcgtgatcccggttgtcgccaacacggagggtgatgctctatacagcctacgacaaagcctgaaagataacaacaacgtgctgcagagttgggatccaactctggttaatccatgtacatggttccatgttacttgtaaccctgataacagtgtcatcagacttgatcttggaaatgcacaactatcaggtccattggtgccacagcttgggcaattgaaaaatatgcaatatctggaactttacagtaacaacataagtgggccaataccacctgaactggggaacttgactaacctggtcagtttggacctgtacctcaacaacttcactggcggtattcctgacaccttgggccaactatcaaagttgcggtttctccgtcttaataacaacagtctttctggtcaaattccgaaaaccttgaccaatatcaacactctccaagttctggatctatcaaacaacaatctctcgggaggggtgccatcaagcggttcgttttctctctttacacctataagttttgctaacaacccaaatctttgcggccctggtactacaaagccttgtcctggggctcctccattttctccaccccctccatacaatcccccagcaccaacttcatcaaaaggcgtgtccagcactggagcagtagctggaggcgttgcagctggcacagcgttgctgatcgcagtgcctgctattgggtacgcattgtggcggaggcgaaaacccgaagagcaattcttcgatgtccctgccgaggaggatcccgaagttcaccttggacagctcaagaggttctcgctgagagagctgcaagtcgccacggacaattttaacaacaggaatgtcctgggaagaggcggttttggaaaggtgtacaaagggagactaacggacggttcactggtagccgtgaagagattgaaggaggaacgcacccccggcggagagctccagttccaaacggaggttgaactgattagcatggcggtgcacaggaaccttctccggctccgtggattctgcatgacccctacagagcggctgctagtgtatccatacatggctaacgggagcgtcgcatcgcgccttcgagaacgcgcgccaaatgagccccccctcgaatgggaaacgagggctcggatcgcgctggggtcagccagaggcctgtcctacctgcacgaccactgcgatcccaagatcatccaccgcgacgtgaaggccgccaacatcctgctggacgaggacttcgaagccgtcgtgggtgacttcggcctggccaagctcatggactacaaggacacccacgtgacgaccgccgtccgtgggacgatcggccacatcgcccccgagtacctctccacggggaagtcctccgagaagacggacgtcttcggctacgggatcatgctcctggaactcatcaccgggcagagggcgttcgacctcgctcgtctcgcgaacgatgacgacgtcatgctccttgactgggtgaaggcgctgctgaaggagaagaagctggagcagctggtggacccggacctgcagggccggtacgtggaccaggaggtggagtcgctgatccaggtggcgctgctgtgcacgcagggctccccgatggagcggcccaagatgtcggaggtggcgcggatgctggagggcgacgggctggcggagcggtgggagcagtggcagaaggtggaggtgatgcggcaggaggcggagctcgccccgcgccacaacgactggatcgtcgactccacctacaacctcagggccgtcgaactgtccggcccgaggtagggaggtagatgatcgccgtcgggatccttgtcgtctgtgaatatgacagcggataggtagcttggtggttggtcctgtctttaatgatagctgcgaaactgtagatgaaattgtgtgctcgtcttctgtaacctgagtacctgacatctctgacattttttttctgatattagagagccgtatgacaccagcctctgttgagcc

SEQ ID NO: 100690 - DNA, 152 bp, Zea Mays
cgcggggacaccgggggggtgcagagggcggacgccgcccgcccgctccccaggtggtagtcgaccgagcgcggtcccctctccaggttgcggcgcgacgagcagagagaggagatcggcagcgggcgagacgagttcaggcgactggcgag

SEQ ID NO: 100691 - DNA, 98 bp, Zea Mays
cacctgctgtcctggtggtgctcgtcgccggccaatgtcatgggtggcgaagtaggacagcagcaaaggccggcccagtcgtgggtgggtgggggttg

SEQ ID NO: 100692 - DNA, 631 bp, Zea Mays
acaatttcacctgacaaagttgctccttttagaaacaggaagggaactctcagccaaaacgtgatggtagcttgtgatttcgacctaaatatcactttcatgtctactgggtgggagggatcagctacggatgctagagttcttcgatctgcaatgaacaatggattccatgtacctccaggagagttctatttggttgatggtgggtatgctaacaccacgtcattcctcgcaccttatcgtggagttagataccatctaaaggaatatgggcaaggtcaccatagacctcagaactacaaggagttatttaatcatcgccatgccatactgcggaatcatgttgaaaggactttgggggttgtgaagaagcgctttcccatcctaaaagctgccacatttcacaaaataaggaatcaagtgaagataccagtagcagctgttgtacttcacaatattatccgatcactcaaaggggatgggaatggttagataatcaaccagataatatctcgccacaaaactttgttgatctaccggatggcgatcaaggcaacgatcaagtaactgtcaaggcaataatcttagagatgcaatagcacaagaaatgtggaatgattaccaagagcat

SEQ ID NO: 100693 - DNA, 309 bp, Zea Mays
atgagctcggttgggaggcaggactccatggacagcttggattgctcctactacctctcggatggcggcctcgtggaagcgcccaccttgtcctccaagcaaatcgagcatgccaggaagcaagctttgacgatcttggaaaccaagtccccagaagaggtcttgaagattttcaccgagcagggttcagaggccaaagccgacctggcgagggagaaggcccacaccccgacgacgcctccaaaaggtgctgatgcaaaggctactactactagcggcacggtgcggacctcaccgccgacgaactga

SEQ ID NO: 100694 - DNA, 2083 bp, Zea Mays
acaagcttgcgggcaaaaatggcaaaggctctcctaggtggcctatcggcgatcctcgtcgtggcggtggtcgtcggtgtggtcgccaccgtcacccgctccggcaagaaggccggcgacaacttcacggtcccgggggaggcttcccttgccacgtccggcaagtcggtcaagtccctgtgcgcgcccaccctatacaaggagtcgtgcgagaagacactgtcccaggccaccaatggcaccgagaaccccaaggaggtgttccacagcgtggccaaggtggcgctggagtcggtccagacggcggtcgagcagtccaagtcgatcggcgaggccaaggccagcgactccatgaccgagagcgcgcgcgaggactgcaagaagctcctggaggacgccgccgacgacctgaggggcatgctcgagatggccggcggcgacatcaaggtgctgttcagccggtccgacgacctcgagacctggctcacgggcgtcatgacgttcatggacacctgcgtcgacggcttcgtcgacgagaagctcaaggccgacatgcactccgtgctgcgcaacgccaccgagctcagcagcaacgcgctggccatcaccaacagcctcggcgggatcctgaagaagatggacctcggcatgttcagcaaggactcgcgccgccgactgctgtcgtcggagcaggatgagaagggctggcccgtgtggatgcggtcgccggagaggaagctgctggcgtcgggcaaccagcccaagccgaacgcgatcgtggccaaggacggcagcgggcagttcaagagcatccagcaggccgtggacgccgtgcccaagggccatcaggggaggtacgtcatctacgtgaaggccggcctctacgacgagatcgtcatggtccccaaggacaaggtcaacatcttcatgtacggcgacgggcctaagcaaagccgcgtgaccggccgcaagagcttcgccgacggcatcaccaccatgaagaccgccaccttctccgtcgaggcgtccgggttcatctgcaagaacatggggttccacaacacggccggcgcggagcggcaccaggcggtggcgctccgggtgcagggggacctcgcggcgttctacaactgccggttcgacgcgttccaggacacgctgtacgtgcacgcgcggcggcagttcttccgcaactgcgtggtctccggcaccatcgacttcatcttcggcaactcggcggcggtgttccagaactgcctcatcatcacgcggcggcccatggacaaccagcagaactcggtgacggcgcacggccgcaccgaccccaacatgaagtccgggctcgtcatccagaactgccgcctggtgcccgaccagaagctgttcccggaccgcttcaagatcccctcgtacctgggccgcccctggaaggagttctcgcgcctcgtcatcatggagagcaccatcgccgacttcgtcaagccagaggggtacatgccctggaacggcgacttcgccctcaagacgctctactacgccgagtacaacaaccgcgggcccggcgccggcaccagcaagagggtcaactggcccggcttccacgtcatcggacggaaggaggccgagccgttcaccgccgggccgttcatcgacggcgccatgtggctcaagtacaccggcgcgccgcacatacttggtttcaagttctaaaggccgcatggcatggcatacatcacatcatatatagtgaggtggcacacacgctcgcgcgcgcgcgcacacatgtttgtgtgtatgtacaatgactgagacttgcaaacagaggggtcggagaacaggagggctgacatttgtaccttcaccatttgcattcctttggctgtttctcctggtgaaactcgaaaagtcctttggacaatgatttgttgcgacattgcttaatgcatggtgtgcgtgcgttttgtcaaaagtgcgctgactctctgttaagcctaacatttcttaaccgcggtagaggctgctagctcataattcaagtacattgttcaagagaaaaaaaatgcaaaacagccaaaagcaataa

SEQ ID NO: 100695 - DNA, 1808 bp, Zea Mays
gacgactaacaaaccgactgacgcttggtttccggccatggcagcaactgtcgatgaagggcttcgcgggcgacacggccaaggcccacgccaagacgagcatgatcgccggggagggcgtgagcaacatccggacggtggcggcgttcaacgcgcaggacaagatcctgtccctcttctgcagcgagctgcgcgtgccgcagatgcacagcctgcgccgcagccagatctccggcgcgctcttcggcctctcccagctctccctgtacgcgtccgaggcgctcatcctgtggttcggcgcgcacctggtccgcacccacgtgtccaccttctccaaggtcatcaaggtgttcgtggtcctggtgatcacagccaactccgtggccgagaccgtcagcctggcgccggagatcgtgcgcggcggcgagtccatccgctccgtgttctccgtgctcaacagccggacccgcatcgacccggacgacccggacgcggagcaggtggagtcggtgcgcggcgagatcgacttccggcacgtggacttcgcgtacccgacgcggcccgacgtgatggtgttcaaggacctgagcctgaggatccgggccgggcagagccaggcgctggttggggcgagcgggtccggcaagagcaccgtcatcgccctcgtcgagcgcttctacgacccgctcgccgggaaggtgatgatcgacggcaaggacatccggcgcctgaacctcaagtccctgcgcctcaggatcgggctggtgcagcaggagcccgtgctgttcgccaccagcatcctggagaacatcgcctacggcagggacggcgcgacggaggaggaggtcgtggaggcggccaaggtggccaacgtgcacggcttcgtcagcgcgctccccgacgggtacaggacgcccgtgggcgagcgcggggtgcagctgtccggcggccagaagcagcgcatcgccatcgcgcgcgcggtgctcaaggaccccgccgtgctgctgctggacgaggccaccagcgcgctggacgccgagtccgagtgcgtgctgcaggaggcgctggagcgcatcatgaagggccgcaccgccgtgctggtggcgcaccgcctgtccaccatccgcggcgtcgactccatcgccgtggtgcaggacggccgcgtggtggagcagggcagccacggggacctcgtgtcccgccccgacggcgcatactcgcggctgctgcagctgcagctacaccatggctgatcctgcgcctggaatagatactggagggcgcacggccggtgtagatactggagggcggtgttagcgtggcgtggctcaaccgtggccggagaagacgtgttttgatgtgaacgatcaggattgtgccgacaaacaagtgatgccgtattcttcttgcactcctgccggctctgccaatgtttagatcatcccctcctagtaattctcacacctttttttttcttcctttgagaagatcctagtaattctcagatggacccaattgtttgatgtgtaacggtcagaagccagggttcgtctttgctacttgtctaggagttgttgcctctaataattggcttcaaaccttacgaagggatctgcttgaaacagccttgcagttgcagcagccacggagagcgtcactggatctgggtgtccgctgccgccgacatctctagcggagtaacgagaaagcctttggatcgatccataattcgtgcaggctgctttgtaagcacgttatacagcttaaacctctatagtaatatttcgtgcaggtaccttatgttgcta

SEQ ID NO: 100696 - DNA, 1896 bp, Zea Mays
ctggttcgttttcggtgatgggcatggtccatgggccgggcagcacttccagagtttcggacgaatgcacatcgctgaataattgcgtcggtcgtacactgcatttttttttcgtgcttgcaattcgcatgtcaactgtcgatgaagggcttcgcgggcgacacggccaaggcccacgccaagacgagcatgatcgccggggagggcgtgagcaacatccggacggtggcggcgttcaacgcgcaggacaagatcctgtccctcttctgcagcgagctgcgcgtgccgcagatgcacagcctgcgccgcagccagatctccggcgcgctcttcggcctctcccagctctccctgtacgcgtccgaggcgctcatcctgtggttcggcgcgcacctggtccgcacccacgtgtccaccttctccaaggtcatcaaggtgttcgtggtcctggtgatcacagccaactccgtggccgagaccgtcagcctggcgccggagatcgtgcgcggcggcgagtccatccgctccgtgttctccgtgctcaacagccggacccgcatcgacccggacgacccggacgcggagcaggtggagtcggtgcgcggcgagatcgacttccggcacgtggacttcgcgtacccgacgcggcccgacgtgatggtgttcaaggacctgagcctgaggatccgggccgggcagagccaggcgctggttggggcgagcgggtccggcaagagcaccgtcatcgccctcgtcgagcgcttctacgacccgctcgccgggaaggtgatgatcgacggcaaggacatccggcgcctgaacctcaagtccctgcgcctcaggatcgggctggtgcagcaggagcccgtgctgttcgccaccagcatcctggagaacatcgcctacggcagggacggcgcgacggaggaggaggtcgtggaggcggccaaggtggccaacgtgcacggcttcgtcagcgcgctccccgacgggtacaggacgcccgtgggcgagcgcggggtgcagctgtccggcggccagaagcagcgcatcgccatcgcgcgcgcggtgctcaaggaccccgccgtgctgctgctggacgaggccaccagcgcgctggacgccgagtccgagtgcgtgctgcaggaggcgctggagcgcatcatgaagggccgcaccgccgtgctggtggcgcaccgcctgtccaccatccgcggcgtcgactccatcgccgtggtgcaggacggccgcgtggtggagcagggcagccacggggacctcgtgtcccgccccgacggcgcatactcgcggctgctgcagctgcagctacaccatggctgatcctgcgcctggaatagatactggagggcgcacggccggtgtagatactggagggcggtgttagcgtggcgtggctcaaccgtggccggagaagacgtgttttgatgtgaacgatcaggattgtgccgacaaacaagtgatgccgtattcttcttgcactcctgccggctctgccaatgtttagatcatcccctcctagtaattctcacacctttttttttcttcctttgagaagatcctagtaattctcagatggacccaattgtttgatgtgtaacggtcagaagccagggttcgtctttgctacttgtctaggagttgttgcctctaataattggcttcaaaccttacgaagggatctgcttgaaacagccttgcagttgcagcagccacggagagcgtcactggatctgggtgtccgctgccgccgacatctctagcggagtaacgagaaagcctttggatcgatccataattcgtgcaggctgctttgtaagcacgttatacagcttaaacctctatagtaatatttcgtgcaggtaccttatgttgcta

SEQ ID NO: 100697 - DNA, 3770 bp, Zea Mays
ttgttagcaattctgatgccaaggtttccacctttctatcgcctaggccattgcccaggtgaggactgtctactcctatgtgggtgagaccaaggccctgaattcctactcggaggcgattcagaacaccctgaagctgggttacaaggccgggatggccaaggggcttggcatcggctgcacctatggaatcgcctgtatgtcatgggcgctggtgttctggtacgccggcgtgttcatacggaacggccagacagacggtgggaaggccttcactgcgattttctcagcaatcgtcggtggcctgagcctggggcagtcgttttcgaaccttggagcgttcagcaaagggaagattgccggctacaagctgctggaagtgataaggcagaggccaacgatagttcaggacacggcagacgggaggtgcctcgacgaagtgcatggcaacatagagttcaaggaagtggccttcagctacccttcccgcccggacgtcatgattttccgagacttctccctcttcttccccgctgggaagaccgcggccgtcgtcggaggcagcgggtctgggaagagcacggttgttgctctcattgagcggttctacgatcctaatcaggggcaagttttactcgacaatgtggacatcaagacgctgcaattgaagtggcttagggaccagattggcttggtgaatcaggaacccgcacttttcgcgactacgattcttgagaacattctttatggcaagcctgatgcgacaatggcggaggtcgaggctgcggctacttcagctaatgcccatagcttcattgctctccttcctaatggctacaacactcatgtgggtcctacttgtacttctactccaatttctaatggtatttgcgcttcattgctgttttgatttcgaagcccttgatttcttgtcgatcacacaggtgggagatagggggcttcagctctccggtggtcagaagcaacgcatcgccatcgcccgcgcgatgctgaagaacccgaagctcctgctactagacgaggccaccagcgcactcgacgctggttcggagagcatcgtccaagaagccctcgaccggttgatggtcggcaggaccaccgtcgtggttgcccacaggctatcgaccataaggtgtgtcgacatgatcgcggtgatccagcaaggccaggtcgtggagactggcactcacgacgaactcctcgccaaaggaagctcgggagcgtacgccgcgctcatcaggttccaggagaccgccaggaaccgcgcgtgcccgtcgacccgcaagtccaggtcgtcccgtctgagcaactccctctccacccggtcgctgagcctcaggtcggggagcctgaggaacctgagctactcgtacagcaccggcgccgacggccgcatcgagatggtttccaacgccgacaacgaccgcaagtacccggcgccgaggggctacttcttcaagctcctgaaactgaacgcgccggagtggccctacaccatactgggcgctgtcgggtccgtcctgtccgggttcatcggccccacgttcgccatcgtgatgagcaacatgatcgaggtgttctactaccggaaccccagcaagatggagagcaagaccagggagtacgtgttcatctacatcggcaccgggctgtacgccgtcgtcgcctacctcgtccagcactacttcttcagcatcatgggcgaaaacctcacaaccagggtgcggaggatgatgctcgccgtgattttgaggaacgatgttgggtggttcgatcaggaggagaacaactcgaaccttgtcgccgctcgcctctccacagacgccgccgatgtgaagtcggccattgccgagcggatatcggtgatcctgcagaacatgacgtccctgctcgtgtccttcgtggtgggcttcatcattgaatggcgggtcgccctcctcatcctcgtcaccttccctctcctcgtgctcgccaactttgcccagcaactgtcgatgaagggcttcgcgggcgacacggccaaggcccacgccaagacgagcatgatcgccggggagggcgtgagcaacatccggacggtggcggcgttcaacgcgcaggacaagatcctgtccctcttctgcagcgagctgcgcgtgccgcagatgcacagcctgcgccgcagccagatctccggcgcgctcttcggcctctcccagctctccctgtacgcgtccgaggcgctcatcctgtggttcggcgcgcacctggtccgcacccacgtgtccaccttctccaaggtcatcaaggtgttcgtggtcctggtgatcacagccaactccgtggccgagaccgtcagcctggcgccggagatcgtgcgcggcggcgagtccatccgctccgtgttctccgtgctcaacagccggacccgcatcgacccggacgacccggacgcggagcaggtggagtcggtgcgcggcgagatcgacttccggcacgtggacttcgcgtacccgacgcggcccgacgtgatggtgttcaaggacctgagcctgaggatccgggccgggcagagccaggcgctggttggggcgagcgggtccggcaagagcaccgtcatcgccctcgtcgagcgcttctacgacccgctcgccgggaaggtgatgatcgacggcaaggacatccggcgcctgaacctcaagtccctgcgcctcaggatcgggctggtgcagcaggagcccgtgctgttcgccaccagcatcctggagaacatcgcctacggcagggacggcgcgacggaggaggaggtcgtggaggcggccaaggtggccaacgtgcacggcttcgtcagcgcgctccccgacgggtacaggacgcccgtgggcgagcgcggggtgcagctgtccggcggccagaagcagcgcatcgccatcgcgcgcgcggtgctcaaggaccccgccgtgctgctgctggacgaggccaccagcgcgctggacgccgagtccgagtgcgtgctgcaggaggcgctggagcgcatcatgaagggccgcaccgccgtgctggtggcgcaccgcctgtccaccatccgcggcgtcgactccatcgccgtggtgcaggacggccgcgtggtggagcagggcagccacggggacctcgtgtcccgccccgacggcgcatactcgcggctgctgcagctgcagctacaccatggctgatcctgcgcctggaatagatactggagggcgcacggccggtgtagatactggagggcggtgttagcgtggcgtggctcaaccgtggccggagaagacgtgttttgatgtgaacgatcaggattgtgccgacaaacaagtgatgccgtattcttcttgcactcctgccggctctgccaatgtttagatcatcccctcctagtaattctcacacctttttttttcttcctttgagaagatcctagtaattctcagatggacccaattgtttgatgtgtaacggtcagaagccagggttcgtctttgctacttgtctaggagttgttgcctctaataattggcttcaaaccttacgaagggatctgcttgaaacagccttgcagttgcagcagccacggagagcgtcactggatctgggtgtccgctgccgccgacatctctagcggagtaacgagaaagcctttggatcgatccataattcgtgcaggctgctttgtaagcacgttatacagcttaaacctctatagtaatatttcgtgcaggtaccttatgttgcta

SEQ ID NO: 100698 - DNA, 4579 bp, Zea Mays
tacggcgacagtggtgctcgcctgttgtataaaagaacaaggcgaacagcgggtgctgctcgaggaggaagaagaggagcggcttttgagctctgaggtctcggtcaccgcccccccaccccaccaccaccaccaccactgggtttttagatccaatgccaaggccgtgaggaagctagctcttgcgtcgtgaggaagagccgaccagagaagctaggagcgcgtggcaatggcggagggcgatgcgggaaaggcggaggcggggagctgcagcgccgccgccgcctccggcgccggcgggtgcgacgcggtcaagaagcggccggagcagagcgtggcgttccacgagctgttcggcttcgcggacccgctggactggctgctcatggctgcggggagcgcgggcgccgtggtgcacggcgccgctatgccggtcttcttcctcctcttcggcgagctcgtcaacggcttcggcaagaaccagcacaacctccgccgcatgacggacgaggtgtccaagtattcgctctacttcgtctacctcggcctcgtcgtctgcgcctcgtcgtacctagagatcgcgtgctggatgtacacgggcgagcggcaggtgggcgcgctgcggaggcggtacctcgaggccgtgctgcggcaggacgtgggcttcttcgacaccgacgcgcgtaccggcgacgtcgtcttcagcgtctctaccgatacgctcctcgtgcaggacgccattggcgagaaggtcggcaacttcatccactacctcgcgacgttcctggccgggctggtcgtcgggttcgtctcggcgtggcggctggcgctgctcagcatcgccgtcatccccggcatcgccttcgccggcgggctgtacgcgtacacgctcactggcctgacctccaagagccgggactcgtacgccaacgccggaatcatagccgagcaggccattgcccaggtgaggactgtctactcctatgtgggtgagaccaaggccctgaattcctactcggaggcgattcagaacaccctgaagctgggttacaaggccgggatggccaaggggcttggcatcggctgcacctatggaatcgcctgtatgtcatgggcgctggtgttctggtacgccggcgtgttcatacggaacggccagacagacggtgggaaggccttcactgcgattttctcagcaatcgtcggtggcctgagcctggggcagtcgttttcgaaccttggagcgttcagcaaagggaagattgccggctacaagctgctggaagtgataaggcagaggccaacgatagttcaggacacggcagacgggaggtgcctcgacgaagtgcatggcaacatagagttcaaggaagtggccttcagctacccttcccgcccggacgtcatgattttccgagacttctccctcttcttccccgctgggaagaccgcggccgtcgtcggaggcagcgggtctgggaagagcacggttgttgctctcattgagcggttctacgatcctaatcaggggcaagttttactcgacaatgtggacatcaagacgctgcaattgaagtggcttagggaccagattggcttggtgaatcaggaacccgcacttttcgcgactacgattcttgagaacattctttatggcaagcctgatgcgacaatggcggaggtcgaggctgcggctacttcagctaatgcccatagcttcattgctctccttcctaatggctacaacactcatgtgggagatagggggcttcagctctccggtggtcagaagcaacgcatcgccatcgcccgcgcgatgctgaagaacccgaagctcctgctactagacgaggccaccagcgcactcgacgctggttcggagagcatcgtccaagaagccctcgaccggttgatggtcggcaggaccaccgtcgtggttgcccacaggctatcgaccataaggtgtgtcgacatgatcgcggtgatccagcaaggccaggtcgtggagactggcactcacgacgaactcctcgccaaaggaagctcgggagcgtacgccgcgctcatcaggttccaggagaccgccaggaaccgcgcgtgcccgtcgacccgcaagtccaggtcgtcccgtctgagcaactccctctccacccggtcgctgagcctcaggtcggggagcctgaggaacctgagctactcgtacagcaccggcgccgacggccgcatcgagatggtttccaacgccgacaacgaccgcaagtacccggcgccgaggggctacttcttcaagctcctgaaactgaacgcgccggagtggccctacaccatactgggcgctgtcgggtccgtcctgtccgggttcatcggccccacgttcgccatcgtgatgagcaacatgatcgaggtgttctactaccggaaccccagcaagatggagagcaagaccagggagtacgtgttcatctacatcggcaccgggctgtacgccgtcgtcgcctacctcgtccagcactacttcttcagcatcatgggcgaaaacctcacaaccagggtgcggaggatgatgctcgccgtgattttgaggaacgatgttgggtggttcgatcaggaggagaacaactcgaaccttgtcgccgctcgcctctccacagacgccgccgatgtgaagtcggccattgccgagcggatatcggtgatcctgcagaacatgacgtccctgctcgtgtccttcgtggtgggcttcatcattgaatggcgggtcgccctcctcatcctcgtcaccttccctctcctcgtgctcgccaactttgcccagcaactgtcgatgaagggcttcgcgggcgacacggccaaggcccacgccaagacgagcatgatcgccggggagggcgtgagcaacatccggacggtggcggcgttcaacgcgcaggacaagatcctgtccctcttctgcagcgagctgcgcgtgccgcagatgcacagcctgcgccgcagccagatctccggcgcgctcttcggcctctcccagctctccctgtacgcgtccgaggcgctcatcctgtggttcggcgcgcacctggtccgcacccacgtgtccaccttctccaaggtcatcaaggtgttcgtggtcctggtgatcacagccaactccgtggccgagaccgtcagcctggcgccggagatcgtgcgcggcggcgagtccatccgctccgtgttctccgtgctcaacagccggacccgcatcgacccggacgacccggacgcggagcaggtggagtcggtgcgcggcgagatcgacttccggcacgtggacttcgcgtacccgacgcggcccgacgtgatggtgttcaaggacctgagcctgaggatccgggccgggcagagccaggcgctggttggggcgagcgggtccggcaagagcaccgtcatcgccctcgtcgagcgcttctacgacccgctcgccgggaaggtgatgatcgacggcaaggacatccggcgcctgaacctcaagtccctgcgcctcaggatcgggctggtgcagcaggagcccgtgctgttcgccaccagcatcctggagaacatcgcctacggcagggacggcgcgacggaggaggaggtcgtggaggcggccaaggtggccaacgtgcacggcttcgtcagcgcgctccccgacgggtacaggacgcccgtgggcgagcgcggggtgcagctgtccggcggccagaagcagcgcatcgccatcgcgcgcgcggtgctcaaggaccccgccgtgctgctgctggacgaggccaccagcgcgctggacgccgagtccgagtgcgtgctgcaggaggcgctggagcgcatcatgaagggccgcaccgccgtgctggtggcgcaccgcctgtccaccatccgcggcgtcgactccatcgccgtggtgcaggacggccgcgtggtggagcagggcagccacggggacctcgtgtcccgccccgacggcgcatactcgcggctgctgcagctgcagctacaccatggctgatcctgcgcctggaatagatactggagggcgcacggccggtgtagatactggagggcggtgttagcgtggcgtggctcaaccgtggccggagaagacgtgttttgatgtgaacgatcaggattgtgccgacaaacaagtgatgccgtattcttcttgcactcctgccggctctgccaatgtttagatcatcccctcctagtaattctcacacctttttttttcttcctttgagaagatcctagtaattctcagatggacccaattgtttgatgtgtaacggtcagaagccagggttcgtctttgctacttgtctaggagttgttgcctctaataattggcttcaaaccttacgaagggatctgcttgaaacagccttgcagttgcagcagccacggagagcgtcactggatctgggtgtccgctgccgccgacatctctagcggagtaacgagaaagcctttggatcgatccataattcgtgcaggctgctttgtaagcacgttatacagcttaaacctctatagtaatatttcgtgcaggtaccttatgttgcta

SEQ ID NO: 100699 - DNA, 348 bp, Zea Mays
atgggaggggctatccatggcaacaagagagggggctggcgtccacaccatgggaaggagcagggagggcgctggacagagggcaggggcgagctccagggagtggcgtcggccaccaggaaacagaagcaggggtgcgcgctgggatggatgttgagcagatcttggaagccatggaaggagaggccgtcggccatggggagggatgagggagggacggccatgggggaggagcagaagatgaccggcaagctggagcacctcgtgcgcagagacagggaaaaggggcagcgcgccaggctgaggaatcgagggcgccgacatgccgcagtagggggagggcacgac

SEQ ID NO: 100700 - DNA, 1565 bp, Zea Mays
ggaacgggcacggactttgtggccacgaagcggcccattctcccagagtcaagtccaatttcaacgcaaaactcagacaagttttctttcttctctcccaagtcccaatccacaaaaactgtctacgggcccacgtgccatgacacagacccgccgcttccgaccttcttatctcgcaagaaatgggcggacctaacgcgcaagcgcaataaaacccctgcaaaaacccgccactctcagatccgcacagcgacgccgccagccagacccgatcccctccctcgctagggttttcgtccccgcgccgccgcgctcccggatcccaccgaaacaaccatggccggcggtcccgcggcggtgtcgttcctgaccaacatcgcgaaggtggctgcggggctcggagccgcggcctcgctcgcctccgcgtcgctctacaccgtcgacggcggcgagcgcgccgtcatcttcgaccgtttccgcggggtgctcccggagaccgtcggcgagggcacccatttcctcgtgccctggctgcagaagcccttcatcttcgacatccgcacgcgcccgcacaacttctcctccaactcggggaccaaggacctgcagatggtcaacctcacgctccgtctcctctcccgccccgacgtccagcacctccccaccatcttcacctccctcggactcgagtacgacgacaaagtgctcccctccatcggcaacgaggtgctcaaggccgtcgtcgcccagttcaatgccgaccagctcctcaccgaccgcccccacgtctccgccctcgtccgcgacgctctcatccgccgcgcccgcgagttcaacatcatcctcgacgacgtcgccatcacccacctctcctatggtatcgagttctcgctggccgttgagaagaagcaggtcgcgcagcaggaggccgagcgctccaagttcctcgtcgccaaggcggagcaggagaggcgggcggccatcgtgcgcgctgagggagagagcgagtccgcgcgcctcatctctgaggccacggcgatggctgggacagggctgatcgagctcaggaggatcgaggcggccaaggagattgccgcagagctggctcgctcaccgaatgtggcatacattccttctggggaaaacggaaagatgctgcttggtctcaatgctactggatttggccggtgattcactgtttttttagtctgcttgtgctatgtgctgatgcatgactaaaacggaggttcgaactttgaaggacagtgatatctgctatccttgcttatgttaagttttccttgtcttggaactaaatgtgtctgttgtgctccaaataagttttggtttttgactgcatatttgcaattggtagggttaatgcgacattgtgttaagcctgcatagtgcattctaattttcccttacattgcattctcatgttaaaattcattgatatctaacattgctggaatagtagatctgtttcggtccccttcatatattatttttgcatgatgatttgtgttgttaataatcttctggatattgtttatttatgttgt

SEQ ID NO: 100701 - DNA, 223 bp, Zea Mays
atgtagcgagatgaggggacacggtgagcaggtacgagatgggcctgatctcctcatacttcaccgccctctccctggtggtcacatccattctgaggctataggtcaccactccgacagccattgcaatggaagccccactgcttgtctgacaaactgaagaaaccggtgagtgtagatgtcgatcgggttggaagaaagaagaaagaaatgtgcatcctct

SEQ ID NO: 100702 - DNA, 1671 bp, Zea Mays
atgctgcggcagatgatcgctgaccggaggtcctctggctgcgcccgagacgacatgctggacgcgctgctcagcggcaacgagggtaccagggcgaagctcagcgacgaccagatcatcgaccttctcatcaccctcatatactctgggtacgagactgtgtcgaccacctcgatgaaggcggaagtacctgtccgacaaccccaaagctctcgacagataaggaaagagcaccttgacatcaggaaggctaagtcgccagaggatccccttgactggaacgattacaagtccatgaccttcaccaaagctattgagcttcccttacattctacagatgccagtggaagctccacgatgtatatggtagtgggggaggaaggagattattataaccgtgggatgaggcatggttccctgacgctaggcgtggttgaagctctggacgccacgagggccactgcagtcactgccgaggaagcgcgcactaccgccaaggagatggagaagaaggccgccactactgcaaagctagccgccatcgctatggacaagaggagacggggaagaagaaaacctcgcgcgggggaggcgcgagaggaatcgcgggggccggaggagcagcaaccggtggaggtggcgtgcgcggtggctgtccgagggaaatcgagccataatggagcgatcataggaggcattgtgggaggtgtagccttcatgtttcttgttgggctgctcactttcttattggtacggcgttctagaaagacaaagcctcgcagaggagatatacttggagcaacagaattacaaggcccaacaagtttccactacaatgatcttaaggctgcaaccaataatttcaatgagaaaagtaaactcggtgaaggaggttttggagatgtatataagcgtccattgcaaggaagatctaccagaggcaagacattggtgtgggtggctttcagaagatttacggtggctgcacctcaagcgcttcagcaaggtggaaagcgccaacaagtacgagaccttgctggaggtggtttaggtgatgaccgacctgaagctgatcatcaagcaggcctacatttcctccgacgacgagtgcttcatgaacgctctttttttggatttattcagagctctaaagaaaagcattctacacccaagtatgggctcatctaccatgcatcctcaattgggaaggcttctcaaaagcataatggaaaaaatctcggtctctatctgcaaaagctgctcttgctatccgataggatgcccttggtgttgatgaggacaactccattggcactaagagtcgactcaagatggccttgtgacatgttactactgaacaacttgagacacagcttcaaattattgaaggatcaacaaacgatctgccaacggtggattccatgcttagaaatagttgtaccgttaggattaatatatggttcagactttgagaatccagacttgaacctagaagttttgtgtgctcacaatctcacattgcatgagcaggtcgtgacggttgggctggagagcacgctggtagcggaggacctcaacgactgtgcctttgtctatggcttccttagcttcctggacaagatctcttgcgtaatcatcctatttgtcttggaattgtacggagctaagtga

SEQ ID NO: 100703 - DNA, 1161 bp, Zea Mays
gacatggagtagtatataaagacaagaggcggaggagattcaggattcagaacgcactagcagttccacgcggcgttccacttccacccgaaaccccaatcaagcgtgcactgcatctgcgtagcccgttcaccacgcacgcgcttccctccctaccgggcgatctatggacggcgacggcgcgacgtgggggcagccgatgctggagaagcggccgagccaccgggagcggcatttcacggcgggggaagtggtgcgggacgtcatcatgggggtgtccgacggcctcaccgtgcccttcgccctcgccgcggggctctccggcgccagcgcgccctcctcgctcgtcctcaccgccggcctcgccgaggtcgccgccggcgccatctccatgggactcggagggtaccttgcggcccagagcgaggcggaccactacaagcgggagatgagaagggagcaggaggagatcatcaccgtcccagacaccgaggccgctgagattggagagatcatgtcacggtatgggctcgagccgcaggagtacggccctgtcgtcgccgggctcaggcggaaccctcaagcttggctagacttcatgatgaggttcgagctgggactggagagaccggatcccagaagggctctgcagagcgccttcacgatcgcactgtcctacgtggtcggcgggctggtccctctcctgccctacgtgctcgtctccgccgcgcaggatgccatgctcacatccgtcggagtcacgctggccgcgctgcttttcttcggctacgtcaagggccgcttcacggggaaccggccgttcgccagtgccgtccagaccgctgtcattggagcgctcgcttcggcggcggcgtacgggatggcgaaggctgttcaggcgaggtagttgtttgttggtgaggcggcgtcaggcgttttgggaaccagggctgcggtaaaactgaagaaagctgcatacttctgatcctttggggacttctcgttacagtgttaatcgcgggatctaatgctagtctactcttttgaataaatctagggaaggagataatcatagataaaatatatcttcgcctcactttggttaatgtaaagactctgaactacatattcaatcattattacaagccaattgagactgct

SEQ ID NO: 100704 - DNA, 1303 bp, Zea Mays
gacatggagtagtatataaagacaagaggcggaggagattcaggattcagaacgcactagcagttccacgcggcgttccacttccacccgaaaccccaatcaagcgtgcactgcatctgcgtagcccgttcaccacgcacgcgcttccctccctaccgggcgatctatggacggcgacggcgcgacgtgggggcagccgatgctggagaagcggccgagccaccgggagcggcatttcacggcgggggaagtggtgcgggacgtcatcatgggggtgtccgacggcctcaccgtgcccttcgccctcgccgcggggctctccggcgccagcgcgccctcctcgctcgtcctcaccgccggcctcgccgaggtcgccgccggcgccatctccatgggactcggagggtaactgctcgatcaaactcttgtccacaatcgtcgcgactgatgtaagcggtagctaccagcgacttccgtttgtccttttacgctatctctggcaatgagattttacgatttcataaactcatctgtgtggcaaacagtgagttagttattgttagcagaaacggcaagaaaaaacgaagtagatcagccaacaaatcatagagcacgacacataaatttacgtggaaaaccttcaacgtgaagggaaaaatcacgggcaccagtcaaacgaaaacttcactatatgtggagtatttacggaacgtcgtccgtagacggcgactcacaagaggagtaaatgatgacgcgctgcaaactctaattaggatcactaacttcggcctaagcctcccgacgacgggcctccactgtactcgccaacacggtctccatatgcagaattttggatcatgttcatgagaaaaaaaaactcaattcatgtagtttattcgggtagtcagttcggtagttcatgttcgatgacagagatagctcttttgtaaacttaattagtttgagatcgttcttcagtgaagcgttcaaatccagtggcacctcacagccatagcgatcactaaggccttgttcagttattgctatgccacatggattcgatgagattgaaaaatagtagatattttgacttgcaatagaaccacccaattatcttcaatttaggacttttcggttattcctaaaccttatggatttgaaggctttagataaaattatgaaggatttaaacttgtggtatgaattaaaaccaactcaatctcctacaattcataagggtttttgataaaaatcgaacaaaccctcacatagaatgagataaaaacgaacaaaccctaaggtg

SEQ ID NO: 100705 - DNA, 1587 bp, Zea Mays
gccacaggacgaccattctgttcccgtgttccggacgcgaacgcgaacgcatgcactggcacgggcacggcggcggcgcgagcgtgatgtggaaaacgggcgaaacgcggcccagctcgatctgcggcgcgcgggcggactggtaatccatccaccgtttcactctctcttccttctcctctggataaagatccagatattagtttactactactgctactccgtacgtcaagagaatttacccaaatactccgatctataaaaaaagtctatatatagattatagagaggcaaacaaacctcgcccactccaacacgtgacaccccgcgcgcgcgcctccgccgcacgcccccactctctcaccgccaccgccgagatggccgcctgctcccacctcgccgccgcgggtggctcttcccctgccgccgccgcagtggttcgttccccggcgcattcctcagccgccgccgccttcgcgcgcctccggtcgacgctgcgtttctcgagcgccggcctgtcggttaagggaagcagggcgactttcccgtgggtcgccgccgcggggccggccgcggcggcgccggtggccgacctggacggccgcccagccacggagaagcagcccatcattgtcatcgataactacgacagcttcacctacaacctctgccagtatatgggggagcttggattgaacttcgaagtataccgcaatgatgaactgaccatagaagatgtaaagaggaagaacccaagaggaatacttatttctccagggcctggtgaaccacaagattcagggatatcattgcagactgttcttgaattaggcccaaccatcccaattttcggagtttgcatgggcctgcagtgcattggggaggcatttggaggaaagattatccgtgctccttctggagtgatgcatgggaaaagctctccagtttattacgacgaggaattaggaaaggcattattcaatggcttgccaaacccttttacagcggcgaggtaccacagcttagtcattgagaaagaaaccttcccacatgatgctttggaggctaccgcatggactgaagatggactcatcatggctgctcgccacaagaagtacaaacacatccagggtgtccagttccatccggagagcatcatcacccctgaaggcaagaaaatcatcctcaactttgtcagattcattgaggagctggagaagcagcgttcctaatctaggggaggtatatgcgaatgcgacgggtggtttcatagatcaggcggaagcagagacataagccactgcgaagttccggcactggcagtggaagtttagctaggaatcaacgtttccctctcataattcgttgtgctcgtggtaacataatctgtgtggaccgaatgtcgaataaagtccaggcgtccagctgataaaataagcaccggtgttggttcctctaggtggatatatatatccggtaattttcggcaaggggaggcctcggcacatttttgtctgagttccggcggtagcaagaccggccgtaatagcgttagaccttgttcgacataagtttatgtcggattac

SEQ ID NO: 100706 - DNA, 106 bp, Zea Mays
catatctttggtttgtttgttaaaaaatggaatatcaattgttgtgttattaaaataccttcgtatatatcatccttctttattatatatacattttgatttgatg

SEQ ID NO: 100707 - DNA, 2945 bp, Zea Mays
attcaaacgcgcgatcaaatgtcgccgacccaagccgcgacgcctctggccatcctctcccgcttcctctcgtcgccgccgtccccctcgccggtgctcgagttacttcgcgtccacgcgctcgccgttacctcgggcctctaccaacgccccgacctcgcagcaaagctcgtctccgcctactcctccgcggggcgccccgggctcgcggcgctcgccttctcggcttccccccgtcccgatgcattcctctggaactccctcatccgcacccaccactgcgcatccgacttcgtggccgcgctttctgcccaccgccgcatgctcgcctctggcgcgcggccttcccccttcaccgcgccgctcgctgcctccgcctccgcagagctcggcgcgctcggcgtcggcgccgccgtgcacgcgtactgcgtcaggtacggcctcctcgtcggcgatggagactccgtcgccgtcgcatcctctctggtgtacatgtacgctaggtgcggcaacgtcagagacgctgtgaaggtgttcgaggaaatgcccgagagggacgtggtcgcgtggaccgcggtgatatcagggtgcgtgcggaacggggagagtggggaggggttgcgctatctggtggagatggtcaggcttgcaggcgatggcagtgtcaggccaaactcacggacgatggagagtggcttggaggcatgcggggtgctagatgagctgaattctggtagatgcctgcacggctatgtagtgaaagtcgggattggagattcccccatggtaatttctgccctcttctctatgtactcgaagtgttacagcactgaggatgcatgcgctttattcctggagttgccagagaaagatgtggtttcctggacaagtttgattggaatatactgtcggagagggcttattacggaggctatggagttgttccagcagatgatggagtcaggtctccagccagatgagattctcgttagttgtgtgctttcagggttgggtaacaatggcaatgtacacggagggaagacatttcatgcagttataacgaagagaaactttggagatagtgttttgattggaaatgctttgatatcaatgtatggaaaatttgagatggtggacagtgcaggcagagtttttagattgttgcatcaaagagatgcggactcatggaacttgatggttgtaggatattgcaaagctggatgtgatgtcaaatgcttggagctgtatcgtgagatgcagttgagagataagtatgaattttggtgtgttgccgacagcttggtttctgcaatctcttcttgctcacggctagcagaactaagactaggtcgatcagcacactgttattcaatcaagcacttgcttgatgaggattcatcagttgcaaatgttttaattggcatgtatgggaggtgcggaaaatttgatcatgcatgcaaaatatttggcctggccaaactgaagggtgatgttgtcacatggaatacactgatatctagctatgcccatctgggacattcaaatgctgcgatgtcactttatgatcaaatgcttattgaaggcttgacacccaactcaacaaccttgattactgtcatttcagcctgtgcaaacttggttgcattggaacgtggagagaagatacattcttacgtgaaagaaatggggtgggactatgatgtatcaatcaacacagcacttattgacatgtatgctaaatgtgggcagcttggaattgcaagaaggatttttgattctatgcttcaacatgatgttgttgcatggaatgttatgatatcagggtatgggatgcatggggaagcaaaacaagcattagaattatttggtaagatggaaggaggaagtattaagcctaatggtgtaacctttcttgctattctatctgctttatgccattcagggcttcttgaggagggcaggaaggtgttcacaagaatgggaaaatactcacttgagcctaacctgaagcattatgcttgcatggtggatctcctagggaaatctgggcatctccaagaagcagaagatatggttttagccatgccaatagaacctgatggcgggatatggggaactttgcttagtgcctgcaaattgcatgacaactttgagatgggtttaaggattgcaaaaaaggcatttgcttctgacccagaaaatgagggatattacattttaatatctaattcttatggtggtgctaaaaaatgggatgagatagagaaactaagagaaacgatgaagaatcttggagttcaaaaaggtgtaggctggagtgcagttgattatggcgtgtgacttcaatttcagttatgctctttcaatatacttatattttttgcaaaacagatagtgatcttgtagacagaagtacaaatttgctgatggatgaaactatttgtttgttagcgcgaatcttaggtaactgcttggaagatttgggcaaatggatgatttgaatgccatgaagtaagattgtccggatttggggccaaatggctaactgcctcggaagtaatatatgtgaatgattacatcgtagaagttataaggccataaatcaggtgaccgtgccgtttggagaacacacaaactgctaatttaaatagaagtggaaattgctcggttatagacttgaagttgtgatcatgcacataatagaactgtgcaccaggctggctatagatgaaggctgaatcgaagcagcaccactggtctattggccatgatcatagtgtcagtgtcaatattgcagttttctgtaagaactgatggctacatttttgccatgattgtggtgccagtatcactattgcggtcttcaagaagtatggagctagtattatgttgctacagttgacttttgtcaattgcaaaagaatgatacatatctgaaattgtgt

SEQ ID NO: 100708 - DNA, 2085 bp, Zea Mays
tgtttgatcgatcgattgcaatttgcaaagcacggcgagcggaggccagatcaaaaagtagcacggcgcagcgagccagcgatataccacatgacacatgtccacacccctctgcgttcggtcaccaaacagtcagcgcagggcagggcagcctgaaagaaagcggcggcggcagcaggtcactggctcactgctctgtcctctcgtctccagagttcagaccaccgcatcgccatggcgccgccgcagacgatcccccggcgcggcctcttcattggcggggcctggagggagccgtgcctcgggcgccgcctgcccgtcgtcaacccggccaccgaggccaccatcggcgacatcccggcgggcacggcggaggacgtggagatcgcggtcgccgcggcgcgggacgcgttctcccgcgacggcgggaggcactggtcgcgcgcccctggggccgtgcgcgccaacttcctccgggcgatcgccgccaagattaaagacaggaaatctgagctggctttgctggagacacttgattctggaaagcctctggatgaagcaagtggagacatggacgatgtcgctgcatgctttgagtactatgctgatctggcagaagctttagatgggaagcaacagtcaccgatctctctgcctatggaaaactttaagtcgtatgtacttaaagaacccattggggttgttggactgatcactccttggaattatcctctgttgatggcaacttggaaggtcgcacctgccttggctgctgggtgtacaactatattaaaaccttcagagttggcttctgtgagctgcttagagcttggtgcaatatgtatggaaataggcctaccaccaggtgtcttgaacataattactggtctgggccctgaagctggtgctccattatcctcacattcccatgtggataaggttgcttttactggaagtacagagactggtaagaggataatgatttcagctgcccaaatggttaagcctgtttcattagagcttggtgggaaaagtcctcttattgtctttgatgacattggtgacattgacaaagctgttgaatggaccatgtttgggatcttcgcgaatgctggtcaagtctgcagtgctacttctcgtttactgctgcatgagaaaattgcaaagaaattcttggatagattggttgcatgggcaaagaatataaaagtctcagatccactggaggaaggctgcagactgggttcagttatcagtgaaggacagtacgagaagataaagaaattcatctcgactgcaagaagtgaaggtgccacaattctgtatggaggtggccgaccacagcatctcagaagagggttctttcttgaacctacaattataacagatgttagtacgtcaatgcaaatttggcaagaggaagtctttggaccagttatctgtgttaaggagtttaggacagagagtgaagctgtggaacttgcaaatgatactcactatggtttagctggtgccgtgatctccaatgatcaggagaggtgcgagcgcatttcaaaggctcttcactctggtattatttggataaattgctcgcaaccatgcttcgtccaagctccttggggagggaacaagcggagcggttttggtcgggagctcggagaatggggtcttgataactacctgacagttaagcaagtcaccaagtattgctcggatgaaccgtggggatggtaccagcctccatctaagctgtgaaggggcattcactccagggaatgtaatgcatcattaactgacagcatcagtcctgttaatggacaggagctcgtgtacagtacagtgctcgtaaaaaaagctctttgatggtaaagttgcttgctgctatcactactccagaccagaattcaggactggagagtacgatgtcatgagttgtactacttgttagtctgcactcttatcattcgaagtttggcagtggtgtgtagttgcacttggaagattgcaataataataaagataattggataattgatccattttaatcatatttcttaaaaaaagctgaataagctctggagtttc

SEQ ID NO: 100709 - DNA, 536 bp, Zea Mays
taattatgctgcgacttgcgagtcgcgcttcaatttgaaggaagcggccatggcaacacgaaatatcgtaacaccaatattaaaaatgaaaaatagtgatgcaatggttggttataaccagacatacataaccatcgattcggcgctctgccgtaaatcagaaagcatacttcagttcctagatgaattataaactcctgtgctcccaacgaggcaccagatgctactgtaagtaaccatgaatgagaatgatgcaccagagcagtatctgataacatgatcaaccataatattacggttttcagaagatgcagtacgatgcatccgagctccccaggttgccagccgaagcatttacatcttctgcatgataacagagtttgcaagcccagcttgctccacggtctgcgttgggtcagccagctgcttgggagggaaacccgtctgcagctgataaggccttgcagctccaggccgagctgcgtctataaaggacctgatgtctcccacggtgtggtgcatgttgaaccgggcga

SEQ ID NO: 100710 - DNA, 2328 bp, Zea Mays
ctagaaagaagaccagcaagcaggtcgcgcgagcccaataaaccaagatagtgagatgtgcctccatcataccacaccatgtgatgcgaggagcctcttctgcctctcatccccctacttccaagatgcaatcatgctgccccagactcctcgggcccctcggtcaccatgattgcctcaccgcctctcaggagtctcctccacctacttccaagaggaagaggccggagaagctatagtccatgaggaaattaagcggaggggcggcggccggtgtacgaggggccggaggaggaggagagagaaggggaggtggcagaaaaagctagagagagagagagagagagagagagagacagagatgcatggtgcatggcatgatgatggcgtggttgatctattcgatccagtactacttctgtcattcgagtcaagaagccatcatcagatcggtgcagttctccctcctccttccagctcctcttcagcttctttgtaacactgcgcccgccatggctttggggaatcaagcgtcttggtccgaaatccttctttcctagctaggatctacgtacttgtgcaagagtatgtatgttatccctgcatgttcttattctgtctctatatatggtttatgcagacagagcaagattcgttcgtcttgattgatttgtttccatcactctttgattcagagtttgattcatgtaatattttgttagttatgtggatttcttctttgagctttttctatagctgaggaacctcgttcagagatcagtttgacgcaatgtgttgcatgattggtctatgatccgaatatatatggccataactgtcccagctgtcttctagagagataagctgatcacatagtgttagatcagatgaacaacatgaaatatatatatatatatctgcatcttctagcttcgatccatatataccttcccttgatctattcttatggaacgtgctttatttctaagcagttgtaagtttagctttaccttagtatgtgtgtcttgtttttgtgaggagaagaagaaggcgaacctaattagattcattacgtgcatgctagtagagaagaagtgaagctaattaattagattcaataaatacatgcatgctagtgctatagctatactgcatgcatgcaacatattaactaaagcccaaccgtattcacgaatcacgagcttgagaaagaccaacagcctgctaaacaagattctttgactgctacaaatctctcttgggcattgcatactattagtatctgtactgtgagaggtgcaggtgcagctctggtgccaagctaaagctagctctgctgctgctagattgtcatgctatcgtattggcccagttagctgagaggcagcccttctagcgtcacatgatacatgcacgcacctctgtctatgcagtgttagtttcattattaatgtaggatcctacttatctctctcatagagtttcttagttcttgtagctaaggcagctgtaagcttacagttcatttattatctctctcatctacctcaacatttagctagcttataaacttttatcatatacttgcttccgttctaatcgatctcttttcctatgcaacaacccccaatgtgaggatattatgtttacagctaaaattaaagagaaaaccattgaagagtataaatatgcgtgatttatattatattacctgtcatttcaattcattatgaccaactcatgtataatctcaaatactatgtgtgtcatttcgttattaaggattcgtgtataatctcaagtaattgttcggttaatgtttcctaaaggaatatttgtccagtttaagagccggggcttcatcgtttttatctacttgggctacactgcccctactggtaccgagcttgttagtaaacaatgggaaagtgttttttattttgtactgaagaacaataccagctagcaggtcacttattttgtttcaggatgaagaacttctagcagttaggaaatcaacttggatctagtgtcattataaaatacttttttctactagctagaatgtgattttctttgtttagaataggatgcaaaatactaaatggctggaaaatatgtatcctcgtagtcgtagtgatttggtctggttctttaacttttacctagagatgttgtgcacccctgttgtacggatacgatatggaggagattcatctggacaactacttttggtagaacgagctgtggttgaagcataacatttttgtttgtttttctccatatgtatacactattattgacctttattactaaatgtgtttgatt

SEQ ID NO: 100711 - DNA, 3526 bp, Zea Mays
aatctccaggcacatcgccttcctccgtctcccacctcccgacgcttatcctcctccccaccgtcgagcaggccagcgcttagttaaacccgccttctccctccactaccttccccacccaaatgctcctctcattctccccgcacttttctcctctcctcatctccttgccctcgacttccgcctgcaaaccccacgcccgcctccgtcccgtccacgcctccgcctcagcgtccacctcgccggagctgctcggcaagtccgcgctccgccgcatctccgacaagctccgtagcctcggctacctcgagaccgtctccgagccccccactccggccccgaacaagagcggggacgccccctcccccggcgagatattcgtgcccaccccggcccagcttccgcgccaccgcgtcggctccaccctagacccgagctgggccacgggcgacggtgaggctagctccacctcgcggcagcggcggaggggccgcgggcgcgatgcgtcggggtcaccttcggcgccgccgtccgcggcggagttggcgctaccgcgggacgaactgcgacggctgcaggggatcggaatcagggtgaggaagcggcttaaggtggggaaggcgggcatcaccgaggggatcgtaaatgggatacacgagcggtggcggaacgcggaagtcgtgaagctcaggtgcgaggatgtctgggctatgaacatgaggcgcacacacgagattctcgagaggaaaactggaggcttggtcatttggagatctgggagtaccatcatattgtacagaggaaccaactatacgtatccttacttccatcacagcgaaagggtggatagttttctcgacaaagaatcatcagatcagagcaattctggggacgaggatgagactagttcacagcatggtagcagtcatgagaagagtagtgagaatcctgttgtagcatgcgcagaacagattcatgttggagaggggaacagtcagactatagaatatttgaatcagagcttaagcagagagaaagatacaaatcacccggtatcatctatcaaacggcttgtttttgatgcagatgagggaaatttagacattagagctggaaatccaaacgagcagcatgtgagattgcaggaaaacactcatcctgatagtcctaataagtttggtcctagagatcgctcatccttagtggctggtgttggatctcaaaataagtttcgattacagttgcctggggaggtcaaacttgcagaggaagcggataaattactggatgggttgggtccaaggttttctggttggtggggatatgatcctgttccggtggatgctgatctgttgccagctattgtgccaggataccgtaggccttttcgcctgcttccttccggtgtgccgcctaagctaacagacagggaaatgactatccttaggagactagctcatgccttgcccttccactatgcactcggaagaagcagcaaccttcaaggattggctgcatccatgatcaagctatgggaaagatgcgaggtagcaaagattgcactcaagagagatgcacacaacactgacagtgagctcataactgaagaagtaaaggagttgacaggtggaaccctattatcaagggataaggagtcgattgtattctacagagggaaagatttcctccccccagctgtctctctggcaatagaaaaacgcagaaagctgggcagttctacaatctacaaggccaagcctggcattgaagaaagcatgcctactcaaaatgactctgtactgaaggtatcaagtgatgtctcggtacacgttcgtgaagagggaacttctgtcacagagaatagagctgaatctcttaatactgttgcgaaggatgttgaaaccagattatctcaggccatagcagagaaagcaaaagctgaaaaacttattgaagaactagaaaaggcatctccgctttcaaaggctgaagttagagagactatatcagaagatgagaggtacatgttgaggaaagttggattgaagatgaaacaatttctgctgctaggtcggaggggagtttttgacggaactattgaaaatatgcatcttcattggaagtatcgagaacttgtgaagattatatgcaaagaacaccgccttgaagatgtggaatacgctgctcgaactctagaggcagagagtggcggtattttggtggcagtggaaaaagtgagcaaagggcatgctataatagtatataggggaaagaactacaagagaccatcaaaactcaggccaaaaactttgttgagtaaaagggatgctttgaagcgttccctggaaaaccaacgttgtaagtcccttaaggttcatgtacttaagctgtcaaagaacattgactacttgagggatcagatgaattccagctactatcacaaggacatgcatgatcctagtgtcaactctgtaacactacagcagcaagacgaagaaatgcctgaagttgctcccatgagttcagagcctgaggttgagaagtggacatcagttgagattgatagagccttagatttaacaaagtctggagtccctgtggaagatatgcagagcaaagtctgtttcaacaagcttgaagatgattcttctgcgactgcaggtccatgtctgactgggagttcaattgcagcttcatcctataatctgatcagacatcaaaaccaacgtagctctactgtgacatccagtcctgatggtcgctacgaaggtgcaccttcaaaagtcgtggatgcgccaaaattggatgcggaatctctttctgtatcgcctttgagagccgcaccgctctcgaatcaagaaaggcttgtgctaaggaagcaagcccttcaaatgaagaaaagacctgtactttccatagggaggaacaatgccatcaccggagttgcaaaaaccataaaaacgcacttcaagaagcaccctcttgctatcgtgaacatcaagaacagagcggacgggactccgattcagcagctgatatcggaactcgaggaggcgacaggatcggtgctagtgtcacgagaaaccaacaaagtgatcttgtacagaggctggggcgcagaagtggcccagaaaagctcaagggaaagtagcacagacgagggcgaaaaggaggtcatatcacctcagctccttgaagctatcaggttagagtgtggactgctccctgccgattcgggatagttggtccggataaccttcccccacagatcccgtgtttcgaaaggatcgtacaatgattgcccgcggatagatccgaagctgcataaacgcacgcaaggtgtgaaaccctccctgctcacgggcatagttgtaagagaagaacaggggcggcggcaggggtattcttaggtattccatgggatgcccttttttgtgaaagaaaagaatatgtattgtctatactaaaatatttagttctcctagtgttactggctctcgctgttctgggggaaattgttcttgga

SEQ ID NO: 100712 - DNA, 2249 bp, Zea Mays
aatctccaggcacatcgccttcctccgtctcccacctcccgacgcttatcctcctccccaccgtcgagcaggccagcgcttagttaaacccgccttctccctccactaccttccccacccaaatgctcctctcattctccccgcacttttctcctctcctcatctccttgccctcgacttccgcctgcaaaccccacgcccgcctccgtcccgtccacgcctccgcctcagcgtccacctcgccggagctgctcggcaagtccgcgctccgccgcatctccgacaagctccgtagcctcggctacctcgagaccgtctccgagccccccactccggccccgaacaagagcggggacgccccctcccccggcgagatattcgtgcccaccccggcccagcttccgcgccaccgcgtcggctccaccctagacccgagctgggccacgggcgacggtgaggctagctccacctcgcggcagcggcggaggggccgcgggcgcgatgcgtcggggtcaccttcggcgccgccgtccgcggcggagttggcgctaccgcgggacgaactgcgacggctgcaggggatcggaatcagggtgaggaagcggcttaaggtggggaaggcgggcatcaccgaggggatcgtaaatgggatacacgagcggtggcggaacgcggaagtcgtgaagctcaggtgcgaggatgtctgggctatgaacatgaggcgcacacacgagattctcgagaggaaaactggaggcttggtcatttggagatctgggagtaccatcatattgtacagaggaaccaactatacgtatccttacttccatcacagcgaaagggtggatagttttctcgacaaagaatcatcagatcagagcaattctggggacgaggatgagactagttcacagcatggtagcagtcatgagaagagtagtgagaatcctgttgtagcatgcgcagaacagattcatgttggagaggggaacagtcagactatagaatatttgaatcagagcttaagcagagagaaagatacaaatcacccggtatcatctatcaaacggcttgtttttgatgcagatgagggaaatttagacattagagctggaaatccaaacgagcagcatgtgagattgcaggaaaacactcatcctgatagtcctaataagtttggtcctagagatcgctcatccttagtggctggtgttggatctcaaaataagtttcgattacagttgcctggggaggtcaaacttgcagaggaagcggataaattactggatgggttgggtccaaggttttctggttggtggggatatgatcctgttccggtggatgctgatctgttgccagctattgtgccaggataccgtaggccttttcgcctgcttccttccggtgtgccgcctaagctaacagacagggaaatgactatccttaggagactagctcatgccttgcccttccactatgcactcggaagaagcagcaaccttcaaggattggctgcatccatgatcaagctatgggaaagatgcgaggtagcaaagattgcactcaagagagatgcacacaacactgacagtgagctcataactgaagaagtaaaggagttgacaggtggaaccctattatcaagggataaggagtcgattgtattctacagagggaaagatttcctccccccagctgtctctctggcaatagaaaaacgcagaaagctgggcagttctacaatctacaaggccaagcctggcattgaagaaagcatgcctactcaaaatgactctgtactgaaggtatcaagtgatgtctcggtacacgttcgtgaagagggaacttctgtcacagagaatagagctgaatctcttaatactgttgcgaaggatgttgaaaccagattatctcaggccatagcagagaaagcaaaagctgaaaaacttattgaagaactagaaaaggcatctccgctttcaaaggctgaagttagagagactatatcagaagatgagaggtacatgttgaggaaagttggattgaagatgaaacaatttctgctgctaggtggacattctcctcaacctttccctgaacggttttgttccaaagataaccattttgttttagaaaacagaaacttgctgccgcctttgtgtacctaacaattaaattgtctgtttcttacctttatctggatttatcagattgaaatgtgaatcatctgggaaacttctttcatgcca

SEQ ID NO: 100713 - DNA, 123 bp, Zea Mays
gctcggttgctcgagggcttaattcaatgttgaagcaacccttggtagtaccccttattcgaccaggaggtcagtttcaaaaaattgatcaccctaatattttctttgatggaagagggcccc

SEQ ID NO: 100714 - DNA, 1641 bp, Zea Mays
agatgatgtaaggccataccaaagccatatttttcatgaggttgcatccaatggcagtcctaaattagactctgacgtcgaaaggcaaagtaataaaaaaaattggcagataacatggtcgaacagaccaatcaatgtgagcttagttttgtgaaggctgagcagctgaacggaggtaaaaccgggcaggcacacgttgagaactattcgtacgacaaggatgttgtagagatcaaactgccagacacagttctttctcctgatcatggtgcccattaattttgttaaggatgtctgcatcgatgaaggagttcgtcctgatcaaagggctccagcagacaggctagtagatcaagaggtgtccatacaccttgattactcagaatgtataaatggtgacctcagggaagagattagtgctgactctacaaaaactgcgcttgaactaaaaccacaaatggttatcctgcctgtcatgtgtgaaactgatggcaatactggggaacagaactcatgcaaaaagcatgatcttgaagatagcaacactgcagatgtatctcctggttctaatgaggatgaattaaatcccaaacaactaccatgccatgaagttgcacaagattgccaggaggttggcagtgtcattccggagagcaatgaaaatcaggaccggtttttcactgcagaagcaacccatcaggtttcatcgaatgattgttacggaactggaattggtattgtattggagaccagtaacgtcattcacagcgatttaccagcacagccagccgccgccgccgctgatttctcggcggcggcgacacctgaggaagtcgctgtcagcgccgcatccgatatggaagggtgcaagcaagctaatcactacaaccctttcatcgcctatggatcactatcactagacgggacatgggaccaacctggttactactaccctctccctgctaccgttgtggatgccgcctctacagcgcccacctgtcctgttgaaaagacagacagttttagctgggagggttgtttcatcctgttggaatgggcggtgaagctgctgaagccaccataattgaggagaataggttagatcgtgctgaagaaagttcaagagcgttggacgacgtccaagcatctgaacagtgtaacggccagagagagagtcacgtaccttattccggcaacgtctctcttcgatcggaaagtagcacaacgagcgctcggtcctttgcatttccagcgctgcagaacgagtggaacagcagccccgtgaagatggcgaaggccgaccgcaggcgtgtaaaggaagaccggggctggggctacagaatcctttgctgtaaattctgaatgcgcttgcccctccctgcatcctcttttttttctttttgcctgtcgagtgaattctgaaattcgttcagatgtttctctcctctttcttttcctggccccccaatgccctgctagttgttcttatttatctctagcaggttaatggcttgtcgtcggatccggtagtggcttgtaatttacaaaacactatggtgagtgaggaatgaaggtatagttttgatatagaattattttgtgtatactacttgttgaagtattgtcattcctgatgacaat

SEQ ID NO: 100715 - DNA, 258 bp, Zea Mays
gtctccaccctccgctccgggcgactcttttctgtgcatcgcggaatttttgttgggttctcgggctccgccgcgatcccatcccatcctcgccttgccggcctttcccccgcggcttcgcccggagctttcctttctggccggggccgcagcagagaagcggaacagaattgcggcggcggcgacgacgacttgcccacgcagactcaaaggtcagagctagctcctccggtcattcgctccgcctcctgtcctggg

SEQ ID NO: 100716 - DNA, 373 bp, Zea Mays
tcttgcccgtggccgatctcttccctccgctcgcagtgtcgcagtccggaacgagaccgcgctcggttgagcaccacctggggcccagcgccccagcgtcctcgtgaccacctcggcgcggcatccgccctctgcagccccggtgtctccgcgaccggctccggtgcatccggaacgcagctccacaggtggatctccgtccgcacagcgccacgatcctctctccttaccacgccaacagctcgtccctctcggtccctctccgtccgcggaggtcctcccgacgtactccgcctactcgggattcggctccatcaccgccgaggtcgtctacgcaaactacgccaactacgcgattgcagcgcgcgagcag

SEQ ID NO: 100717 - DNA, 2569 bp, Zea Mays
ccaaatcaagcacaacccaccgccgcgtgcctccaccgctccggtctgtctccagcaacggcggcggccatgcaggtgccgggccgcctccggcgcgtcctccgggcgccgccacccagaatcctactctaccgcgcgatctcctccccgccgcccggtggcggcagcggggtggcggtgaagcaggtgacgcgggggaacatggaggaagccctggagaagctgcggggacgcgtgcgggaggccgcattcgtggggttggacctggagatgagcggcgtcacgagcgcgccctggagagacaccttcgagctcgaccgcgccgacgtgcgctacctcaaactccgcgactccgcggagcggttcgccgccctacagctcggcgtctgccctttccgatgggaccctgccaagtccgccttcgttgcccatccgcataacttctttatcttccctcgcaaggagctccctagtgattgttcatctcatgagtttctttgtcagacaacttcaatcgagttcctagcaaagtaccagtttgatttcaacacatgcttccgtgaagcacaagaggaagaagcgctacagaaatttaacatgttgcatcatggccgaacagttacatcttccactaattctgaagaggatggagacatgcctttaaagagtgcttctgatattcttttcacggaaaggatgaaaatgaacttcaaggaatggcgtgatgcgatagccagcaagccaatggttgacaaccatttgtcaggaaacattaaatgtggttcaggacaattccagacagttttcttcaaaatgcgccctgctattattcttaatggattctcatcacatcaattgaagttaattcaacaggttttgagaaaaaactttagggatcttatttttgtctgtacatttggtgaggatgacacatctgaaaagaaagtagtttattcagacactgatgaggacagaatattattaatgaaagatgtgcaggaagatctactaaaaaacagggaagaaagaatcaaatcagcaataggaatccgccatgtcatcgaccttctttcatcagaaaggaaattgattgttgggcatagttgtttcctagatattgcacaagtgtacagcaagtttgtacgtcctcttccatcatctatcaaggaatttgcgttaagtttccacaaatttttcccacacattgcagataccaggcatcttatgtctgtcaatcaagcagttcagaaactgatgaagcacaaaagcaaatcactatcttcagctttcttattgttgtgccctgcatcttattcatctgttgagaagccatccagtcattctcctgtgacaattgaagttgaaggagatgaaacgatgtcttctcgcttcatttctggtgccaagcatgaagctgggtacgatgcatacatgactggatgcatttttgcgcagttgtgtgcttatcttggcatacaatttgagcagttctcacctctggataacctagcaacgaacactaagctgcagaaacacatcaattttttgtcccctagctggaacagtggaacagtgcttgatttgagcactggcatggagacaccagatccaggttatacgagaaggtaccctgctgctgtgtatgataacattgttgtcatctggggattcctgtctaaggttagaccgaaggaaattaaggattgcatctgcaaagtatttggttcaggttcagttacaaccgtcttctcaattgattccactgctgcccttgtgcagttcaagaaacaagagtctgtaaacgatttcttggatttgaaggctgttttggagagggcagatagtgctatctcaattctacaccccctgtcaactatattggaaggaggccaaacacgagctgcaaagtatgatacctacagagacatatgcagctcttctgaatcaaaatatctctttgctgatcaagctgaagcagtctgtgcaacctcaaagaatcaactcatagaaaatgttgatggcaatcttatatctgatgttcttgatggagtcgcactcgcctctgtaaccgaggaagatggaataataccgagttcgaagaatcaaaacgttgctgaagctacatgttaggatatagcttagatgctctatacgatggcaaaacattgtttgtgcagacgaatgtgaagctaattactactatcgacctttttcagcaggttattggcctggccttctatttgaggctcactgactaggccaatattttgatgggtattctttttaccagtatctttaggcacagtgccatctctagcatccgcacggtgcaagctctgaactacagagtaaatctatacttatgcagggaagcattcttcttgatgccatttactaggatgatcaatgcattgttacatcatctatcttgggtgtagtagctgtgaactttttattaatgtaatgacaagatagagtaaaatatggccagtccctaaacttgttacggggcatattttagttcctcaaacccccacaatgtattttcaagtttctatggttcctcaga

SEQ ID NO: 100718 - DNA, 2849 bp, Zea Mays
aagaacacaaagctagagataatgctagttagatgtttttttgtatctttgaattagattgtgtgatgtaattttacttttgttatgaacattagacaataaactgaacttacgaactttgtatacatctgattatactctttttccttctaacaaaatgcgaggtagacattgcatagatgtggtaactttaatacaaatattaagtttgattttgtataaatttatttgtcttatattttatttgttttattatttttttgaatttagggctctaatatgaattttgggccaaaaactgaatttcgggccaaaaattgaatttcaggtcctaatgtgaatttcgggcttttataattttgggccgcccgaaataagcccggcacgtttaagcaattacgggccgggccgtgggccgagggctaggcccatgggccggcccggcacggcccgaaattcaaacgggccgggccggcccaaaattcaaacaatacgggccttttcgggcttgggccggaccgggccgggcggcccgaatgtacacctatagcgacaatgtcaaaacttgagatacagcccaagtttacactccagaagatgggccctaaccatcagaccaaatcaagcacaacccaccgccgcgtgcctccaccgctccggtctgtctccagcaacggcggcggccatgcaggtgccgggccgcctccggcgcgtcctccgggcgccgccacccagaatcctactctaccgcgcgatctcctccccgccgcccggtggcggcagcggggtggcggtgaagcaggtgacgcgggggaacatggaggaagccctggagaagctgcggggacgcgtgcgggaggccgcattcgtggggttggacctggagatgagcggcgtcacgagcgcgccctggagagacaccttcgagctcgaccgcgccgacgtgcgctacctcaaactccgcgactccgcggagcggttcgccgccctacagctcggcgtctgccctttccgatgggaccctgccaagtccgccttcgttgcccatccgcataacttctttatcttccctcgcaaggagctccctagtgattgttcatctcatgagtttctttgtcagacaacttcaatcgagttcctagcaaagtaccagtttgatttcaacacatgcttccgtgaaggaatatcttatctatccagagcacaagaggaagaagcgctacagaaatttaacatgttgcatcatggccgaacagttacatcttccactaattctgaagaggatggagacatgcctttaaagagtgcttctgatattcttttcacggaaaggatgaaaatgaacttcaaggaatggcgtgatgcgatagccagcaagccaatggttgacaaccatttgtcaggaaacattaaatgtggttcaggacaattccagacagttttcttcaaaatgcgccctgctattattcttaatggattctcatcacatcaattgaagttaattcaacaggttttgagaaaaaactttagggatcttatttttgtctgtacatttggtgaggatgacacatctgaaaagaaagtagtttattcagacactgatgaggacagaatattattaatgaaagatgtgcaggaagatctactaaaaaacagggaagaaagaatcaaatcagcaataggaatccgccatgtcatcgaccttctttcatcagaaaggaaattgattgttgggcatagttgtttcctagatattgcacaagtgtacagcaagtttgtacgtcctcttccatcatctatcaaggaatttgcgttaagtttccacaaatttttcccacacattgcagataccaggcatcttatgtctgtcaatcaagcagttcagaaactgatgaagcacaaaagcaaatcactatcttcagctttcttattgttgtgccctgcatcttattcatctgttgagaagccatccagtcattctcctgtgacaattgaagttgaaggagatgaaacgatgtcttctcgcttcatttctggtgccaagcatgaagctgggtacgatgcatacatgactggatgcatttttgcgcagttgtgtgcttatcttggcatacaatttgagcagttctcacctctggataacctagcaacgaacactaagctgcagaaacacatcaattttttgtcccctagctggaacagtggaacagtgcttgatttgagcactggcatggagacaccagatccaggttatacgagaaggtaccctgctgctgtgtatgataacattgttgtcatctggggattcctgtctaaggttagaccgaaggaaattaaggattgcatctgcaaagtatttggttcaggttcagttacaaccgtcttctcaattgattccactgctgcccttgtgcagttcaagaaacaagagtctgtaaacgatttcttggatttgaaggctgttttggagagggcagatagtgctatctcaattctacaccccctgtcaactatattggaaggaggccaaacacgagctgcaaagtatgatacctacagagacatatgcagctcttctgaatcaaaatatctctttgctgatcaagctgaagcagtctgtgcaacctcaaagaatcaactcatagaaaatgttgatggcaatcttatatctgatgttcttgatggagtcgcactcgcctctgtaaccgaggaagatggaataataccgagttcgaagaatcaaaacgttgctgaagctacatgttaggatatagcttagatgctctatacgatggcaaaacattgtttgtgcagacgaatgtgaagctaattactactatcgacctttt

SEQ ID NO: 100719 - DNA, 759 bp, Zea Mays
tggaggttgagtatcgatgtatccagatcatagagattggtcttccaatgggtaaacatattaggatgagagacaccccgggggtctgaaatctgatgttgagtccgcattgcaagttctgaattttgcaatataagttgactgagatgggagagcatgaacaagtggatagacttgagctctggaaacaatccaatggatgtggatgtagggaacacttcaagtgaccaacatgttccaacagagaggttgcacataacatacaagtctgaagctttgttttgtttatgcctaatccttagctgtccttgttttttgataacatgcgggattgaagcatctgaagtaattcttggtaagcatgtgttggaaaaccatatagatcaaatgtcaactgatgaagtcgagcaatcgattaacagggactacaagatacaaacagggtaatgatgtggaatggtattgttcgaatcgtatagctaccattgtagcaagatgtttacctacaggtcccctggccatgatgtgtcatgatggatgtctgatgaatccagctaaagctctacatttgtaatgaacgctttctgacgggggcacgacgataacgcgctttctattctagtatgcttagttagattcaatgttagcgcaaatgactgatgataagtttttcagttagtattttaatttggatttagagtacacttatgtatgatttatttcacaatgcttatttatgagacattgaattgtacttat

SEQ ID NO: 100720 - DNA, 1631 bp, Zea Mays
acaactcccaacggctaacgtccaccccaatccaattagccagcccacctctgctctgcgggcgcttcagatggaagcactagccattggatccgcgcctcgccgtccgggcgcaaggtactcccaactccgccgccccggaaccctcgccgtcaccaccacagccacagttgcatgccgccccctcacggcgccctccatggacgccgccgttggccgcccgagccgcgcgcctatccgctgcaccagcgcggagacggactcggtggatgaggtcgcgacgagctcgcacgccgcggaggccaacgcggggggcaccacggagcaagagggcaacgggagccccgtggccgccgctgccgcgtactcccccgtggtcgccggcgtcgacgggataaggatccggcggcggcccgtgacggggcccgcggtgcactacgtgggcccgttccagttccgcctcgagaacgaggggaacacgccgcggaacatcctcgagaaaatcatctggaacaaggacgtcgaggtttcgcagatgaaggagaggaggcccctgtacatgctgaagggtccgcttgaggctgctccccccgctagggacttcgttggggcgctcaaggcgtcctacgatcgaactggcttgcctgctctgattgcggaggtcaagaaggcttcaccaagccggggtgttatcagggagaattttgatccgatcgctcaggcatatgagaaaaacggagcagcatgccttagtgttcttacagatgaaaagtactttcagggaagtttttacaacttggaggctatacgcaatgctggagtccagtgccctcttctgtgcaaagagttcattattgatgcttggcaactttactatgcacggtccaagggtgcagatgctgttcttctaatagctgctgtattacctgaccgcgatatcaaatacatgttgaaaatttgcaaaatacttgggatggctgctttagttgaggttcatgacgaaagagaaatggaccgtgttttagggattgatggtgtacagctcatcggcatcaataaccgtaatctcgagacatttgaagttgatattacaaacacaaaaaagcttctggaaggtgaacgaggacaggttatagctcaaaaggatgtaattgttgtaggagaatctgcgctgttcactcctgatgatatctcgttcgttcaaaacgctggggtcaaagcggttctcgtcggggaatccctcatcaagcaggaggatccagggaaagcaatcgctgggcttttcggcaaagatatctcgcatgctggtgctacctagagacgacgcagaagagcaacagaataccagaaacgctactccgggttgcatcattttgtgtaggggagaaaatcgagcgttgcaatcagaaatccaccctttcgcagagttttgatcggtcgttttgtttacctgacctgccaacttccccatgctgctatttttttgtgaccgagccatctcaataattacagattttagtgcacaagatgtatatgttcaaaaagttggatgtagtttcaagcagcttgatttttgcctatctaggcttcatctgcactattttttctaatataaaactagtaagaaaaaa

SEQ ID NO: 100721 - DNA, 1641 bp, Zea Mays
acaactcccaacggctaacgtccaccccaatccaattagccagcccacctctgctctgcgggcgcttcagatggaagcactagccattggatccgcgcctcgccgtccgggcgcaaggtactcccaactccgccgccccggaaccctcgccgtcaccaccacagccacagttgcatgccgccccctcacggcgccctccatggacgccgccgttggccgcccgagccgcgcgcctatccgctgcaccagcgcggagacggactcggtggatgaggtcgcgacgagctcgcacgccgcggaggccaacgcggggggcaccacggagcaagagggcaacgggagccccgtggccgccgctgccgcgtactcccccgtggtcgccggcgtcgacgggataaggatccggcggcggcccgtgacggggcccgcggtgcactacgtgggcccgttccagttccgcctcgagaacgaggggaacacgccgcggaacatcctcgagaaaatcatctggaacaaggacgtcgaggtttcgcagatgaaggagaggaggcccctgtacatgctgaagggtccgcttgaggctgctccccccgctagggacttcgttggggcgctcaaggcgtcctacgatcgaactggcttgcctgctctgattgcggaggtcaagaaggcttcaccaagccggggtgttatcagggagaattttgatccggtgggttcagatcgctcaggcatatgagaaaaacggagcagcatgccttagtgttcttacagatgaaaagtactttcagggaagtttttacaacttggaggctatacgcaatgctggagtccagtgccctcttctgtgcaaagagttcattattgatgcttggcaactttactatgcacggtccaagggtgcagatgctgttcttctaatagctgctgtattacctgaccgcgatatcaaatacatgttgaaaatttgcaaaatacttgggatggctgctttagttgaggttcatgacgaaagagaaatggaccgtgttttagggattgatggtgtacagctcatcggcatcaataaccgtaatctcgagacatttgaagttgatattacaaacacaaaaaagcttctggaaggtgaacgaggacaggttatagctcaaaaggatgtaattgttgtaggagaatctgcgctgttcactcctgatgatatctcgttcgttcaaaacgctggggtcaaagcggttctcgtcggggaatccctcatcaagcaggaggatccagggaaagcaatcgctgggcttttcggcaaagatatctcgcatgctggtgctacctagagacgacgcagaagagcaacagaataccagaaacgctactccgggttgcatcattttgtgtaggggagaaaatcgagcgttgcaatcagaaatccaccctttcgcagagttttgatcggtcgttttgtttacctgacctgccaacttccccatgctgctatttttttgtgaccgagccatctcaataattacagattttagtgcacaagatgtatatgttcaaaaagttggatgtagtttcaagcagcttgatttttgcctatctaggcttcatctgcactattttttctaatataaaactagtaagaaaaaa

SEQ ID NO: 100722 - DNA, 1792 bp, Zea Mays
cgccgctactgctagcgctagacaggtggttcagagacgccgtctcggtaaagcagcgggaagactcgcacgcgtacaactcccaacggctaacgtccaccccaatccaattagccagcccacctctgctctgcgggcgcttcagatggaagcactagccattggatccgcgcctcgccgtccgggcgcaaggtactcccaactccgccgccccggaaccctcgccgtcaccaccacagccacagttgcatgccgccccctcacggcgccctccatggacgccgccgttggccgcccgagccgcgcgcctatccgctgcaccagcgcggagacggtcagattcccggtctcgatatgggttcgcctcgaattccgagttgtgaggtttcgggtgggtgtcgtggtgtcgtgcaggactcggtggatgaggtcgcgacgagctcgcacgccgcggaggccaacgcggggggcaccacggagcaagagggcaacgggagccccgtggccgccgctgccgcgtactcccccgtggtcgccggcgtcgacgggataaggatccggcggcggcccgtgacggggcccgcggtgcactacgtgggcccgttccagttccgcctcgagaacgaggggaacacgccgcggaacatcctcgagaaaatcatctggaacaaggacgtcgaggtttcgcagatgaaggagaggaggcccctgtacatgctgaagggtccgcttgaggctgctccccccgctagggacttcgttggggcgctcaaggcgtcctacgatcgaactggcttgcctgctctgattgcggaggtcaagaaggcttcaccaagccggggtgttatcagggagaattttgatccggttcagatcgctcaggcatatgagaaaaacggagcagcatgccttagtgttcttacagatgaaaagtactttcagggaagtttttacaacttggaggctatacgcaatgctggagtccagtgccctcttctgtgcaaagagttcattattgatgcttggcaactttactatgcacggtccaagggtgcagatgctgttcttctaatagctgctgtattacctgaccgcgatatcaaatacatgttgaaaatttgcaaaatacttgggatggctgctttagttgaggttcatgacgaaagagaaatggaccgtgttttagggattgatggtgtacagctcatcggcatcaataaccgtaatctcgagacatttgaagttgatattacaaacacaaaaaagcttctggaaggtgaacgaggacaggttatagctcaaaaggatgtaattgttgtaggagaatctgcgctgttcactcctgatgatatctcgttcgttcaaaacgctggggtcaaagcggttctcgtcggggaatccctcatcaagcaggaggatccagggaaagcaatcgctgggcttttcggcaaagatatctcgcatgctggtgctacctagagacgacgcagaagagcaacagaataccagaaacgctactccgggttgcatcattttgtgtaggggagaaaatcgagcgttgcaatcagaaatccaccctttcgcagagttttgatcggtcgttttgtttacctgacctgccaacttccccatgctgctatttttttgtgaccgagccatctcaataattacagattttagtgcacaagatgtatatgttcaaaaagttggatgtagtttcaagcagcttgatttttgcctatctaggcttcatctgcactattttttctaatataaaactagtaagaaaaaa

SEQ ID NO: 100723 - DNA, 1712 bp, Zea Mays
cgccgctactgctagcgctagacaggtggttcagagacgccgtctcggtaaagcagcgggaagactcgcacgcgtacaactcccaacggctaacgtccaccccaatccaattagccagcccacctctgctctgcgggcgcttcagatggaagcactagccattggatccgcgcctcgccgtccgggcgcaaggtactcccaactccgccgccccggaaccctcgccgtcaccaccacagccacagttgcatgccgccccctcacggcgccctccatggacgccgccgttggccgcccgagccgcgcgcctatccgctgcaccagcgcggagacggactcggtggatgaggtcgcgacgagctcgcacgccgcggaggccaacgcggggggcaccacggagcaagagggcaacgggagccccgtggccgccgctgccgcgtactcccccgtggtcgccggcgtcgacgggataaggatccggcggcggcccgtgacggggcccgcggtgcactacgtgggcccgttccagttccgcctcgagaacgaggggaacacgccgcggaacatcctcgagaaaatcatctggaacaaggacgtcgaggtttcgcagatgaaggagaggaggcccctgtacatgctgaagggtccgcttgaggctgctccccccgctagggacttcgttggggcgctcaaggcgtcctacgatcgaactggcttgcctgctctgattgcggaggtcaagaaggcttcaccaagccggggtgttatcagggagaattttgatccggttcagatcgctcaggcatatgagaaaaacggagcagcatgccttagtgttcttacagatgaaaagtactttcagggaagtttttacaacttggaggctatacgcaatgctggagtccagtgccctcttctgtgcaaagagttcattattgatgcttggcaactttactatgcacggtccaagggtgcagatgctgttcttctaatagctgctgtattacctgaccgcgatatcaaatacatgttgaaaatttgcaaaatacttgggatggctgctttagttgaggttcatgacgaaagagaaatggaccgtgttttagggattgatggtgtacagctcatcggcatcaataaccgtaatctcgagacatttgaagttgatattacaaacacaaaaaagcttctggaaggtgaacgaggacaggttatagctcaaaaggatgtaattgttgtaggagaatctgcgctgttcactcctgatgatatctcgttcgttcaaaacgctggggtcaaagcggttctcgtcggggaatccctcatcaagcaggaggatccagggaaagcaatcgctgggcttttcggcaaagatatctcgcatgctggtgctacctagagacgacgcagaagagcaacagaataccagaaacgctactccgggttgcatcattttgtgtaggggagaaaatcgagcgttgcaatcagaaatccaccctttcgcagagttttgatcggtcgttttgtttacctgacctgccaacttccccatgctgctatttttttgtgaccgagccatctcaataattacagattttagtgcacaagatgtatatgttcaaaaagttggatgtagtttcaagcagcttgatttttgcctatctaggcttcatctgcactattttttctaatataaaactagtaagaaaaaa

SEQ ID NO: 100724 - DNA, 1987 bp, Zea Mays
acagtgccgcagtatcccaagtcccaacaaggtcaagtcgcgtggattcgccactagcgggtattgattaccttgccgccccttgaccaaaccaaataacacaagtccccattgcttgcaccctacagctcctcacacccaaggtatggaggaggcaccaacgagggagccgaagaggctgcgccaggacgccgcggttacttccgccgcggcggcggctgaggagcctcagtacgtgtacctgcctatcgccgacgccatgaaggttcccggcgtccgggtttgcctcttcgccgttgtctccgagatcggcatcaccgaccgcagccgtggcacggatttcactcttaggttgaggattgtggatcaatcatgcatggatggaatctctgtaacagtttttgctgacaaaactactctattgccttgtgtcaagtcaagtggagatgtgatcagtctccataacgtcatgataacgatgcatggggagttctttgtttcatttaacaaagaagtttcttcatttgcgctatttgaaagcaaagtagctgagtgcagcccatatcagacttctgtgaaatatcatggcagcaaacatgacaaagaacttttaacccagatgagaacgtggcttgcatataatcctctaggtctgaaagattttgaattgcagttaagaagtttaaaatctgattctacttttgatctagtatgcaaggttgttcatgtccatgaagataacgacaaattgatattttatgtttgggatggaactgatacccctgctgttgagtttcaggcaactttggatccaaaggcagttgaatcaccccctctatttgaagggccacctctacccagggaggttttgtgcacaatgccaattatcggaactgttttgaggattttttcagatatgcctatcaaggaagtatcccacatgcaaaatagggtttattgggccagattctgtaacattacttgcaaggaagagtttggcatttggaaaggcattttgctggcctctagtaaagttcggcttttatctcatgaagatggtagcgttgttgatcgtcgaaagatgtatgccattcgtaaggccaaccaagttctctgccagccgatggcaagctttccctctaatgttactgttctatcagatgtagaatatgaggaagaatggcactcaacgttaatgcagtctttaactcataaagaggtgacacacaaactcaaaaccttggcccgtgttgtgggagcgtatccatgtcaagctagtggtctccgtttgctgtcaactggtaacattcatctgcggttgactcttgaggatcctacagcgagaattcatgcgtacgtccataagaattatctggtccaattcttcggtggttttctgacagaagaagcgataacaaagaagatgaacaagctacttggtatcccagaaccagaggacagcgaggaaggtgcccccttgactaggaatccaccttggatatggtgctgcttgacatcattctatatggacaaaaacaatccctgggacagcagaaagtaccgaatctttgccacagagatgagggattgaggagggatgctgctcgaatatgcaggaacggccttgcaaatgaaccgaactgattctatgtagtatttctgtgtgctctcgttggcattttgcttggaggggcatcttgctgggatgcagcgagacacgctttagttgtagcctgcgtactgtcagtattattccctagatgcaatgttgttgcagtgctgctgctgaccttctgctccatccagaacactggtagcagtctgtatgcgcgcccacgctacagaactctagattatcttgtgaaatgttagtgcacacagcaccaacttttggcttggaagttggaacgtggcaagaaccccttttcttgttcggcgccttgcagttctctcggtttccacgaaatgggtatatgttccttgtgaa

SEQ ID NO: 100725 - DNA, 1768 bp, Zea Mays
attgattaccttgccgccccttgaccaaaccaaataacacaagtccccattgcttgcaccctacagctcctcacacccaaggtatggaggaggcaccaacgagggagccgaagaggctgcgccaggacgccgcggttacttccgccgcggcggcggctgaggagcctcagtacgtgtacctgcctatcgccgacgccatgaaggttcccggcgtccgggtttgcctcttcgccgttgtctccgagatcggcatcaccgaccgcagccgtggcacggatttcactcttaggttgaggattgtggatcaatcatgcatggatggaatctctgtaacagtttttgctgacaaaactactctattgccttgtgtcaagtcaagtggagatgtgatcagtctccataacgtcatgataacgatgcatggggagttctttgtttcatttaacaaagaagtttcttcatttgcgctatttgaaagcaaagtagctgagtgcagcccatatcagacttctgtgaaatatcatggcagcaaacatgacaaagaacttttaacccagatgagaacgtggcttgcatataatcctctaggtctgaaagattttgaattgcagttaagaagtttaaaatctgattctacttttgatctagtatgcaaggttgttcatgtccatgaagataacgacaaattgatattttatgtttgggatggaactgatacccctgctgttgagtttcaggcaactttggatccaaaggcagttgaatcaccccctctatttgaagggccacctctacccagggaggttttgtgcacaatgccaattatcggaactgttttgaggattttttcagatatgcctatcaaggaagtatcccacatgcaaaatagggtttattgggccagattctgtaacattacttgcaaggaagagtttggcatttggaaaggcattttgctggcctctagtaaagttcggcttttatctcatgaagatggtagcgttgttgatcgtcgaaattctatcagatgtagaatatgaggaagaatggcactcaacgttaatgcagtctttaactcataaagaggtgacacacaaactcaaaaccttggcccgtgttgtgggagcgtatccatgtcaagctagtggtctccgtttgctgtcaactggtaacattcatctgcggttgactcttgaggatcctacagcgagaattcatgcgtacgtccataagaattatctggtccaattcttcggtggttttctgacagaagaagcgataacaaagaagatgaacaagctacttggtatcccagaaccagaggacagcgaggaaggtgcccccttgactaggaatccaccttggatatggtgctgcttgacatcattctatatggacaaaaacaatccctgggacagcagaaagtaccgaatctttgccacagagatgagggattgaggagggatgctgctcgaatatgcaggaacggccttgcaaatgaaccgaactgattctatgtagtatttctgtgtgctctcgttggcattttgcttggaggggcatcttgctgggatgcagcgagacacgctttagttgtagcctgcgtactgtcagtattattccctagatgcaatgttgttgcagtgctgctgctgaccttctgctccatccagaacactggtagcagtctgtatgcgcgcccacgctacagaactctagattatcttgtgaaatgttagtgcacacagcaccaacttttggcttggaa

SEQ ID NO: 100726 - DNA, 753 bp, Zea Mays
gctctcgttcacagtgcaagcgaggcttaattggtagtaggctgctcttgttgcgccggcagcggcaggcggcagcgcaaaacattaaaccatcatttgcggcggcggctgctgccggcgacgcgatgtccaagcaaaagtccgtgatcaggctgggcgtaccgaacgacaagaaccggtctaaggccatgcagatggcatccaagttcgtgggagtgaactcggtggggatcgccggcgacgccaaggaccggctggaggtggtgggggagagcgtcgacatcacctgcatgatcaacctgctgcgcaagaaggtctgccgcgccgacatcgtcgtggtggaggaggtcaaggacaagaagaaggaggaggaggagaagaagaagaaggaggaggaagagaaaaagaagaaggcggaggaggaagccaagaagaagaaggaggaggaagagctcaagaagaagctctgtccgtacctgtacccgccgccgccgtgctccggtgcctgttgccgcgggccgtcgccgccgatgtttctgtgcgagccggaacagccagcgggatgccacatcatgtgacgatgaagtgaagctccgtgaataatcgtcccgtccgaacttgtgcacatgcgtggttgtggttttgctttggcatctgaattacaatcctaagtgatcatggaatttagatcactacttatatataaagtattgttttgtgagtttgtttttaagttaagatgttctaaattcg
